United States Patent Application Publication US 2005/0228172 A9 - sequence listing, part 168

SEQ ID NO: 749066 - DNA, 623 bp, Homo sapiens
gttgtctatggagaaaatgttcagtaacactcatgataagaaaatgcatatccacaattaacaaggatgcaatttcccatttatcaaaaattcagaagcttgacaagtcctatagatagttgtgggaaaatcggcactctcatatatcacttgtacatataaaaaatgaatgatgacatttttatttaggagtatttattaatatatagtgaaattatagatgtattttctctgaccaagtaatctcagttttgaaaatctggttttaaaaattctaatatatttaataacataaatatatatgtggtagctctactgaaatagacaagtggagactagaagaagcttgaagacaaatccatcacaaatgcattgaacaaaatatggtatgtattttaggataaataaakacttaatgaggaaagtttttaatgtaagattttagctgtattagttttctaaggctgctataaaaaaataccacaaaatggatgacttaaaacaacagaaatatatttatttacaattctggagattagaagtctaataaaggtgttggcaggctcatgttctctctgacggttctaggggaagatacttccttgcctttttccagcatctga

SEQ ID NO: 749067 - DNA, 581 bp, Homo sapiens
atgattttatcttagaatataaaatccttaagggtcagaatctcttcagtttccgtaagtgctatatctgcagtgtctagcattcttgtctggtggcacttacattttgttgaattgatgttcaattaattaggacattgaatccaggcttgacttccaaatattttcattgatakagagaagccacagcagttctagagaaaagagaagtaagttcactaaggaacttcaaatgaaattaatatgaatgattttggagaacactcaggaaccatttatgtatttcacaattatataaaggctctttattagaaaaatgtaaaaaaaaaaaaaaaaagcaactgctctgtattgtcacaaacttctaaatcaaaaggagaaacaaagaagaggactttcactggccctaaagaagaacttgaactatcttcaggttctgggaagtagtattttcagcgcccaacatattgtgcctttcttcagctaccctacctttatcaagagggcagagactgttggttgcttacccggtaactcttctccccttcatggttagtaacagaaccctgattttatttcag

SEQ ID NO: 749068 - DNA, 580 bp, Homo sapiens
ttctgtgtgtccacaagcccaacaccatgtggaagccaccaaggcctggggcttgcaccctctgaagcaatgacctgagctgtaattggccccttttagccatggctgggacacagggcaccaagttccaagaccgcacaaagcagcaaggccctgggcctggcccatgaaaccatttttttcctcctaggcctccaggcctgtgatgggaggggctaccatgaagacctctgacatgtcctggggacgttttcctcattgtcttggtgattaacatttggcttctcattacttatgcaaatgtctgcagctggcttgaatttctcctcaraaaatgggtttttcttttctatcgcattgttaggctgcaaattttctgagcttttatggcctgcttcctcttgaacactttgctgcttagatttcttccaccacatgccctaaatcatctctctcaagttcaaagttctacacacctctagggcagaggcaaaatgcggccagtctctttgcatagcaagagtgacatttactccagttcccaagttcctcatctttatctgagaccacctcagcctga

SEQ ID NO: 749069 - DNA, 583 bp, Homo sapiens
caaaaaagaatggcccctgaggatccacagaagagatgcccaatgctgcctgcatcctcttaagtcagtatggtgctgagcgtgtctgaatgcttagttagcctaaaaggaattaccaaatgagtatggcagaagtcttcctattttaatgaatatactattacccacagactagtcattcctctcttgcccttataaatatattagagatccttgtaataattagcacaatgatttgtaggtgtgtgctagtgagtttaagtgcttatacctagttttctaaaacagacaaaaatatacctcctgaaatcttatttacataatgaatctgttaggcaaagcctgtttccatgcaaacaacaaatgatatagcctaggccaagcacgaaatatgaattagttggaacagagagaatggggtttgagtgaaggtataataaacayggctcttatccagcctggttctctctgctcacaggccagctgaagtttttgacatactgttccataagggtggaggtgaaatgtgttcactcacaaactacacacgtctgaacacagcgacatgtaccaaggaatgttc

SEQ ID NO: 749070 - DNA, 575 bp, Homo sapiens
tttaattaaaccattgtgattctgcttttggctgttaagtcagatagtgataactgaaactgttaagtcagatccggaacttgaggactccagggtccagtggagtccagtggttctagtgtcaggctctctgtgccttatctcatgggaaccttctgagaaccaggaggtagtggctgagatttcccccactagagatgaagggacctgcctcggttaatgagtagtagcaccagaacctgaatctagcccagactagacccaaagccagtgattctaatcaccatgcctcatcacttactaatcgcatagtagctaatacctagtgtagtggatactgtaatgtgccacccaggaccccctggaagaatgaaggattcacacccccagctgatgatagtattgccrgagaatatctctctgctgtcagtctctccaacaattgactgaggctgaaaacaactgccttgcccaaggtcaatttccttccaggagccgcccacatctaatactgattgtttcaatgtgcaacagtactaaagggtcattccggcaggagacctggctgtaaggtt

SEQ ID NO: 749071 - DNA, 690 bp, Homo sapiens
ttgtcgaatagaaaagggggaaatgtggggaaaagaaagagagatcagactgttactgtgtctgtgtggaaagaggtagacatgggagactccattttgttctgtactaagaaaaattcttctgccttgggatcctgttgatctgtgamcttacccccaaccccgtgctctctgaaacatgtgctgtgtccactcagggttaaatggattaagggcggtgcaagatgtgctttgttaaacagatgcttgaaggcagcatgctccttaagagtcatcaccaatccctaatctcaagtacccagggacacaaacactgcggaaggccgcaggtcctgtgcctaggaaaactagagacccttgttcacatgtttatctgctgaccttccctccactattgtcctatgaccctgccaaatccccctctccgagaaacacccaagaatgatcaacaaatactattaaaaaaaaaaggtgaaatcaaagctggtgtcaagctcagatcccctgaggtgccacagttctctctctacccccaggtgcatcccaccctgagttaataggtaaaaccctggtcgtgaggtggtaactgctaaaattgtgcctaattcagctgatggacacagaaaggccacctctttaatgtatgagtgatgatcccaaaacacaactagaatgggagggatgactcgg

SEQ ID NO: 749072 - DNA, 690 bp, Homo sapiens
ttgtcgaatagaaaagggggaaatgtggggaaaagaaagagagatcagactgttactgtgtctgtgtggaaagaggtagacatgggagactccattttgttctgtactaagaaaaattcttctgccttgggatcctgttgatctgtgaccttacccccaaccccgtgctctctgaaacatgtgctgtgtccactcagggttaaatggattaagggcggtgcaagatgtgctttgttaaacagatgcttgaaggcagcatgctccttaagagtcatcaccaatccctaatctcaagtacccagggacacaaacactgcggaaggccgcaggtcctgtgcctaggaaaactagagacccttgttcacatgtttatctgctgaccttccctccactattgtcctatgaccctgccaaatccccctctccgagaaacacccaagaatgatcaayaaatactattaaaaaaaaaaggtgaaatcaaagctggtgtcaagctcagatcccctgaggtgccacagttctctctctacccccaggtgcatcccaccctgagttaataggtaaaaccctggtcgtgaggtggtaactgctaaaattgtgcctaattcagctgatggacacagaaaggccacctctttaatgtatgagtgatgatcccaaaacacaactagaatgggagggatgactcgg

SEQ ID NO: 749073 - DNA, 604 bp, Homo sapiens
cccaatctgggagtaatgggatttttcaggcaggcttcattactgtgcctcggtgccatttgactgataattgcattctgaagctggaattgataaattgcccatgcattgtcattactggatgtttacctgatctatttgatgaatattaattcacaaaaaaatatttccattcctgaagcgattctgggcaaaataatgcctttctctctcctaccagggattgccgaaacaatgtacagagttaagtaataacaagcccttgtcagagtgatttattgggcatgaaaacaaagagagaggaggacttcagcctctcctttattaagcaacacctgggggaaggaacacagcgttccattccagagctgggagcggacggcagagaggtggcatttgaaggccacagagaaaagagtttatacratatattcaccttttgccaaggtatcttccaaggagcaccaagatgtttcctatgtacccccgaccccatgctggggagcttatagagagagttgaaattggccaggcgcagtcgtcacgcctgtaatcccagcactttgggaggccgaggcgggcggatcacgaggtcaggagatca

SEQ ID NO: 749074 - DNA, 559 bp, Homo sapiens
gctttcctaccaccctgtgcctaaatgtcctcatttgctaaagaagagtattttatgacatgctgacctccttggattgttttaaaaatcaatacaagagaatataggtaaaagtactttgtaatacttaaaattatatacaaatgtgaggaccttkaacatatataccatcaaataaagatactctactttatttgtgtgagaaaaataactgaaatatcctgtgtttcaaagcacattgatacaatttcaggtatctgaattaaccgaaaaaataattcaagcacatgtaactgacagaatttttgtgggaattgctcggttcatctctacaaagagttttgttgggagttatctattactctgagtaaattttctcaattcctctttccatgttctcattgcttccaagacaaaacacaagacggtatagacaggttggtctgaaagattagaaaagatttttaaaacatggtagttcaatggacaagagctaagaatattttactgtaccatttttctacctgaatccataaccgggtgtatagtgtattccaat

SEQ ID NO: 749075 - DNA, 579 bp, Homo sapiens
agtactcagattttagtgtgtaaaagaaagaagtgaggggcttatttaagagagacattcggaggcctgatgcctagagagtttaattttaaactttctggaatggtccagaaatctatattttattagttatccaagtgattctgaaggaagcagtaagatctactttgaaaggtccactttgaaagcataactgattcctctgaactccttaaaagaatggagaggaatatcttagagtcataacctacttaagactaaaacttttaagaaggcaaatcctcaagacccacttgcccgattttccaaataacaatttccaaaaggtagaggatacaggtcaatgtgactyggctatctgtatttactgatcgataattaccaaagttaggcccctgtcctcacacagactgggaaagaggggctctgtctgtcttgatgatggcctgttaaggggatggctcccagacttttttctttttcttttctttttttttttttttttttttttgagatggagtctcgctctgtaacccaggctggagtgcagtggcataatcttggctcatgggacctctg

SEQ ID NO: 749076 - DNA, 639 bp, Homo sapiens
aaaagtaagtaggaggaatgaacagagcaaaaatcagtgaaatagagaagagaaaaacaatggagaacaacaataaaaccaaaaactcatacataacctcaagctagactattcaaggaaaaagaaaggcaaaaactacctatgttaagaattgaagagagaaaatcacaaacaatcctatatgcattaaaattataatattatgaaatttttatggcaataaartcaaaacttaatgaagtagtcaacttttgaaaggcacaaaaaatgaccaaaactaactgaagaagtaacagtagtacaatagctaaagaaatcaaattcataattaacttccccagacaccaccaccaccaccaaaccttcagggacagatgccgcattggtgaattctatcatacacatagcaacaaataattccaattctatgcaatctctttcagcatacaaaggaaaaacaaacctttttttcttgtaatacaaaaatatacacatgcataactaacaagcaataggggaaaatgtaaactattttaaataatctatacaataagaaaccatagaaaaaggaacacagaacatgttctgtgttctgtgtttatgtttatggagaaacataaatcaacttggaaggtagta

SEQ ID NO: 749077 - DNA, 639 bp, Homo sapiens
[276 bp omitted]ttgtagaactcaactcacaatctatttgtgaggctaaactacatccagactaaggattgttcaaaaaatgtttgctattgttattattattaaacttgtgttgtaaactctcagtaaagcgcacctggtgctcaaataatagtttatgaattgccttgaagagaatgtaagtacaatgaactttacagtggattctaaatgttcaatagaaatattttatagctaagctctagtttaacatgtattcttagaaacaacatgtatgagatgtgaaattgccattagcctagtggtagtagtaataggatgggccaggtgatgcacactcagcaaattaaccctgaaacataagaaaagtgtgtg

SEQ ID NO: 749078 - DNA, 639 bp, Homo sapiens
[276 bp omitted]ttgtagaactcaactcacaatctatttgtgaggctaaactacatccagactaaggattgttcaaaaaatgtttgctattgttattattattaaacttgtgttstaaactctcagtaaagcgcacctggtgctcaaataatagtttatgaattgccttgaagagaatgtaagtacaatgaactttacagtggattctaaatgttcaatagaaatattttatagctaagctctagtttaacatgtattcttagaaacaacatgtatgagatgtgaaattgccattagcctagtggtagtagtaataggatgggccaggtgatgcacactcagcaaattaaccctgaaacataagaaaagtgtgtg

SEQ ID NO: 749079 - DNA, 639 bp, Homo sapiens
[276 bp omitted]ttgtagaactcaactcacaatctatttgtgaggctaaactacatccagactaaggattgttcaaaaaatgtttgctattgttattattattaaacttgtgttgtaaactctcagtaaagcgcacctggtgctcaaataatagtttatgaattgcctkgaagagaatgtaagtacaatgaactttacagtggattctaaatgttcaatagaaatattttatagctaagctctagtttaacatgtattcttagaaacaacatgtatgagatgtgaaattgccattagcctagtggtagtagtaataggatgggccaggtgatgcacactcagcaaattaaccctgaaacataagaaaagtgtgtg

SEQ ID NO: 749080 - DNA, 611 bp, Homo sapiens
cctaaatgaaataagccagtcatagaaagacaaaggaggtatctaaaatattcaaattcagagaatcaaagagtggctgctggagcacaggtggaaggggaatggggacctactgatcaagaagcgtaaagtttaagttaagcaagagatctgctctacgagattatacttaaacaatactatattgtacacttaaaatttgttaagaaggtagatctcaggttgtgctcttaccagaataaaataatttgttttacaaaaraagcttctatttcttcggtatgtaaacctaaatccccagctactacacttcagatttgaaatgaattttgaattgttctgattaaattatttcatcataaaatcaccatggactctgacctacagatgggctccctcactgctactgagaactccaaacttctgccagctatactgctgccttccagacagatactttgtctggatgagatctcagtatcaaaagtaaatggatacagcttaagtgtctttccaagccaaatgttggactcatcacaactagaagaaaatggttatactaatttcttccatgagctccaagaaactgatttagtcttctatcttgctga

SEQ ID NO: 749081 - DNA, 569 bp, Homo sapiens
tcacttttattatttctgattgtgcttatttggatcttctctcttttttctttgtaaatctagctagcagtctatcgatctagcttatccttctaaaaagaaacttttggcttcattgattctttgtatacatttttggttctcaatttattcagttattctctgattttatttctttcttttcttctgctagttttgcggttagtttgttttttttttwagtttcctctagttcccctaggtgtgatgttagattgttaatttgagatctttataactttttgaggtaggcatttaatgctataaactttcctcttaacattgtttttgctgcatcccagagatgtctctgttttgatttctttgcaaatctttttttctgtcttaatttcattgttttcccaaaagtcatccaggagcaagttgattaatttccatgtgattgtgtggtttgagagatcttcttttttattgatttctatttctatttcagtatttattccacagtgaatcatttctattattcaacagtggtacaagagtatgattagtattatttcaattttcta

SEQ ID NO: 749082 - DNA, 621 bp, Homo sapiens
catccactcatctcaggaaaaatgtctctttcatattacattttttcatgttttagtatgtctctagaagctaatcactttttaaaaagacagtaacactcttacctacaaaattaacagcaattcactagtttgctcttcttttctataaaactccaactaaataagaacaagtatgaattctttaatagttcgttttcttcctaactcattattcaggtccacccatagtttataaacctttgaaagagctgcagactattctttattagtggtttactctcagtaattttaacactttaacaaacaatttatctgtagatgaccccaaagaatagcgtatcctgaatttaacaaagcatgtaagaaagttaagcaataatggtaatcattagagagatttcagcacaatggcaatttgagttgtattaaggttctgtgaaaaaaaatgcagcckgtaaatacaatctcagttttaaaaggctaatagtgttaccgggtttttttgtttttttttgttgttgttgtttgtttgtttgtttgttttgccacattggtttttctttccttgagaaaaccaagttcactttttgaggttttaatagttatgtgactgtaagc

SEQ ID NO: 749083 - DNA, 612 bp, Homo sapiens
gagcccgggagttcaatgttacagcgagctatgatcaccccactccactccaacctatatgacagattagcaccagtctcaggaagaaagagagagagacagagaataatttagaatgtttctttcttttaatatacttcgaaacagttttaaaagytttggaattgggccaggcgcggtgggctcacgtctgtaatcccagcactttgggaggccgaggcgggcggatcacgagaggtcaggagatcgagaccatcctggctaacacggtgaaaccctgtttctactaaaaatacaaaaaattagccagttgcggtggtgggtgcctgtagtcccagctacttgggaggctgaggcaggagaatggcgtgaacccgggaggcggagcttgcagtgagccgagatagcgccactgcactcccgcctgggcaacagagcgagactctgtctcaaaaaaaataataataataaataaaaataaaagctttggaattttctgttcctttatgaattttctgcgaaactactttatttctattgcggtaactggtccatttggattttctgtctcttctggagtcacttttggcaaattatatgtatctaactatc

SEQ ID NO: 749084 - DNA, 612 bp, Homo sapiens
gagcccgggagttcaatgttacagcgagctatgatcaccccactccactccaacctatatgacagattagcaccagtctcaggaagaaagagagagagacagagaataatttagaatgtttctttcttttaatatacttcgaaacagttttaaaagctttggaattgggccaggcgcggtgggctcacgyctgtaatcccagcactttgggaggccgaggcgggcggatcacgagaggtcaggagatcgagaccatcctggctaacacggtgaaaccctgtttctactaaaaatacaaaaaattagccagttgcggtggtgggtgcctgtagtcccagctacttgggaggctgaggcaggagaatggcgtgaacccgggaggcggagcttgcagtgagccgagatagcgccactgcactcccgcctgggcaacagagcgagactctgtctcaaaaaaaataataataataaataaaaataaaagctttggaattttctgttcctttatgaattttctgcgaaactactttatttctattgcggtaactggtccatttggattttctgtctcttctggagtcacttttggcaaattatatgtatctaactatc

SEQ ID NO: 749085 - DNA, 612 bp, Homo sapiens
gagcccgggagttcaatgttacagcgagctatgatcaccccactccactccaacctatatgacagattagcaccagtctcaggaagaaagagagagagacagagaataatttagaatgtttctttcttttaatatacttcgaaacagttttaaaagctttggaattgggccaggcgcggtgggctcacgtctgtaatcccagcactttgggaggccgaggcgggcggatcacgagaggtcaggagatcgagaccatcctggctaacacggtgaaaccctgtttctactaaaaatacaaaaaattagccagttgcggtggtgggtgcctgtagtcccagctacttgggaggctgaggcaggagaatggcgtgaacccgggaggcggagcttgcagtgagccgagatagcgccactgcactccmgcctgggcaacagagcgagactctgtctcaaaaaaaataataataataaataaaaataaaagctttggaattttctgttcctttatgaattttctgcgaaactactttatttctattgcggtaactggtccatttggattttctgtctcttctggagtcacttttggcaaattatatgtatctaactatc

SEQ ID NO: 749086 - DNA, 630 bp, Homo sapiens
gcagctctctataacaggggtgagcagagtcactggattctttgtctacttctacataagcaactatttctcccttttcgtttatcattctgtgtatttgtactttctctattttttttttgttgttgttaaggtcactttacagtttatattatattgttactgtgttcctaagatatttgacaaggatgccaaaaatacacagtgaatttttgtatttttagtagagacggggtttcaccatgttggcaaggatgatctcgatctcttgacctcgtgatcctcctgcctcggcctctcaaagttctgggattacaggcgcgagccactgtgcccggtcatttaatagtattttcytgaggattttagcatctatgttaatcagggatattggcctgtatcttgctttccttgtagtgtttgtgtctggttttggcatcagggtgatgctagcctcataaaatgagtttcaaagtgttatctctgctcttttttggaagagttttacaaaaattgatattaattatttttgaatgtttggtaaaactcaccaacaatgctatctggtcctgtgcttttctttgttgggaggtttttgattgtgagtcaatctccttatttgtttttggt

SEQ ID NO: 749087 - DNA, 574 bp, Homo sapiens
aaatgtgtttttcttcttcagggaattttctttgaattctttaacttaattatctctattttaggttggaggaagagaacacagaacccccatcccaccaaaaaaaagtcagaattacccttacttttagcttttagggaagaaatatgtaagagtttatataggaaatactcctaagtagagcagtgaacccagggatgaactaatttataactgcctctggcttctttgacaggcggcagtttctattccaaagaaagtttgcgggctgatattgctgagttactcataatttctttaactcattggagagaagagagtccaaatggtaaaattaactttggctttactccctttgccgcttaagcttgagtctrtactgggtgatctgtttccctatgtgaaacttggagaggatgtgactggccttggtaattaccatagcagcgatggatgatatttgctgaggttccattcattcattaggagatgcaaaatggtaatcttctaattctaatattcttcttcattaattggaatgattctgtaaaaaataactgttccacattaaggc

SEQ ID NO: 749088 - DNA, 642 bp, Homo sapiens
gtagactggttatggcaaagaataaaaagtgggaaaaagtgtttcagtaaagtgagcacacaaatacacgctgattaaatgcttccctcacaaacagccgcagagcccctgctttatctctatcaatattatcaaagcacacctttcctaaggctctactggaaattccagttacaatcacgtattagctactttattttcaggcatttttccctctaagagctgaatggaaaactcaagctgaatgcattagtgaaatgatggaaaaaaaatccgtgcattacaactaattcctgataaccattcaagacaaattctgaatatggccagagaagaatatctgactgtagttatcttttaggctaaaggtctaggcagatgttttgcttaagcaaattttggttagaacaatgatctttaacactggtaccctcaggtccacattcaaggacagttatgagggaaacaaattccatrttttcactgtatttactctctcaaattgcccaagaatgtatgatgtatcttttttcaaaagtcctcccattttaccaaagattgcataactgttagccaacataaatatcattactgcattgccctgagaatagacatacttccaagcaccaaagggataaagct

SEQ ID NO: 749089 - DNA, 593 bp, Homo sapiens
ttaaaaacctattgagagacatactgtgttcattggttggaagattcaaggtaataaagacatcaattctacccaaattgatatacaggttaacacgatttctagcaaaatccaagaaaaacttttgtacgtataaataacattattctaaaatgtatatgagaaggcaaaggaactaggatactgaaacgaattttaaaaaagaagattaaagagggaagaatctatttaactcaatattgagatttattttatagttacagcaatcaagactgtcatattggtggaaaaatcaacacatagtacaatggaacagaggacccagaaatggacacatttttgacaaaagtacaaaatcaaccaaatggggaagaggtagctttttacacaaatggtgctagagcaattggwtctccataggtaaagaagtgaagcctgacctacattttacatcttacataaaattaacacaaaatagatcacagctcaaatgcaaaatggaaaaatgtaaaacttttagaaaaaaataggaaaatatttttaggatctaggactaggaaaggagttcttagacttgacaccaaaaacacaat

SEQ ID NO: 749090 - DNA, 593 bp, Homo sapiens
ttaaaaacctattgagagacatactgtgttcattggttggaagattcaaggtaataaagacatcaattctacccaaattgatatacaggttaacacgatttctagcaaaatccaagaaaaacttttgtacgtataaataacattattctaaaatgtatatgagaaggcaaaggaactaggatactgaaacgaattttaaaaaagaagattaaagagggaagaatctatttaactcaatattgagatttattttatagttacagcaatcaagactgtcatattggtggaaaaatcaacacatagtacaatggaacagaggacccagaaatggacacatttttgacaaaagtacaaaatcaaccaaatggggaagaggtagctttttacacaaatggtgctagagcaattggttctccataggtaaaraagtgaagcctgacctacattttacatcttacataaaattaacacaaaatagatcacagctcaaatgcaaaatggaaaaatgtaaaacttttagaaaaaaataggaaaatatttttaggatctaggactaggaaaggagttcttagacttgacaccaaaaacacaat

SEQ ID NO: 749091 - DNA, 578 bp, Homo sapiens
ttaaagatcatacgtagttttcattaatcccattttgcagagagaaaactgagggatagaaagttctgtcaactgatcacatggtagataaggacaggactcctcctttttgatcaagggccttttataaacgttctgctatattgttttgatatttccagttattttctgagagtttgccacaaayagtgacgtgagaaggagaaacttttaaaatgatttttgttctgaaggagtccataggcctgccaacccagcaaaatgtgttacttataggcgtaaaagcaatcctaccttttaactacacactaaggaccacccagctgcttggccagagaagtaggatcttgggaggtgtttgggtagatgttattttaagtgccatagaaccttagactattacagctggaagtgaagatcttccaactcaactctttcattgcgcaaatgcaaccgcaaccacagaggtacaatgaatcccccagaccccctgctaagcactacacaaagcccagtcatggggttcctcctgatgcttcctcaggcattttctcctgcattaaaaaaacactgataaa

SEQ ID NO: 749092 - DNA, 628 bp, Homo sapiens
caaaaaaatccaagtatccactgcttgctgtaaggaaaattctagatgttaatgattctgcagggtggcataggcaggaacaggagttccctcctagtatttaatttttagatactgtactttaaatactttaaagaagacatgattactttgggaatatagacatgaaattagggtgatccacacaatccacagcttgaatactcatagaagatacagtaacgaatagtaaggaatagtaagtgagtggatatacaygtattattatcaggagaggcatccggggtattataaattgaggcagtaaaatcctttcaaaaggcaatttggaacttgtttgaaaagctataaaaaccattacaccttttgacccagtaatatctctcctgagattttatcctaaggaaataatttaaaaaatagaatacaactatatgcgtaaacttattaattacagaatttactctacctgtgaaaaaacaacctaaaacctaaaaatcaaacgattgatgaataaccaattatgagaaattaaatttaaaaaaatagccaaaattgcaactgcaattttgaagactgaagcaacataaaaaatacatgagatggatttaatgaaaataatgactac

SEQ ID NO: 749093 - DNA, 594 bp, Homo sapiens
gtctttgtgatttcttatttatttgagaattgtctattattttttaagtggacttacatatagtaatttattggtaaatgcttcctgaagattagttgactgaatgaatggattacccaacagatgaattgttatctcacagacagtttacattcaggtaatggtaaaaccatcttttacctgtagaaatgaaaccctcatagtaagacatactttcttaaagaattttgttattccaatctaatatattatgaaggtattttacacaaacatgatagtattttgatgcaatttgaaaattatgcttttaccagtggtttagaaaaactgtgtattaatctgcaaatgtgagtaaycattaacatgtttatgagaatgggtctgaaggaacaagtccactacaatattttaaaacactattgaaattgttgcaaaaagggattcagcctatacttgatatttaagtaatctgttaattagcatcctgtttggctataatacttttggttagtttagaatacattaatacaagcgtcctttgttaattaaaggtttagtttattaacaataaacaagactgtattagttcattct

SEQ ID NO: 749094 - DNA, 609 bp, Homo sapiens
attacactttctgacttcatacttgcttgcctccatacctctggtcattttgtaatttcttaagtcatttatcattttcttccttgcgttaaatcttatacataggttgttttccttactaaattgtaagttccttatgtcagagaccacgtcttaygtggctttaactatattttatacctagcacctagtacctggtaggggcacacgtgcgtgtacacacaatgtgttgaaggaattaatgtttgaatatcattaaagctcaaactacattatggcaagacataaaagaaaaactgacttccttaatttatagcagtggcttttaaatataagtgggcagaagaaatacctggggaacttgttaaaaatgtaaattcttggtgttatttgtcaccaggagacttgaaggaataccaaggcaattatctaataagaagcaattaactcctgaaccacagttgacagtaaaaggaaacaaggaagaaatgaatgaaagaaaagaaccggcatactccggccattagagtcaaactcttcctttgcaagaaagtcatttattgggtatttttccttccatctaaccactgactttttaaatcaggatga

SEQ ID NO: 749095 - DNA, 555 bp, Homo sapiens
gttttcaattatcttggatctaagagtagaattgctggatcatatggtagatgtgttttactttttgaggaaatcccgaactgatttctggctataccattttacattcccaccagcagtatatggaggttctagtttctccacatctctttatacactctccagcacttgttattttattttatttgttttttactatagctgtcctagtgartgtgaagtgatatctcatgcttttgatttgtattttcttgataactaatgatgctgaacatcttttcatgtgcttattggccatttgtatattttctttgggaaaatttattcaaattctttgcccattttaaaattgggttgtctctttattcttgagttgtaagaattctttacatgttcttgatagtaggccctcattaactatatgatttgcaaatattttctccaagtctgtgggttatttttcactttctggatagtgtcctttaaagcacaaatgtttcttattttaaagtccatgtatctatttttcctttggttgctcatgctttaggtgtc

SEQ ID NO: 749096 - DNA, 564 bp, Homo sapiens
tgcgtggagtgtaaattattaatagttcaaccattgtgggaagcagtgtggcgattcctcagagagctaaaaacagaactaccatttatctcagcaatcccattactgggtatatacccagaggaatataaatcagtctgccataaacacatatgcacatgaatgttaactgcagcactattcacaatagcaaagagatggaatcagtctaaatgcctataaatgacagattggataaagaaaatgtacatatacaccatggaattctatrcagccataaaaaagaataagatcatgtcttttgcgggaacatggctggaactagaggctgttatctttagcaaactaacgtgggaacagaaaaccaaatagcacatgttctcacttagaaggggagctaaatgatgaaaactcatggacacaaagaggggaacaacagacactgggactacttgagggtgggaggagggagaggaccagaaaaaaataactattggatagtaggcttagtaactaggtgacaaaataatctgtccaacgaacccctgtgacacgagtttacct

SEQ ID NO: 749097 - DNA, 624 bp, Homo sapiens
gacaggcaacgttcttagaagtactgttgacatttaaataaacacttgggttcagtgataaagtataaaaaaattatttatcttcaactggattttatgagagaaaatctgaagaaccacttttcaacataagcagcagcttacagcccttatctgctttgttataatgtaagttgctacacagtgcacataagaacaattcactgaagtgcagtcaaagaggtgttatgaagtgagatgaaatgcttcatcccaactggaactttcagtkccagtaaataaattttttaaaaaagtatctctgtgagttatgttttctagttcacagggttctttacagagatctcaaagaacaagcccattacaaaaaggatctgcatcatgggaaaatattaatgttgctatgactgtgtcaaaactgatgtgtaattgtaataaaaatgttatacacaaatgaattaaaaaagaatcctaatcagtccagctggattttctatttctatttatatatagatctcaaaaaagataatcctttcatttacaagcattcaaatgatggccatgctatttttatatacaaatttgcatatatgtttaattcctgtaaaaagttccaaatacctt

SEQ ID NO: 749098 - DNA, 626 bp, Homo sapiens
ccctccttttggatcactgctactacgatgttttttgttaggcaaagtaagcgaatttaagatacgattcttcacaagtttactagaagcaaagaaagggaatgaatttttatcctttatgggtccagatcggtcataaaatgttggctctgtatcttcattgatatcaaggaaaaatgtrctagtagagctgctgccaaaccggtcatcctccaatatgaacatacctatgattgaaggatcaattaataaaaacacatataaaatgacaaattcatgataactattagtgacatcacatttcaggaaatttttttttagtcatctagaggaaaaaatttaaaaataaacggttaaaccattcagctacttgaaaatatctttcttgaaacccagagtttggacttgaataaaatgtaaaattatgtaatttatgagaatctcctgttatttccaaagaaaaattattataagacccactatggcacaggttacatgaagtttcttttgattctccaaatattcaggatgaaattaaagggaaaaaggagacttggccatggatgcttactcaattactacagattcctagtggttcttctttaaattactataagcaggagaaa

SEQ ID NO: 749099 - DNA, 634 bp, Homo sapiens
aagtcaattcaacgtatatttttaaaattcctaatataaacaagctttttggaaagaaagcatttaataacaacaattttaaaaagaatattaaagcaaagataatgctaatttaaaataaaacttaaccaaacacaygtacacagaataaaaagcataccatatctaactacattaaaaataaagttcatgtatatattgcaacaaaatctgggaatgctcaccactgaaatacactgcatttttccagcattttaactccatgagggtggcaagaaagtgttccaataaataaaaagtagtgttgactaagggtggtcaataaaccattattttgaagacttctttcgggtttcattccagatgaagcattgagccactgaacaatatcctttactagatcttctaagtagccttgcccatcctaaaagtaaatacattgtgatattgtgagaaaagcattcaaaatctgtaattagaaaatcaacttcaatcaagtacaaaaacttactaataatgatgaagttaccaataatagctatcaatcagtgagtacctgttgttttctaatccacttcaacacaatgctgcatggagatgatattattctccattttacagaagagtaaaccag

SEQ ID NO: 749100 - DNA, 617 bp, Homo sapiens
aatatcaacatcagggagaaaataaagcaaatctaaaacttacttcattgaaatgcttagagaaagaaaactttgcctctcctgatagtggtcccactctccattgacaactgcctaagaatggggtctaattctcttgaccaggctgaagtgcagtgacacaatcacaactcactacagtcttgacctcctgggctcaagcaatcctcccatctcagactcttgagtagctgggaacataggcatgagccaccacagagacagggtcttgctaagttgcccgggctggtcttgaactcctgggctcaagcaatcctcctgtctcgacctyccgaagtgctgggattacagatgtgaaccaccacacccacccatgattttcacttctatgcccacattttgtggtaccatttaggcatgcatgaaaaaaaaacacaatttcaataatttgcagttaaaatatatatcatattatgtcatttgaatgctgttatttatcagaaaaatatccctttgctattccatgttcatctaataaaggctgcagtagcattaaatgtgattttaaagtcctgtgagtccaaattttctcagaagtagcatgtcagattttataa

SEQ ID NO: 749101 - DNA, 571 bp, Homo sapiens
gtgtgtgtgtgtgtctctgtatgtgtgtgtatttaaagagatttatcataaagattgtcttacccaattatggaggctgacaagtcctaagacctacagggtgagttgacaagctggagacccagaagagccaatggtgtagttacaggctgaaggctggcatgttcaagacccaggaagaggcaatgtttcagtttaaatctgaaggcaagaaaaagctagtgtcccagtttgaaggcagtcaggcaggaagagctgtctcctacttggaggagtcagtcaacctttttttctattcaggctatcaactgattggacatgcccaccaacattagggaggacaatcagttttatgcaggtaactgattcaaatgttaataacacctaaaaacacccacaaagaaawacccagaataatgcctgaccaagtatctgggcaccccatggcccataaaattaaccatcacatccacctaacttaagtgtcattcactgttctaggctctaaaattataaaaataattgtgcagaaaaggcttacggctggcaaaacaaaaaaattaatgacaga

SEQ ID NO: 749102 - DNA, 617 bp, Homo sapiens
taataaaatggtatatttttgtatgctctacacatacttccaaggtattgctttgtgaatagagccctacaacatagacacagtttaccaggaacttagcatttaaatgactttcatcttgacaatgactgacatgtctcgctgagaatattatatatttagaagatttttttgaaggctctgtacttaagaatcatgtctcatcatattcagagaacttatgaactaagtcttaaatgtttaaagaagggtcacaaagccactctgctacaaaagtctgcaacttgcacccaactcatatcacacaagtaattcatgcatagaatatttttttctaagttttctttcgattaaaaaaaacccttctacttttagctttgaatatttattactgagatragaacctgggctgaaatcaaactaagtagaagacaaactctagggagggaaagtacatcccattcttcacaaactttgtaaggatttcttcaacacccgcttctccatttatacaacagatcaaggaaggctagaatccaatttcaaatcaaataacccccatatcgatgtgcaagatagttgacagtgcactctcatcaactctgtgcttttctggt

SEQ ID NO: 749103 - DNA, 670 bp, Homo sapiens
cagctcatataatgcatattctagtacacaaattaataaacaagataaattcaaagaacagtaagttctattcaggaaaaaaaaagcatggctaagagaatggtgtgacaggtttgagtaggagggagggtcattggaatatgagtaagagacctaacagggtaacatacaggtcagagaaagaagcaggaacaaagccctgagaaggttgtgagctcctcaagtttgaagaagacaaatatggctggagcaagaattgagtgagcagataaaatatcttacaatcaattggttcatccatttttgaacctaactgagccattagagtgccctaacttattgcataatctgtttagatctactgtgtttctccttatagaaatggcctgggagttagcaggataaaacattcagagcatggaggaagcaaggtaacactgtagggaattggagtaaagttgtgactgctgttttttaamcactcagctgcattgactgcctgcaataattattgggtggcttgatacttgcagcatcaacattatcatgtatttttaaatcatttatgctttattacaatgacttgcaatcacagctatggaagcttcacggtgaacttaaattctgcaattgagcagtttgtcacaggatatttgtaccagtacttttc

SEQ ID NO: 749104 - DNA, 571 bp, Homo sapiens
ttttattatttagatgtcctgtttctatcaaaaggctaaatgagtatttattatgttttctctttatttatctgagtttaatagagatgagagagatgcatagcacttgtgaggtatggtgagaatttacttatatagtttcaaatagctagccagtttcctagctccgttggttgactaaatcaacatcattaacagtgataccaactaagaattaagttctcattcatttcagggtttatttctgktgaattctgtctttctgttcttatgctaatcttacagtcttttaattataacatgcttcattataactcattttaatatttttaaaagaattttcactctttacttctctctttgaaaatattcttggctcacctgttctattatctttgtttttttcaaattctcccaaaatatgcaactggaattttttaattaaaatttgtttcaacagttataataatttaagaagaattaaaatagtcacaagatgtagctttcatctgagtcagacaatatgcacagtacatttcttttatttctttttttatatatcctagtagaa

SEQ ID NO: 749105 - DNA, 571 bp, Homo sapiens
ttttattatttagatgtcctgtttctatcaaaaggctaaatgagtatttattatgttttctctttatttatctgagtttaatagagatgagagagatgcatagcacttgtgaggtatggtgagaatttacttatatagtttcaaatagctagccagtttcctagctccgttggttgactaaatcaacatcattaacagtgataccaactaagaattaagttctcattcatttcagggtttatttctgttgaattctgtctttctgktcttatgctaatcttacagtcttttaattataacatgcttcattataactcattttaatatttttaaaagaattttcactctttacttctctctttgaaaatattcttggctcacctgttctattatctttgtttttttcaaattctcccaaaatatgcaactggaattttttaattaaaatttgtttcaacagttataataatttaagaagaattaaaatagtcacaagatgtagctttcatctgagtcagacaatatgcacagtacatttcttttatttctttttttatatatcctagtagaa

SEQ ID NO: 749106 - DNA, 571 bp, Homo sapiens
ttttattatttagatgtcctgtttctatcaaaaggctaaatgagtatttattatgttttctctttatttatctgagtttaatagagatgagagagatgcatagcacttgtgaggtatggtgagaatttacttatatagtttcaaatagctagccagtttcctagctccgttggttgactaaatcaacatcattaacagtgataccaactaagaattaagttctcattcatttcagggtttatttctgttgaattctgtctttctgttcttatgctaatcttacagtcttttaattataacatgcttcattataactcattttaatatttttaaaagaattttcactctttacttctctctttgaaaatattcttggctcacctgttctattatctttgkttttttcaaattctcccaaaatatgcaactggaattttttaattaaaatttgtttcaacagttataataatttaagaagaattaaaatagtcacaagatgtagctttcatctgagtcagacaatatgcacagtacatttcttttatttctttttttatatatcctagtagaa

SEQ ID NO: 749107 - DNA, 623 bp, Homo sapiens
ctgggggcacttttaaaaattgtcaaggtcatcaggcacaagaaaagtttgagatactgtcacaatcaagaggggcctacagagacataacaactagataaaatgtgatatgctacttggtggaatcatggaacaggaaagggacattaggtaaagtctaagggaacctaaatagaacatgaattttagttaattatgcataaatattgtatcatttattgwtacaattgcaacatactaatgtgacatgttgattatactctctatactttcttcaaaacttttctggccacttaaaactattctaaaatttcagttaaaaaaaaagtatcagagaagaagaagcagatgatattgaggaaaagacaacttagtaagttacattcttcagaaaaatggaagtacgcaagaaagagtgtcttgaaagtgcacaatctgcatgaggttcaaagtgtatacgacatagaagaataaaatgaatggcaaagggcatcaatgtcatagcaatggagtaactggacactgaaaagatagcacagagagagtgtagatctctgcaacattcatataaatatggacaaataacagaaaggaacagagaaaaaatgtagaagtgggaccat

SEQ ID NO: 749108 - DNA, 623 bp, Homo sapiens
ctgggggcacttttaaaaattgtcaaggtcatcaggcacaagaaaagtttgagatactgtcacaatcaagaggggcctacagagacataacaactagataaaatgtgatatgctacttggtggaatcatggaacaggaaagggacattaggtaaagtctaagggaacctaaatagaacatgaattttagttaattatgcataaatattgtatcatttattgatacaattgcaacatactaatgtgasatgttgattatactctctatactttcttcaaaacttttctggccacttaaaactattctaaaatttcagttaaaaaaaaagtatcagagaagaagaagcagatgatattgaggaaaagacaacttagtaagttacattcttcagaaaaatggaagtacgcaagaaagagtgtcttgaaagtgcacaatctgcatgaggttcaaagtgtatacgacatagaagaataaaatgaatggcaaagggcatcaatgtcatagcaatggagtaactggacactgaaaagatagcacagagagagtgtagatctctgcaacattcatataaatatggacaaataacagaaaggaacagagaaaaaatgtagaagtgggaccat

SEQ ID NO: 749109 - DNA, 612 bp, Homo sapiens
catctagatgtattacatttctttataaattttagaatcactttgtatcttttctaaaaagaaaatacaccatagggatttcttatgtgaattgtatcaaatctataaatcacctggcaaagaaataactgacatctaagcaatattgaagctttcatatttttaaaagataattttgtttggtgttctgttttttctagtatgtgcatagttatagatattttttcattaaccatgtttaggttgtattgggttttctgaatctatgctttggtgctttctgtcaattctrgaaaattatcaattttctattagaatattgtcataacttctcatcctccttaaacacttattaaaaatgtgttaaaatctcactttaacatggttattttataaacttttcttggtgccttttggtatttaattctgtgtcatacttgcttctatagtccaataattctctcttcatgtgtgactaatggttttctatattcattgcttaaatttaaaaaaattgttactagaagtttcactgagctttctataaaaatgtttagctatattttaactcttgctttgctgatgtgtatttttaaaaatatatttagcatc

SEQ ID NO: 749110 - DNA, 617 bp, Homo sapiens
tgtttttcccagataacaattgctaatagaattattattccactcagaatgctaaatatggtaaatttatttatccatgacttcacttataatgctatataataaactacttaagtgtgtttccccagcagaggatgagcccctgggggcaagaaatgggacgttttcatgcttgtactaaagcagagtgcctgacactgtagatcctcaattaaaaggtcactgaaaggatggactccagatgactggatggacaggtagatggatggatagacrtcttaatggttgcaggtctttgttaaataggggattttattttcagaactagcgaagggattttttaagcctcccatggggaatacagtggtgttataaaagtgctagtgtggtataaacagagagtacagcatatttaatgatttagtgaatgggacaacagattctatgttttgagtgccccattatgtccctgtcctattatgctgctgggatttgtcagccacacagggtgtgccacctccttgcacagctccagggcacctgttctctttgtgttttaggtaaatagtgttcctggagttgtgcagtgggcaagttctgagcccacctttgctggg

SEQ ID NO: 749111 - DNA, 588 bp, Homo sapiens
tgcttgtactaaagcagagtgcctgacactgtagatcctcaattaaaaggtcactgaaaggatggactccagatgactggatggacaggtagatggatggatagacatcttaatggttgcaggtctttgttaaataggggattttattttcagaactagcgaagggattttttaagcctcccatggggaatacagtggtgttataaaagtgctagtgtggtataaacagagagtacagcatatttaatgatttagtgaatgggacaacagattctatgttttgagtgccccattatgtccctgtcctattatgctgctgggatttgtcagccacacagggtgtgccayctccttgcacagctccagggcacctgttctctttgtgttttaggtaaatagtgttcctggagttgtgcagtgggcaagttctgagcccacctttgctggggaggctctgcagcgccaggcacagcgatggacccaggatgtgaggtgagcgtgcaggctggctcgacgcacctcccacccccttgtcaaggagggaagcactcagatgacgtgttttgggaaacgttttccttcctcact

SEQ ID NO: 749112 - DNA, 543 bp, Homo sapiens
gtcaggatccctgtactatggggccccagtggactggtgcctgacttccgcctgagaaatttagctgggactacaggcgcgcgccaccatggcctggctgatttttgtgtttttagtggagatggggttttgtatttttagtggagaccagggaagagaaactactgagtttgagaaacttatgctktgagatcctcttctttcttcaaccagagggaatttttacagagaaatccatattggtcaggctggtctcgaactcctgacctcagctgatccacctgcctcggcctcccaaagtgctgggattacagatgtgagccgctgcacctggcctccacctgagaaatctaaagggctggtgatggcgtggccgaccagctgctcaggggatgagcagaaggggaggcagctatgctgagtttagctgaaagctcttgagtcttctgagagagaggatgcatggaggtgtcccatgggaccgatgagagccccagggtagagagggtctgttgtgggttgaattgtgtccctgaaaagatg

SEQ ID NO: 749113 - DNA, 600 bp, Homo sapiens
aactaatgggtccataatcggagaagtaggatagtgcctttcttcaaaaagtggaagagataatactgtggtccaaccttgacccaaatgaacaatttggtattgaactatttcagcagcaggatgtagatgtgttaggtaataytaagttctaaatcaacatgtgatcagaatcagattgagtacattcaggtagttttttatatacttaagtcttctttttctcttccacactctgtgggaaaacaggaactcagtgaatcacaatgaaatggagaatttgaggaacagcacaaccacatggcctactgagatgccagtgctgttcatgctattgggaaaggctgaattcaggtccaccacactattttcccattctagagcattgtatgaagcttggtcctatacattattgagtttgagtcccacagtagttctgtgataatgtggatacgtgcactaaggaacagtattaagatctatgtcttactgtgtgttgtaccaaaaagtttgaaagccactgctttcagccattttgaatgttttctggctattacttgcagcccaaagcagtcactctgctaagcacattatactatc

SEQ ID NO: 749114 - DNA, 658 bp, Homo sapiens
cacatggcctcttacctgcaacacaacctgattagaacggtatgtggatcctttctagaaaacttaagatgggtcttttccaaggagtagctgtggcactattgtctgaaatctgcaaacaaatactaaggagaataaagctgctcctgggataggccagtgcataaaagcctggatgaggtctgcttctcggtcgattctctattccagwctttgggtctggctgttccctccctgatctgtacctctacgatcccaaccatcttcccacagatccctcacctgtcctgtgcttctaactcagatccagtctttcgactctgagtctccccttgcttatttgcctataaaattcttggccttgatttatatcttgattcaaatggtgaatattattaccgaaggcaatgttaggtcttacttttaggtaaggccagttatatatcgttttaacctactgacttctccagggtcaccaatttgtgttgatcctgtggtataggtcagatgtacacggcagatgagtggctagactatatggacactttcaatgctttccatgccaaagtaatgatactatcttgaaatattacattttaaaatagctttatattttatgtgaaaaaagaccaccttaaattaccttaaaaattcaaag

SEQ ID NO: 749115 - DNA, 665 bp, Homo sapiens
aaaggagaaagatcatgcaaatatgagatcagacagctttctgagtggagccagaggtcgtgtttctgaagcttttaatcatagagagaatatgttaaatgtatgataatccccagaatgttatcccagagacacctgctctggaaaaaacacctgagtatacaagcagatattggatgcataaacttaaagttttagcaaatcaccttgaagtccttagctgcaaagaaatgattattttttccacaatgactgagccagggaactttctctacattcctgtgctgaagacgtttgaggctgagattctgtattcattcagcctccaaggaaccctttgccccgggtccatccaggttgaaggagagccaagccctctccaaaataacgttttcttcaaatatgttgtccacctagctcagaacacatgacaatggcagtgtaggtttttsaacaatttttcaacttccttttcttatttgaatatggagcatcgtaccttgtgctgacttgagaaaaacacaatccatctgtagcctctaaaaagctcttgcatgtaagtcgaatcctgtgtcccctttcgctccttgttttctgccgaagaccccttcgctgtgctggaagtggggtggagagctgaggatcctgaagtgccctggctctcg

SEQ ID NO: 749116 - DNA, 628 bp, Homo sapiens
tgcacagaagagacagagatcttttcccttgattcccaggtaaaccatattacccttttccttgtcactgaattctgtgtctctacaggctattaaatgaagagtgactggaaacacaaaggaaaatggagaagatgtttcagtctttctggtctgacactcagttactccccccaggtagggaatagtgacaggctcctcccattagccatgtggcagagaccctccatcaccctcctcaaacctattttgtttttcgtccttaataacagaaccccagttgtsaccaggacatgttgcttcccaaaaagaagtaaaatttcctaccacacttgcagcaaaatgtggtcatatgcttaagatgtggcccatgagataaaagtggggagcttctatctcatgggccacaatatgagatgggatgggggctacccaaataaagtgagaggtgggtagtgagaatgtgatggcagtggtccaggcaagagatgatgttatcttagaaatcaggcatgttttgcacgtagacctaccaatctttgctaatagattggatggagagtgagggaaaggaggaatcaaggatgtctcctgtatttccggctcgaggaaatggagtggacagaag

SEQ ID NO: 749117 - DNA, 526 bp, Homo sapiens
ccccttggggattaggacaaagaagagagctaggttccagtgacaaatatttaataaataggggagaatgactaggcagtcagtagctgaaagctacaaagagagatataggatggtaaaaacgttaaaggactgatgcttttgtttgtttttgtttttgttttgttttacaaaggctggagaagtcacaatctgaaaatgtcagtagagagatgaccccatgctggccctgtgatatccagatggtaggggcatgagcttcttctccttgagaaagatgcagggsaaacatggtcccagaggatagccaggtctccgccaaggcacaaattgagaaaacagttagaaaagagaatggaaaaaaatagataggtttattcatttaaaaagtaactatcaagcacctgctctgtgcatgatactgttttgggcgttgagatgcatctgtgaataacacatagtaaggaatttacattctagcggtaggagacagagaataaatgcctgagcaaatacatactcaata

SEQ ID NO: 749118 - DNA, 604 bp, Homo sapiens
gctggataactggcttagaaaatggacagagatcaagggagatttttgtagggggtggggaatgtgccaatgaaagatagagaggggctattcacagaggaaggatcattctgctgtaacattctcttcttcctttaaaacaaatattttttgggtggtgctgggaatgaaaatcattttattttcagcattacttcgtttctgcgtgtgattacatttttttcaataggttgctgggaaacaggcatgtttggttacatgartaagttcttcagtggggagttttgagattttagtgcacccatcacacaagcagtgtacactgtacccgctgtgtagtcttttatccctcattcctcctcccaccctttccccctgagtccccaaagtccattgtatcattcttacgcctttgagtccttacagcttagctcccacttatgagtgatatatatatatatgtatatcacattttctttatcccctcattgattgatgggcttttgggctggcttcatatttttgcaattgtgaattgtgctgctataaacatgcgtgtgcaagtatctttttcatataatgacttcttttcctctggatagat

SEQ ID NO: 749119 - DNA, 604 bp, Homo sapiens
gctggataactggcttagaaaatggacagagatcaagggagatttttgtagggggtggggaatgtgccaatgaaagatagagaggggctattcacagaggaaggatcattctgctgtaacattctcttcttcctttaaaacaaatattttttgggtggtgctgggaatgaaaatcattttattttcagcattacttcgtttctgcgtgtgattacatttttttcaataggttgctgggaaacaggcatgtttggttacatgaataagttcttcagtggggagttttgagattttagtgcacccatcacacaagcagtgtacactgtacccgctgtgtagtcttttatccctcattcctcctcccaccctttccccctgagtccccaaagtccattgtatcattcttaygcctttgagtccttacagcttagctcccacttatgagtgatatatatatatatgtatatcacattttctttatcccctcattgattgatgggcttttgggctggcttcatatttttgcaattgtgaattgtgctgctataaacatgcgtgtgcaagtatctttttcatataatgacttcttttcctctggatagat

SEQ ID NO: 749120 - DNA, 630 bp, Homo sapiens
agtccattgtatcattcttacgcctttgagtccttacagcttagctcccacttatgagtgatatatatatatatgtatatcacattttctttatcccctcattgattgatgggcttttgggctggcttcatatttttgcaattgtgaattgtgctgctataaacatgcgtgtgcaagtatctttttcatataatgacttcttttcctctggatagatacccaaaagtgggattgctggatcaaagagtagatatatttttagttctttaagaaatcttcacactgttttccatagtggttacaccagtttamgttcccaccaacagtgtaaaagtgttccctttttaccacacccatgccaacatctatttttttttattatggccattcttgtgggaataacttgttattgcattgcggttttgatttgtgtttccctgatagtgatattgaacatttttccataagtttcttggccattcctatatcttcttttgagaattgtctattcatgtccttagcccactttttgatgggtttgtttttttttcttgctgatttgtttgagtttcttgtagattctggatattagtccttttttggatgtatagattgtgaagatttgctctc

SEQ ID NO: 749121 - DNA, 630 bp, Homo sapiens
agtccattgtatcattcttacgcctttgagtccttacagcttagctcccacttatgagtgatatatatatatatgtatatcacattttctttatcccctcattgattgatgggcttttgggctggcttcatatttttgcaattgtgaattgtgctgctataaacatgcgtgtgcaagtatctttttcatataatgacttcttttcctctggatagatacccaaaagtgggattgctggatcaaagagtagatatatttttagttctttaagaaatcttcacactgttttccatagtggttacaccagtttacgttcccaccaacagtgtaaaagtgttccctttttaccacacccatgccaacatctatttttttttattatggccattcttgtgggaataacttgttattgcattgcggttttgatttgygtttccctgatagtgatattgaacatttttccataagtttcttggccattcctatatcttcttttgagaattgtctattcatgtccttagcccactttttgatgggtttgtttttttttcttgctgatttgtttgagtttcttgtagattctggatattagtccttttttggatgtatagattgtgaagatttgctctc

SEQ ID NO: 749122 - DNA, 630 bp, Homo sapiens
agtccattgtatcattcttacgcctttgagtccttacagcttagctcccacttatgagtgatatatatatatatgtatatcacattttctttatcccctcattgattgatgggcttttgggctggcttcatatttttgcaattgtgaattgtgctgctataaacatgcgtgtgcaagtatctttttcatataatgacttcttttcctctggatagatacccaaaagtgggattgctggatcaaagagtagatatatttttagttctttaagaaatcttcacactgttttccatagtggttacaccagtttacgttcccaccaacagtgtaaaagtgttccctttttaccacacccatgccaacatctatttttttttattatggccattcttgtgggaataacttgttattgcattgcggttttgatttgtgtttccctgatagtgatattgaacatttttccataagtttsttggccattcctatatcttcttttgagaattgtctattcatgtccttagcccactttttgatgggtttgtttttttttcttgctgatttgtttgagtttcttgtagattctggatattagtccttttttggatgtatagattgtgaagatttgctctc

SEQ ID NO: 749123 - DNA, 650 bp, Homo sapiens
tcagtgtaaaattgtcatcagtttaaaataatgagttattccagtgagccaagatcatgccactgcactccagcctggctgatagcacgagactctgtctcagtaaataaataaataaatatagttatacaatattatttgcaagcctcgtggtaacctcaaatcaaaaaacctacaaaggatacatgaataataagaaagcaggaaattaaaacataccaccwgagaaaatcaccttcactaaaatgaagacagaaaggaaggaaagaaggaagagaagaccacaaaacaaccagaaaacaaataacaaaatggtaggggtaagtccttacttatcaataacaacattgaatgtaaatagactaaactcttcaatcaaaagacatagagtggctgaatggattaaaaaaaaaaataagacccaatgatctgttccctacaagaaacacattccacctaaaaagacaaacataaactgaaaataaagagatgattgttttttgtttccatgccactggaaacaaaaaggaagcaggtgtagctctacctacatgagacaaaatagatttcgagacaaacacaataagaaaagacaaaaaggtcattatataagaataaaagggctactttaacaaaaggatatgacaaga

SEQ ID NO: 749124 - DNA, 578 bp, Homo sapiens
atatatgtgtaagtctatttctggactctatcctttttcattgacctatttgtctatctttttgccaatgccacatgtaataatcagcatgtcaatttctttaataaaagcctgctaggattttgactgggattgtattggatctacaggtcaagttggggaaaattcactttttaataatattgaatcctctgacccttgaggaaggcatatcgttctggctttttrggcctttcaaaaactttcttttagcaatattttaaaattttcagtgtgtcagtgtactgttaatcattgtgaaataaacttcttatccttggcaatattctttattctgcaatttactttgatatatctatatctatatgtgtgtgtgtgtgtgtgtgtgtgtgtgtgtgtgtgtgtgtgtgtgtgaatttagaaacattgctctgttgcccaggctggagtacagtggcatgatcattagttcactgtagctgtgaactcctgagctcaagtgatcctaccacctcagcttctggagtagctgggactacaggcatgtgccaccatgttcagctattttttttattttt

SEQ ID NO: 749125 - DNA, 738 bp, Homo sapiens
tgttctccaaccttctcacaatacaaacacatttctggattctggattcccaaataaatgggatcccctctgccttgctcaagagcctctggatacttgcatgtgataacagcaacagtgactgtaaagataagaggagagatggtatcagtttccttttgaagtcasaaagattatttgatttagcagggcagtatcctcaagtggatctggaagagagctgaagagtgtaatcccaactagacccaccaaatggccaacccccatattcattcattcattcattcattcataccatgtgccaatcactgccctagtaaatgagcaaacacagagagctaagcagacaacagagtatgctcttgagattctcacgcctctgcttgagcacatggagatggggagctcctacatcaagcagcccctctgattcttggagagcttggtcccttttgcaagtttttcccaatgtgatgctgaaacctgcctttctgtggtattcacccatttagtcattttaggacaccctgaagtcatgcagaacaagctactagtcttccataagacagggcttcagatgactgacagcagctttcctattcccttggaggctcctccaccatctctggcttcttcatcttagtggaacccaaagttctccctgacttctcttcccaattaggtgtgaaattctccccactcctggtgggccccattgtaaagtcacacttttacaaa

SEQ ID NO: 749126 - DNA, 542 bp, Homo sapiens
gggcttccacaggagatagcgtgagtgcagagggcctaagcctccagagccccatcccaacagcatttgattcacttgattgatagacggcccttcctccaccatcagcgtctcctggagtgcctctcatagtgtggttgtctcagcacctgtgaaagcagacatagaacagatgaaccacaagagatgtttccaagaccttccaggacactagctccacaggccctcattctagacagggagctgggaaacctggcctgacacgaagctctgggcagaagttytgagccacatctgggacgaaacttgaaggaagcatcagcaaagggagaacaggtagaattttcctccacctggagatccagatagtatggtagtgtctcccctaggagttcgaaggccaggcataaaatttgaccttaaataacccacaggcacctgatgccctgactcctcttctctgaagcctccaccccttcatcggcattgtttttgcctaggagcaggggagggtcccatgccagggccactctgccaggatc

SEQ ID NO: 749127 - DNA, 636 bp, Homo sapiens
gtgttggctgggccggtctccagctcctaaccgcgagtgatccgccagcctcagcctcccaaggtgccgggattgcagacggagtctcgttcactcagtgctcaatggtgcccaggctggagtgcagcggcgtgatcccggttcgctacaacctccacctcccagcagcctgccttggcctcccaaaatgcccagattgcagcctctgcccggccgccaccccttctgggaagtgaggagcgtctctgcctggccgcccatcgtctgggatgtgaggagcccctctgcctggctgcccagtctggaaagtgaggagcgtctctgcccagccgccatcccatctaggaagtgaggagcgcctcttcccagccgccatcacatctaggaggtgaggagcgtctctgcccggccgcccatcgtctgagatgtggggaccgcctctgcccygccgccccatctgggatgtaaggagcgcctctgcccggccgcgaccccgtctgggaggtgaggagcgtctctgcccggccgccccgtctgagaagtgaggagaccctctgcctggcaaccgccccgtctgagaagtgaggagcccctccgcccggcagccaccccgtctgggaagtgaggagcgtctcc

SEQ ID NO: 749128 - DNA, 631 bp, Homo sapiens
ctacatgagggagctccttaatggctctgagttggtcagcggtgatgggtcaacgagtaaagcaaactgaacatcaactcaacctctcacttgtggctggatgaggccagggtacagcagttggttctcatgctgtggtgcagggaagttgtctgtagggagtcaggtcttggtggactcctttcctagctcccttcaccactagactgaggggaaggtctgggcctgggccatggtgcagcatagaggtgtttgtgtctctgtctgtgcctggggtctgcctcaacagcttcttaaggtttggattaattctataccagtcttattccacccaggtataaggtctgttcttgagtcctagccccaaattatcatattrcctttagaaatctatcttctgtttcttccccagtgacatcagcagaaccggttttgcaggctgggcaggcaagggagctcagtttctcctctctgcatccagcctctcctttgcttgtgccctcaacccctgctctcacccttcatgcattcaatgccctggtactttttccttcttttcccctggaaaaagctgccaagagaggtgtgttgggggaggaatggaatatgaccttaatcagttacactttag

SEQ ID NO: 749129 - DNA, 638 bp, Homo sapiens
aggttaaggtgctacattcaaaaggttaagtatattaaatacatttttaacttatgatattttccatttatgatcagtttatcagcatgtaaccccatcataaattgaggagcatttgtatattgtttgatcaatcccagtacaacccagagagttatgtattgttaccagatttttcaaatgaggaaaaaaacataaggtcactctgctggtaagtggtagaactggaatttaarctagatctatcaagctctgtagtctatgttctttctactccagaaaaaaaaaatgagataacattttatgcatgcccagatgagttgttttgactcagtgattcccaggtgttttcatccctttcccatctgttgtaatatattttcaaacatcaacccaatgcaacattattttttcttaaatggagtctcactcttgtcgcccagaatggagtgcaatgacacaatctcagctcactgcaacctctgcctcccaggctcaagtgattctcctgcctccaccttccaagtagctaggattacatgcttcacaggaataaaatagagctcagagagcagcccaggccaaaagggagcaatgtacatggaagtatgagtcaatgctcacaacaatcgaggtcc

SEQ ID NO: 749130 - DNA, 569 bp, Homo sapiens
tcctatgtgcatggaagttaccatccattagtttaaaaaaatattgtgatattgctatagtcaaactctaaaaacaacataattaacaaataagggaatgtgtatacaaattatggtatatccataaaatagaatattgtaagagcattaaaaacaacttttgaaaaaatccataatgacataggaaatggttatgttaaaaggttaaaagcaaaaaaaaaaaatcatgacgcaaaaccamatatatattatcacaaatatgtaaaaattcagagaaaaaagatgagaaggaaatacattaggatgataacacaagtgatctctgtatatttctaaaagtcagaaatcccgggctctagtctcaactctactgcttattactatcctaatatttgactttgggcaagtcagtcaaatctcctaagtcttaattttttaatttagaaaatgagctgcaattctggatttgactcgctactagtattcaaattagataacgcaagagtgagtctgttgtaagctgaaaagctttaaacaaatatcacatactattattttcttagcaaaga

SEQ ID NO: 749131 - DNA, 564 bp, Homo sapiens
gtagtgtttatagagacggggttttggatgttgcccaggctggtctcaaactcctaagctcaagctatccactctccttggcctcccaaagtgctgggattacaggcgtgagccaccacacccagccctcatcactctattttaatggattattttgattgggagtattctgaatatgtgtgtgggtgtgtacacactgttgcacataaaacacctattattttttagaacaagtgtaattaatagtgcaagactgcctgctgcccctcaccttctagcaatcctaaagctgtttcccagagatcattgctaatttcaagaggacagagacatactctttcatttctctctccgtcaaccaaaaaaagctgatgataagagagccatcatmtgaccagtgtctgactcggtgtcctccctactgggtcattatcctttgtactgacatctactctgtactggcttcctggaagacacctaaccatcctccattatttctcactgcaatgacgaagtactgtaacctttctggaaataatggcctatcattatgcatctggtccc

SEQ ID NO: 749132 - DNA, 609 bp, Homo sapiens
ttagtctgtgcttcttttctcatcatctatttcctgtctcagatgttgccatcttttgttgcctgatggcttgaaaccattgtttccttagttttgtccagttttttttttcttttttgtatcaagtaggaaggtaaatctgatctctgttcttcaaccttatccagaagctactcaaaactttgtttattattatattattgggggaactgaactaggggtgtgatttttaatttattaaaatgtgttcattttaagccacactttcacagatatgtagcaatgcagtacaacacacatggctagtgacccaggatgcaaatcagttacaaggtttggttagtgaaagatttttccaagttagtttaaaaagactgtactggtgctaaatatgtgcgtagktaaatatgcactgaagtttcgaatgcccagctcaagagggccttgcagtccctattagatgagtaaacaactcagctcagccttgagacttgtgaagctcagcatcatgttttcagaagtttcttgtttggtatgaatcagactttcttgtcctatcttagaaatcaaagaaagtcgggtgttgcggggaggaacctgcttgtcttc

SEQ ID NO: 749133 - DNA, 520 bp, Homo sapiens
aggaaagaggtttaatggactcacagttccacttggctatggaggcgtcacaatcatggtggaaggcaaaagacacatcttaaatgatgaccagcagagatagaatgacagccaagcaaaagggctttcccttatgaaaccatcagatcttgtgagactaattcactaccatgagaacagtgtagggaaaaccacccccatgatttaattatctcccaccaggtccccccgacccacaacacctgggaattaygggagccacaattcaagatgagatttgggtggggacacaaccaaaccatatcatcatataaatccaaaccacaggctccatgagcagatgagcagagtagcagaagagctgtgtggcagaggagagaagagaaggaacatgtgaacgtcgaaagttcatctggggacagtcagggaggagatcagccatgggatggccaaactccaggggaagattatcttcctactccatccccctccagctccccatccatcccactgagagcca

SEQ ID NO: 749134 - DNA, 637 bp, Homo sapiens
aattttcagttcttacttcatcagctttcccttaagcatgactaaatctccctgcctcccctttctctccctgtgtatgtatatgtgtgagatacctcattactgttacccaatttgtaagtctagggatcatcttgattctctttcaaataccactttcaccccattcaagtatttatgcattcaacttatttctgagacctagaatttgccactttaagactctcttatacctctatttcctattttaatttataccactttaattcagtttatcattatcctctgcccatggaaatgttgcaataaatcacttaaattataatttcactctaatttgcttagccatgtttcctatgattggatatttatacagtttctatttttcataattataaatactatttgtgtagaaatatctacayttcatattggttattcatgaaagcctattagaatttatttaacagcatgtttttgatttaaaatatgttttcaaagaatgaaatatattctcaatagattataatgttataagtttgagtttataaagattatttcaaagtctatggctcagataatgaatgatggttacatcaaacaaagatacatgggaaacttcaatatgaatacattt

SEQ ID NO: 749135 - DNA, 504 bp, Homo sapiens
aggctaatcagaaacccaaaagaatgcaatgcaaccttttgtgtctcacctatccgtgacctggaagctcccttccgcttcaagtcttcctgcctttgcttcaagttgtcccgcctttccaggcagaaccaatgtattcttacacatattgatacatgtctcatgtctcccttaaaatgtataaaaccaagctgtgccctgamcacctttggcacatgtcgtcaggacttcctggggctgtgtcacgggtacgtcctcaaccttggcaaaataaactttctaaattgactgagacctgtctcagagttgttgagttcaaaatttggtaaccatggagggattctgaatggaaatgcccctgacctttgacaaatcttctatcagtgcttgttaccagcatgagctaactttatggctcaaaccaatagtacaaattgctaagggctgagagcatcccctccagagatcctttatctccccaaatttggtcgagatctaaatttt

SEQ ID NO: 749136 - DNA, 640 bp, Homo sapiens
agaggagagtacctgaaagttctgaaacagacaagccatggggttattgttagctgggcaaggaattgtggactgtccttggaacgcctggagattctggtacccctggagaagttgctgctgttgctgatttggaggaaacatctgattgttgtttaacagcgactgtagatgagtcagttgatggttactcaaagtattgtttattgatgacatatcacctacagtttgaaaaacataaaatataaataaatgtgattcttcggagattygatgcctctctttgtacccgagaattcctgaaacagaaactaagtgctatgcttacttgggtaatgcttttcttttttacttctcaaagtcttactaagtggtaaggaaagagtagctttattatttagttttatcttgtataattagttttttaattttacatcatggaaagactacttagtctttgctctattcattaggcagtccttatatattgagctgcagtgtcatatgattccttcatctatttttagattttagatctattttagagcacctaaaattaaaggttgaaattagtcctataatgttttagcaattgtaagtatctgaccagataattaaaataagtgagcctgatcaggcc

SEQ ID NO: 749137 - DNA, 639 bp, Homo sapiens
ctaaagttttgtgcatcacttaaagattgtaggcattattctcagtataaggtgaagccaatgaagaatattaaataggaacgaaactgtctgatgtacattttgaaagctcattctggccactgtgtagagaatggatattaggaagatgaaaaaggaagtagggaggccagttaggaggctactatagttgtccaagtaccagggaggtgccagggtaaatgggagaaatggtcagcttcatcatagattgtgcacatggaacgtataggacttgccgtcagataagatgtgaagagartaagaatgacaccaatcagaaacaaaccctaggactggtatctgaacaacttggtgggtggtaggctcaaaactggaggagcaggtttggaattgcagttgagttttgattttgtccatataaatttgagatgaaaatgagatattcatgcacagaaagtagaatacagaaccaaatatgggttacttatttaaaaattttctctctgcctgcacggagcacagagtatgctagtaacggcctccaacacagtccaaactattagacaacatgggtggagtgtcttagaaggggtgttatgagcttgattaaagcagttgcaactgcttgctcaagtg

SEQ ID NO: 749138 - DNA, 639 bp, Homo sapiens
  misc_feature 33, 622, 623, 624, 625, 626, 627, 628, 629, 630, 631, 632,633, 634, 635, 636, 637, 638, 639: n = A,T,C or G
aatgcaccaagtattttaaaaagtgatttaccnaaattccttctattttcctttgttgtcttccttaaacaaatttcagtgaagatgtagtttgctcccttctgaagcaaaccagcagggagcgttattaacatttttaaaaaattaggacctttctccaggtaatttacaacaaattaagtagatcattattttagatagacaatcktggaaagttccaagaaaataaactccacaacttctttttgttacttgcttcgtttcccttctttcaacctccactacggaatttagatccagtgaaagttttgtgttttgtaataagaacaaacattttcttatcgaaccaacaatatttgaagctaataatctcaccaataatgtatttttcactggattaaactgctggcaaacagtctatagctccgtttcccttttttcaacctccacaagcagaaatttaaatccagtgaaagttttggttttttgtaataagaagaaatattttcttattgaaacgacaacatttgaagctaatgaaagaatctcaccaataatgtatttttacactggattaaaccgctggcaaatagcctaatgtttaacaattctgtcataaatnnnnnnnnnnnnnnnnnn

SEQ ID NO: 749139 - DNA, 604 bp, Homo sapiens
agggatccagctaaaggaacagttttccgggggctttatgagctatgtttatgtgacttacagtcatttctgtgtgtaatcaagctattgacagctatcctaggttggaatggcttccagaaaactttctaagaaagtttttcttagacaggaccctgaaaactgaataagcttcaggtcccacagaatctggacctgcccctcataaagggactcctatctacttactaattgggtactattcctgtttatgcttccaaggccacattttatgtttttcagccagtttttctctrtcatcccacagcttcttgagctcagtgtgattatggcagaaactctgaagctaaagaaacttcccatgttgctgtggtcacagctcaagggtaagctgttccattagcattgccaagtctttgctattttctaaacttttctgaaaaatgggttccatttgggaatttgtaatgtggctgtcagaccacctacatacacaggttatttgacaacccaaagagtgagattcttcactgtaataagcaaaaatgaacataaaggctatggtggattctggttttgaactttgttggaatcacctcatctc

SEQ ID NO: 749140 - DNA, 650 bp, Homo sapiens
tatttctattgaccaatatcattggtgggatcataaaatgacctcaatccataactcaaaagtgtggtggaatcttgccccagggcccagaaccatcaattttccatgtgacataaataatatcgcattagaattgctatggctgggtggtcttgccctcagtcacccaaaggcctcacaggagcaactgacccggttaagggatcctgttgctaaagtatgtcatgtgacctgagcacttgctctcagtaacggagtcacagactctacaaccacatagaaaatgtttctcttgttccataactctaaytgaaagcagcttattaccttagctttccatacccatatatttgtttatgggaggagccatactgaaatattatcatggctttgtcctccctgtatttttccctttctaccctttcaagcaagtagccagacaattttatgccctgtgataatgggatgcctaagaagttacagagccaaaagcagaagcttcctgcaagataattccctttcttttgaaaaaggctaagttctttaaagaggctatactcattgtcctggaggaaaaggtcctttgagaaagggtaaaaaaagagtaatgatttgggccttcattgaaaaaaggaagatcagagttccag

SEQ ID NO: 749141 - DNA, 527 bp, Homo sapiens
ccatgtggtttcagctccaccagtctttctccactcctacctctccagcatctccatttctctggctcaacttcttccttcccaatccttaaatgttggtattatccagagctgtgttcttgctctctcttcttcctccrtacgcttaccctgggtaattttttcctctcccgtgactttaaatgctacctgtatgccagtggttctcaagtgactgggggtgatttctacccttcaaggggacacgtggcaatgtctgacattgttttgcttgtcacaatgggatttggaggaggtgctcccggcatctagagggtggagaccacggaagctgccaaacatactacaacgcacaggaatatctggcccgaaatatctcaccacaaagaatatctggcctgaaatgccaattttcccaagattgagaaatttctgctacttgctaacgaatctcaagttcctttatttagtttccatcaaagctagatgtgcattgttattacatatcctattgcccttcaaacagc

SEQ ID NO: 749142 - DNA, 569 bp, Homo sapiens
gcagatctctcatgaatggcttgttgccctccttgagatagcaagttctcactctgagttcaagtgagatcgggttatttaagagtctggaacctccccctcttgccatgtgatacaatgacaatgactccattgccttccaccatgattgaaagcttcctgaggcctcaccaggagcagatgccagcaccatgcttcctgtacagcctgcagaaccatgaaccaaaataacactcttttctttataaattaccagcctcagatatttctttatagcaacataaatggactaatacagactcctatcatgacaaggacatgttggacacactgctcttagataatattaaggcaaataagactcaaaatatgttaaaagcaaaatgctggcataatgcttttgttttctaaaaccaaagacacrtatgtgaattatttgttacataaaaggcacccatttgaaaagggtgatttttttataatgtgccagatttgtcattgtccttttctaacctatccccatcacagtctttccttcttaaatcttcttatcctagtataaacctaaa

SEQ ID NO: 749143 - DNA, 607 bp, Homo sapiens
tccaaaggtacttcaaagagatactttgtcctggtgcctgaaacagttctcactgcagggctcaagtctgaatgagcaaagaggaaagaaagtgctatctcctcagactttaaccttcacttggggacatgttctttgttactcctgggaccttggctaggcattgtttcagcatgtcaatctggcatagtgagagcttttagggagtcattgaagaagcactttcttcctctaraagaagttgtttatccagtgagaaaaataacaaacccaaagataagtttttcttacaggactggttgctagatatttttgtcttggaattcagaggccttagcgacttagggactgtttaacacctgcagaacttgcctgtgtatttgcaaaccagtgctgtatttatgtctgctgataaggtaatttgacattgataccagataaggtaatttgacaatgataccagttagcttgtaagaaaattactagggctggagaattaatcaaaaacttttaacagacctatgtgacagacatgagtgtctaagggagcaaagagctgttatcctgggtatgtattaatttagactaattgtgacatgaatcatat

SEQ ID NO: 749144 - DNA, 466 bp, Homo sapiens
cttcaaaagtattcattggccaggcatagtggctcacacctataatcccagcacttttggaggccaaggcaggaggactgactggggccaagagtctgagagcagcccaggcaaaatagcaagaccctgtctcttaaaaaaaataattttttaattggctggtggcatgtgcctgtactcctagctactcaagagactgagaccaggatcacttgagcccaggaagtagaggctgcagtgagccatgatcatgccactgaactttagcctgagcaacagagcaagacctgcctcaaaaaaaaaaaaaaaraaaggattcgttgctggattcctttatataactggctccctcattgcaacttgttgtgggaagtcaggggccctgaacggagggaccggctgaagccatggcagaagaatgtggattgtgaagatttcatggacatttattagttccccaaattaa

SEQ ID NO: 749145 - DNA, 467 bp, Homo sapiens
acttcggtgacctggctagtcactcccatgctcaaataaacccagttttctggctttgtcagtgggcactctctcagtccgtctctgtggggaggtgggatatccatttttccaagtaaaaggcttgattttactcctcaaattccactagaaagaagtcaactgtggcattaacatgtatgatctctacattatagggggtctaacctaagcaagacatagagtacctgccctctaggactttttggaggcctcgacattgaactgccccatcaaagagaggaagcctatttggaatgacacayggggagtcttgtttgtccagccaatcctgcagattctaaaatttgtcattagatctgtcagaaagctgaatacttgtacagctcatcttggatcaaaaagaaagaactgagtttactctaaggctatatcctcagttttgttttgttcttctgagaagcatt

SEQ ID NO: 749146 - DNA, 631 bp, Homo sapiens
atttaagtgtaatgtagtgatgtgatgaatagaaactataatttaataacaaagcattgcccaatacaacacagacaaatttatggtttagttataccaaatattaaaaccttatgatcagatactctatgaccaattcttcctcatagtttacgattactttccctttggtctatatattttctctaggactaatcttttttacttttacttagatattattagatagagttctatctttggcaatagctggctaggttattttggagtaatcctggcaytgataagaatcacacaaaatggacaaaatataaaataaacatctgttcaaagacatcagaaagccactgagggaatgagaatttacagggccaagaatccaaaagaagaagaaagtttacaaaggggagccgggcatttcgtctccatttctttcaaggcaattgctaattctgaaagtgaaaggtatctaagtgcatgagaagttgagcagaacttttggcaagattcttgagctaggaaaagcccacaaaggaggagtgaccctggaaaacacctcagccttttgtttgggacttttaaaggctatgatctaagagtaacagtgaaccagaaacagaccagcccttat

SEQ ID NO: 749147 - DNA, 631 bp, Homo sapiens
atttaagtgtaatgtagtgatgtgatgaatagaaactataatttaataacaaagcattgcccaatacaacacagacaaatttatggtttagttataccaaatattaaaaccttatgatcagatactctatgaccaattcttcctcatagtttacgattactttccctttggtctatatattttctctaggactaatcttttttacttttacttagatattattagatagagttctatctttggcaatagctggctaggttattttggagtaatcctggcactgataagaatcacacaaaatggacaaaatataaaataaacatctgttcaaagacatcagaaagccactgagggaatgagaatttacagggccaagaatccaaaagaagaagaaagtttacaaaggggagcygggcatttcgtctccatttctttcaaggcaattgctaattctgaaagtgaaaggtatctaagtgcatgagaagttgagcagaacttttggcaagattcttgagctaggaaaagcccacaaaggaggagtgaccctggaaaacacctcagccttttgtttgggacttttaaaggctatgatctaagagtaacagtgaaccagaaacagaccagcccttat

SEQ ID NO: 749148 - DNA, 634 bp, Homo sapiens
ttttttattgtgtctatttgattcttctctcttttctcctttattattctggctagtggtctatctattttgttactgctttcaaaaaaaccagctcctggattcactgattttttgaagggttttttgtgtctctatctccttcaattctgctctgatcttagttatttcttgtcttctgttagcttttgaatttgtttgctcttctctaattattttaattgtgatgttagggtgtcagttttcgatctttcctgctttctcytgtgggcatgtagtgctataaattttcctctaaacactggtttagctgtgtcccagagattctggtacattgcatctttgttcttactggtttcaaagaacttatttatttctgccttaattttgttatttacccagtagacattcaggagcaggttgttcagtttccatgtagttgtgcggttttgagtgagtttcttaatcctgagttctaatttgattgcattgtggtctgataaactgtttgttttgatttccattcttttgcatttgctgaggagtgttttacttccaattatgtggttaattttagaataagggctatgtggtgctgagaagaatgtgtattctgttgacttggggtggagag

SEQ ID NO: 749149 - DNA, 639 bp, Homo sapiens
tttgactcaagtaccaaataataataatgctatacttaaattacttgtgaaaaacaacacattttaaagattacgtgcttcttggtacaggtttgtgaatgacagtttatcgtcatgctgttagtgtgcattctaaataaatatatattcaaatgaaagtgactcagactctgtttctagctaatatttagtgtctattcaggaagcaaacttgcggacaggcgcagtgactgacacctgtaatcccagcactttgggaagcttgagatgggtggatcacctgaggtccggagtttgagaccagcctgggcaaatagtgacaccccatctctactaaaaatacaaaaattagccaggcgtggtggcacaggtctgaaatcccagctacttgggaggatgaggtaggagaataggttgtcccggggggcggaagttgcagtgagccragattgcgccactgcactccagcctgggctacgagggaaactccgtctcaaaaaaaagaagaggactgggcgcggtggctcccgcctgtaatcccagcactttgggaggcagaggcgggcggatcactacgtcaggagatcgagaccatcctggctgacgcggtgaaaccccatctctactaaaaatgcaaaa

SEQ ID NO: 749150 - DNA, 653 bp, Homo sapiens
aacaaatcgccaccaacttagcggcttaaagcaacacaaatttatacagctctggaggccagaagggcaaaatcagcatctttgggctaaaaacaaggtgttggcagggctgctctccttctggaggatctaggggagaacccatttccttgcctttcccacttctagaggccacctgcattccttggcttgggcccctgcctccatcttcaaagtcagctgagcctgggcagtatagtgagaccccatctctacaaaaattttaaaaattagccagtgtggtggtacacgcctgtagttccagctactcaggaagctaaagtgggaggatcacttgagcccaggaggcagaggttgcagtgaaccgagatcacaccactgcactccagccttggcaacagtgccagwccctgtttctaaacaaaaacaaacaaatgaaatcagctgcacgtgatatcttcaagtctcccttctgtctgctcgcacatgccttttcactgcctttgaccttcctgcctccctcttatgtggacccttgtgatgatgttgggccttcccagataatccatgataatctccccatcttaagacccttaacagaattacatctacaagtcccttttgcctttgaggtgacattcacaggttctagg

SEQ ID NO: 749151 - DNA, 653 bp, Homo sapiens
aacaaatcgccaccaacttagcggcttaaagcaacacaaatttatacagctctggaggccagaagggcaaaatcagcatctttgggctaaaaacaaggtgttggcagggctgctctccttctggaggatctaggggagaacccatttccttgcctttcccacttctagaggccacctgcattccttggcttgggcccctgcctccatcttcaaagtcagctgagcctgggcagtatagtgagaccccatctctacaaaaattttaaaaattagccagtgtggtggtacacgcctgtagttccagctactcaggaagctaaagtgggaggatcacttgagcccaggaggcagaggttgcagtgaaccgagatcacaccactgcactccagccttggcaacagtgccagtccctgtttctaaacaaaaacaaacaaatgaaatcagctgcacgtgatatcttcaagtctcccttctgtctgctcgcacatgccttttcactgcctttgaccttcytgcctccctcttatgtggacccttgtgatgatgttgggccttcccagataatccatgataatctccccatcttaagacccttaacagaattacatctacaagtcccttttgcctttgaggtgacattcacaggttctagg

SEQ ID NO: 749152 - DNA, 596 bp, Homo sapiens
tagtctcatccctcgaagctttacttttgataagtaatgggaagtgtttggaggtcagaaaaccttgtctgtcttcataaagttgagttttaaacattcttgtctttctaggatttaataaaaaaaatcagtttgaaagggcattaatgacatgttcaaaagacatcttttttctatgtgtgtagcttcaaaagtgactcagtaggccgggcatggtggctcacgcttgtaatcccaaagctttgggaggccgaggtagaaggattgcttgaggacaggagtttgagatcagcctggacatggtgagactcagtctctagaaaaaatttaaaaattagccaggtaaggtggcacatacccattgtcctaactacttgagaggctgaggtgggaggatagcttgagcccaagggttcgaggcttcagtgagctctaaatgcaccatygcactccagtccaggcaacagaataagaccttgtctttaaaaaaaaaaaaaagactcagcagtaagcagtagtattttgcttaattctaagtgccaaggttttgtactctaatataactctacaccaaaggaatcaggattctagtagaa

SEQ ID NO: 749153 - DNA, 641 bp, Homo sapiens
cctagagatgtcaaacaggtagattcctctcccattcatatctcctatccttgcccacagcccttcccttcttggacttatcagagaccagggtgctgggcagggcttcaggtggttaaaaagtgaaagttcttgagtgaartccaaaggcgcacacctgagagctgagtgggcaaaaggtcgctggctgagtgctggggatagtctggcttggaagtcagatggacgagtccaaatctcagctccttaccccgtaacattgagcccctcagctctctgaacctctgtttatttgcaaaaccttgccaagggcttcaaacaggatatcctcataaaacaagtatgcctatttgggggactaagtgtgtgaagtgctgagttttaggagtgcagtaaatatcggatccctccttcttcacctcaggtttgcgagttaaccagtgaggggccttccaggcctagtgctcttgtagaccgaaccactagctttcctagagaaggtaactgaggcctagagagtggcctccaggttccgtgctctgtggcagagctggccttggctccaagtcccagggttcccagctcagtctcagctgatgcctcccagcctggcggtctacgctgcctgctacattccctgt

SEQ ID NO: 749154 - DNA, 617 bp, Homo sapiens
ataagagaatttgtcagaggaggtttggcaggatggactattgcatagaactgcacagactgtgcactgcacgcctccagaaggcactctccacagggattactatgtaaatggacctcctaaagttgtgcagcatagggaccctagggcttgagcatgcccmccccccctccgctgcttcaaagcccctggccttggtgctgactgttgggctttcctcttccccttcccaaccagcactgaccatcatccttcccatacgctggcgatgggtagtaatgaactgtcccagtgagcagttctcccagactgggctgtcaaagcatgctagtgagagattcctggatggcaggcaggccatctggattcttgctcagccaggaaactctgtcctctgggaatatcctcccagtcagggtgttagggggctcctggatccccaagatcttcatggtcccctagaactgctcctctccccagcctgcagtgggcctaatgacccacatgtagccagggagtggtccccatggggtttgttttattgactcagctaacaatgccacaatgactctgattgccttcttctcacctgagagacccagctctgggcagccaag

SEQ ID NO: 749155 - DNA, 624 bp, Homo sapiens
taatgaagcagagttaaagaacaaacaacttccagcgaggagatgacttactcaattcatgctgtgaggtgtgagtaagacttctctgggcagaggtacggaggagacctctctgccctctgcacgcctttccagctaatggtgacttcaaccacagcaggcacataagcaaaatcaagagaatttcagacatgacctcatccaaacctcctaggtagagaaactgaggcccagagacagtcttgccagagtcacatgccactggtggtcaggacaagaggctgggtccctagactsctggtcccttagtggcttaaagtcaccaaagtgagccaggcctgccctaaaatagaacagagccaatcatttttcacagattgcaggaaaagcactcaatggatggcattttctctgtttctttaaactttctcttataagctgtacaaccattttgctcagcccagtggattcacttttaatattttatgtggtaactgagctcgtgtttttttttttctgctgaaattgtttctcaaaaaacctgtatgagtcattctgttttgagaggctgcctattaaagtgtagtcacatcttctaatggaaatactgttccttgttctgct

SEQ ID NO: 749156 - DNA, 557 bp, Homo sapiens
agaaatatttgcaacattttcacagaaacaggttaatctgtaatattaggaatgtaatgaacttttaaatattgaggggaaaaggccaaaacttgatagaaaattaggcaaaaggcgtgaacaaacagttcatacacacaratacaaaaatatgtagatggaccttaaaatacagaaagatgttcaacttcactcattatgttataaatatatattagaactacattgagataccaatctttataaaattgacagaatttcagaagtttgaccatgcagtccattggcaaggctgtaatgattctcataatcattggtgggaatgcaaaatgatacacccctgtggagggaatttggaaatatctagcaaaactatatatgcaatttaccctttgactcagtaatactaactccaggaatttatcctgaaagtacacttctacaaatataaaacaacgtatttataaggttgttcacggagacattacttaaacagcaaaatattagaaacaatttcattcaattaggatagtaattgaataaactgtgatgcagtc

SEQ ID NO: 749157 - DNA, 582 bp, Homo sapiens
agccatatgacgtcactgagcactggaaacgtggccagtttgaatccagatgtgttgtaagaataaaatatactctaggttttaaaaactttgtatgaaagtaagtattctaaaatcttattaataattttaggttgattacatgttaaaatgacgacattttggacatattgagttaaataaatcattaatatgaattttgtttcttttcaaaaatgtggttttgctgggcatggtggcttatgcctgtagtcccagctaccggggaggctgaggcaggagaatggcgtgaacccgggaggcggasgttgcagtgagcccaggtggcaccactggactccagcctgggcgacgcagcgagactccgtcacaaaaaaaaaaaaaaaaaaaaaaaaaaaaagccaaagccaaaaatgcggttgctaggaacgtttaaattacatgtatgtgccccgttaagggtctatcaggccatgctgccctggacagtcatggctgtaggctgcagttctctggcccctgacctccctgcttcccgctcccccagcctctcctcctcctctcctctgtacgtcagccagc

SEQ ID NO: 749158 - DNA, 582 bp, Homo sapiens
agccatatgacgtcactgagcactggaaacgtggccagtttgaatccagatgtgttgtaagaataaaatatactctaggttttaaaaactttgtatgaaagtaagtattctaaaatcttattaataattttaggttgattacatgttaaaatgacgacattttggacatattgagttaaataaatcattaatatgaattttgtttcttttcaaaaatgtggttttgctgggcatggtggcttatgcctgtagtcccagctaccggggaggctgaggcaggagaatggcgtgaacccgggaggcggacsttgcagtgagcccaggtggcaccactggactccagcctgggcgacgcagcgagactccgtcacaaaaaaaaaaaaaaaaaaaaaaaaaaaaagccaaagccaaaaatgcggttgctaggaacgtttaaattacatgtatgtgccccgttaagggtctatcaggccatgctgccctggacagtcatggctgtaggctgcagttctctggcccctgacctccctgcttcccgctcccccagcctctcctcctcctctcctctgtacgtcagccagc

SEQ ID NO: 749159 - DNA, 604 bp, Homo sapiens
cagatctgtggtgtccgtatgaacaaactgccaatcagtgaagcagccagccagattgtctcctcctgaaaagccctactctcttctatgtgacagacggattgcaattagttaatcagacagactaatcttagattygaaatagaagacttttctgaccctgagtaagtcccttaatctctgttttcaactttgtagaatacaggcaataaactactacctatcacatggggatgttgtgctaataatttcaggctttctgccatgctgagctggtctggccctgctcctgatacagtgctctaaggagtttggcatttgccaagagaccaattcagtgagatgggagaggcataagaaagaatgttttggaaaagtcgtccctgaggtctgaggtctgaggtctgaggtctagtgctggtacaactgtgaaaagcttcttcaggtggtgctagaacaacagaacatccacatgcaaaaaaattaatctagatacagactttacactcctaccaaaaattaactcaatagggatcatagacctaaatgtaaaatgcagaactataaaactcctagaagataacatagaagaaaacctacatga

SEQ ID NO: 749160 - DNA, 620 bp, Homo sapiens
tttttttttggtaggtatgtctcatgaaaagctatgtccctcaagacaagactactttttgggtattgttatgaaaccctgcactactttataagctattttcaaaatcaaacccgagcactgacattaaaataacaatgtaatgtaaaattattattattattwtttttttttttttgagacagtctcgctctgtcgcccaggctggagtgcagtggcgtgatctcggctcactgcaagctctgcctcccgggttcatgccattctcctgcctcagtctcccaagtagctgggactacaggtgcctgccaccatgcctggctaatttctgtatttttagtagagacggggtttcaccgtgttagccaggatggtctcgatttcctgacctcatgatccacccgcctcccaaagtgctgggattataggcgtgagccaccgcgcccggcctagaattatttttaaaagaaatctggaggctgatgaaatttcaagtgatttttattttcttcattatgtttttctctatttcccacatttcatttaacaagacattatacattaatgaagttctagttaagagagatgagtatttttgaaaagcatatctaatatataat

SEQ ID NO: 749161 - DNA, 620 bp, Homo sapiens
tttttttttggtaggtatgtctcatgaaaagctatgtccctcaagacaagactactttttgggtattgttatgaaaccctgcactactttataagctattttcaaaatcaaacccgagcactgacattaaaataacaatgtaatgtaaaattattattattattttttttttttttttgagacagtctcgctctgtcgcccaggctggagtgcagtggcgtgatctcggctcactgcaagctctgcctcccgggttcatgccattctcctgcctcagyctcccaagtagctgggactacaggtgcctgccaccatgcctggctaatttctgtatttttagtagagacggggtttcaccgtgttagccaggatggtctcgatttcctgacctcatgatccacccgcctcccaaagtgctgggattataggcgtgagccaccgcgcccggcctagaattatttttaaaagaaatctggaggctgatgaaatttcaagtgatttttattttcttcattatgtttttctctatttcccacatttcatttaacaagacattatacattaatgaagttctagttaagagagatgagtatttttgaaaagcatatctaatatataat

SEQ ID NO: 749162 - DNA, 620 bp, Homo sapiens
tttttttttggtaggtatgtctcatgaaaagctatgtccctcaagacaagactactttttgggtattgttatgaaaccctgcactactttataagctattttcaaaatcaaacccgagcactgacattaaaataacaatgtaatgtaaaattattattattattttttttttttttttgagacagtctcgctctgtcgcccaggctggagtgcagtggcgtgatctcggctcactgcaagctctgcctcccgggttcatgccattctcctgcctcagtctcccaagtagctgggactacaggtgcctgccaccatgcctggctaatttctgtatttttagtagagacggggtttcaccgtrttagccaggatggtctcgatttcctgacctcatgatccacccgcctcccaaagtgctgggattataggcgtgagccaccgcgcccggcctagaattatttttaaaagaaatctggaggctgatgaaatttcaagtgatttttattttcttcattatgtttttctctatttcccacatttcatttaacaagacattatacattaatgaagttctagttaagagagatgagtatttttgaaaagcatatctaatatataat

SEQ ID NO: 749163 - DNA, 642 bp, Homo sapiens
catttcatttaacaagacattatacattaatgaagttctagttaagagagatgagtatttttgaaaagcatatctaatatataatgagtgctgagctctccccttgccctggaagtgaggcgtggaggggtctttatgaaggctccggagcagacaggcagcaggcacggctgcagggtggtacccagtggctcctgatgcaggcatgaggtggccgtgctgacccctgmcttccttgaagtgtggtttctggttataggcacagcttgaaacagggattttttaaaagttttgtagagtcatcaaaggttcaggatatgagtaggaaagcctctattcccagatccttaggatttggccagaggaaagggagatcaaatgtcatgctgtgctcccaggctcaggccaggcaggcccctcactccccagccctgcctcctcaggaattatttttcaaagcattttagcttcaaagtgtcagggactagaatatgtcaccccaaaatatgccactttggcataaggattattttgagctgaagaaaactgagaaaccacaaacaccaaaaaggctctctgtcttcccctggcatttgcctaaaaacaggacctgtttttaaaggtccatttgtcgaggtgtgt

SEQ ID NO: 749164 - DNA, 624 bp, Homo sapiens
ccccgtctctattaaaaatacgaaagttagccagatgtggtggcatgcacctgtaatctcagctactcgagaggctgaggcaggagaatttcttgaattcaggaggcagaagttgcagtgagcggagatcgagtgccactgcactccagcctgggcgacagagcgagagtatcccaaaaaaaaaaaaaaaaaaaaaaaaatcaaagttatactgacactatactgtagtctattaagtgtgcgattgcattattasgaatcctcccatctcctctctcctgctgtttctggtggcctctgaccatgtatttgtatggtgttggagatacagccagtggctatgggaggaaggtgctttctggctggcagagtgtttacgacttcagttcttacatcaaatgcaccttgctaaatctaaacaaccagctgtctattaaaataatgaatcctcctctcttataaggtagacgtacagccatgacaaggtactatactggcctttaaggcattttgttccaaatactgcatgggaagagtaaaatgttctctcttcaagagcagtggtgacaatcacagatgaccaagcttgaagaacacagttttcacagactgtcgtgggggacg

SEQ ID NO: 749165 - DNA, 569 bp, Homo sapiens
gtcttacctagagaatactttatggcttaaaaaaacattcatgattatctgagccttcagcaagtcataatctttttgctgctggaaggtcttgccttaatgttgatggctgctgactgtcagtgtgctggctgctgaaagttgggatggctgtgacaatttctcaacataaaatgacaatgaagtttytggcacgattgactctctctttcacgaagatgctgttggtagcattttgcccacagtaaaacttttcaaatttggagtcaattctctcaaactgctgctttatgaactaaggtttatgaaatactctaaatcctttgttgtcatttcaacaatgtgtgaagcgttcaacaatgtttcaacagcctcttcaccaggagtagatgccctctcaagaagccactttctttgctcatcagtaagaagcaactcctcattcgttcaagtttaatgagattgcagcaattcagtcccatcttcaggctccacttctaattccagttctcttgctgtttccaccacatctgcagtgactccctccactgaagccttgaacccccgaa

SEQ ID NO: 749166 - DNA, 569 bp, Homo sapiens
gtcttacctagagaatactttatggcttaaaaaaacattcatgattatctgagccttcagcaagtcataatctttttgctgctggaaggtcttgccttaatgttgatggctgctgactgtcagtgtgctggctgctgaaagttgggatggctgtgacaatttctcaacataaaatgacaatgaagtttctggcacgattgactctctctttcacgaagatgctgttggtagcattttgcccacagtaaaacttttcaaatttggagtcaattctctcaaactgctgctttatgaactaaggtttatgaaatactctaaatcctttgttgtcatttcaacaatgtgtgaagcgttcaacaatgtttcaacagcctyttcaccaggagtagatgccctctcaagaagccactttctttgctcatcagtaagaagcaactcctcattcgttcaagtttaatgagattgcagcaattcagtcccatcttcaggctccacttctaattccagttctcttgctgtttccaccacatctgcagtgactccctccactgaagccttgaacccccgaa

SEQ ID NO: 749167 - DNA, 621 bp, Homo sapiens
ggattatgaattttactttgaataggtagatttctcatgttgccaatgcaaatttccccaacatttttcttttctttttactagtcattagaaaggacttcatgtggtctttttcggttatttgtgacttttcgtgaataaaagtttttctctttgttctggttcttttttttttttttttttgcgatggagttttgcccttgttgcccaggctggagtgcagtggcgcaatctcggctcactgcaacctccacctcccgggttcaagttcaagtgattctccagcctcagcttcccargtagccaggattacaggtgtgtgccaccctgcccggctaattttttttgtattttttgtagagatggggtttcaccatattggccaggctggtcttgaatttctgacctcaggtgatccacccgcctccgaaagtgctgggattacagatgtgagacaccgcgcctggcctgttctggttctttatttgcttttctctctaaccctcaaaaacagtgacagcagccaaagcaaacagccctagcatgaagacagctatctagtgcagctggtttccccacagtggcttgtggtgtaccgtgaaggagccatcactgtttaac

SEQ ID NO: 749168 - DNA, 580 bp, Homo sapiens
gtgtggcaaccttcatcaacgagctctgctggaccttctggatattataactcactgcagcttctccatcagtacttgctgcttcaccttgtacttttatgttatggagatggctgctttccctaaacctgattaaccaacatctgctagcttcaaacttttcttctgcagcttcctcatatctctcaaccttcacagaatttaagaaagtgagagtcttgcatggattaggctttggctaaaagagatgytgtggcttgtttggtcttctatacagaccacaaaaactttctccatagaagcaataagtctgttttgctttcttatcattcatgtgttcactggagtagcaattttaatttctttcaagaactttacctttgcattcacaactttaactgtttggcccaagaggcctagctttcagcctatctcaatttttgatatgcctttctcattaagcttaatcatttttagcttttgatataaagtgaaagacatacgacattttcttttacttcagcactagaggccattgtagagttattaattagcctaatttcagtatttttgtgtctca

SEQ ID NO: 749169 - DNA, 637 bp, Homo sapiens
gttaaaagttactggatatcaaatggacagctaagtcttcattctgtgactaatacttacatatgtttgccccctgctgaagaaagaggcactctggatttggttatgtttcaggcttttctggtatcctgctttcagtcttaaccctctggaggcctaatggtcacatcggacactcagactaccagaacttgctgctgctctgtcattccatttacaactgtggaagcaaaacatycaccctcctgcctcccaagttgacaaagttgatctagataggtgaaccagtcacgttaaaatagcttacttaggaactgaccagttcttctgggacagatggctttatatatatatttgcttctatggcatattcctagaaaaagttctgtgtacagacctcaaaagtacaaacattgggcatcttcctgaaaaaccagagtctgttttcctaactgtttacattgtctcaagaaatttcccactcaatgacaatccactaccttaatgtccatttccccaaaagcaagagccagtgatggtgctgtccttactggaaatggctttgcagtcccccaaaaatgcagtttcccaaaagtgatccctcttaaaacaaaacctgagaatatagttacaaaac

SEQ ID NO: 749170 - DNA, 637 bp, Homo sapiens
gttaaaagttactggatatcaaatggacagctaagtcttcattctgtgactaatacttacatatgtttgccccctgctgaagaaagaggcactctggatttggttatgtttcaggcttttctggtatcctgctttcagtcttaaccctctggaggcctaatggtcacatcggacactcagactaccagaacttgctgctgctctgtcattccatttacaactgtggaagcaaaacattcaccctcctgcctcccaagttgacaaagttgatctagataggtgaaccagtcacgttaaaatagcttacttaggaactgaccagttcttctgggacagatggctttatatatrtatttgcttctatggcatattcctagaaaaagttctgtgtacagacctcaaaagtacaaacattgggcatcttcctgaaaaaccagagtctgttttcctaactgtttacattgtctcaagaaatttcccactcaatgacaatccactaccttaatgtccatttccccaaaagcaagagccagtgatggtgctgtccttactggaaatggctttgcagtcccccaaaaatgcagtttcccaaaagtgatccctcttaaaacaaaacctgagaatatagttacaaaac

SEQ ID NO: 749171 - DNA, 637 bp, Homo sapiens
gttaaaagttactggatatcaaatggacagctaagtcttcattctgtgactaatacttacatatgtttgccccctgctgaagaaagaggcactctggatttggttatgtttcaggcttttctggtatcctgctttcagtcttaaccctctggaggcctaatggtcacatcggacactcagactaccagaacttgctgctgctctgtcattccatttacaactgtggaagcaaaacattcaccctcctgcctcccaagttgacaaagttgatctagataggtgaaccagtcacgttaaaatagcttacttaggaactgaccagttcttctgggacagatggctttatatatatatttgcttctatggcatattcctagaaaaagttctgtgtacagacctcaaaagtacaaayattgggcatcttcctgaaaaaccagagtctgttttcctaactgtttacattgtctcaagaaatttcccactcaatgacaatccactaccttaatgtccatttccccaaaagcaagagccagtgatggtgctgtccttactggaaatggctttgcagtcccccaaaaatgcagtttcccaaaagtgatccctcttaaaacaaaacctgagaatatagttacaaaac

SEQ ID NO: 749172 - DNA, 596 bp, Homo sapiens
tgtgtgtttctggtcattgcaaatggagagcctaaatcactcagaaggcttggttctttcattcagtgttaacattggagagaaccatttttctctaaacggtttacagacctcactaggcagactggtgcagttcagggctgaaaagtgctgcctgggatggcaaagcattctctgaaggtttatgcaaattyctgcagcaaaaaagtgttcgcttgttgcctcaatgcttggatgttgacacatttgagcccattagaagggcatcttgtgcgcaagtcactgccagtctgtctgcatgaaacaccatgatggggggtggggatgtctagtcagtgtaagaaagaaggtggcgagtgtgtgtgatgtgtaattcccccaggtctttatttgaacacaaatctatgctctttcccagctacaaaaggaaacatttacctacatgaataatcaacactctgggcgtgtgtgtaagctatgtatacatacaaattcataatctaatatataccagctattgcaacagtctgtctgtacatgaggtatgaatttaccatggtttaggcggccagtggggccagaagttacactttgag

SEQ ID NO: 749173 - DNA, 596 bp, Homo sapiens
tgtgtgtttctggtcattgcaaatggagagcctaaatcactcagaaggcttggttctttcattcagtgttaacattggagagaaccatttttctctaaacggtttacagacctcactaggcagactggtgcagttcagggctgaaaagtgctgcctgggatggcaaagcattctctgaaggtttatgcaaatttctgcagcaaaaaagtgttcgcttgttgcctcartgcttggatgttgacacatttgagcccattagaagggcatcttgtgcgcaagtcactgccagtctgtctgcatgaaacaccatgatggggggtggggatgtctagtcagtgtaagaaagaaggtggcgagtgtgtgtgatgtgtaattcccccaggtctttatttgaacacaaatctatgctctttcccagctacaaaaggaaacatttacctacatgaataatcaacactctgggcgtgtgtgtaagctatgtatacatacaaattcataatctaatatataccagctattgcaacagtctgtctgtacatgaggtatgaatttaccatggtttaggcggccagtggggccagaagttacactttgag

SEQ ID NO: 749174 - DNA, 598 bp, Homo sapiens
tacagcatctatagagatgattgtatagttttttaaaattaatatgatatattacattaattttttatgctggtccagccctgcatcactgggataaatttcacttattcagagtacataatctaaaaatctaaatatgttatgtgatttggcttctagtattttgttgaggattgttgtgcctatgttcatatgggatatggctggtctatatttgtgtctgtgttcttttcttgcattatttttgtctggcattaatatcagggtaattctagcttcagaaagtgaggtgagaagtattcccttctcttctatgtgttggaacagtttgttaaggattgatgttaacgctccattgaacatttggcaaaattcaccagtgatactatctgggctcaggctttttttggcrggaagttttcttttttttaattgtgaattcaatgtttacttattataagtatattgagatagtctattacttcttgagtcagtttcaggcgcttgttactccctaggaatttttcaatttcacataggttatctagtttgctggcgtttaattttattttatttcttatgctccctttttctttct

SEQ ID NO: 749175 - DNA, 600 bp, Homo sapiens
aaaaaatatcatgtacgttttcccagcagcacgtagtgtctgcaaaatggaagagagattttaataaattttatataggatgttacaaacttacactctaagtaataaaatattctacagcaattctcttgagttcggtgttttatgattctcagaaaaatgattttatctgttctcaccagttgataaaggttttcccagaagtcttgagtcatgagacgaaataaggacaaaaaggcccaactaaaggtgtcaaagctcgtgtagccatagttggggtttctaccagccttcacacagatgtatccttcaggacactggctrtaattaggttagaggaaagaaaggaagtcaataacggcaagtctgctaattggttttcctgttttaatatatgccaatgtctgttttatacaggcactagaaaaaagccgatttctctcaccttacccagtacttaactcagcactaagtggactgatttatataataacagaatctataaggtctactttgtggattcctctgtgattcataattgtcattattatatttattatgtctccatataaaagcaatcatatcatgattaatatcttc

SEQ ID NO: 749176 - DNA, 615 bp, Homo sapiens
gcgcaaacacgcttagacagaacacagtcaagatcatgacatcagaaagcttcttcactgactggatcagggcccccacaatggtcttcaggcctacaaacaaaatcagaagggggaatttaaatatactactcaacagctattttaccggcaaaaatatcatgagcttgtcctggaaaataaaaatgtcatgcagaatgccaacaatattagtttaatgtttgtgattgaataacattttcatgaaaagcctrctagctggtgaaaatgaatgaaagcagaacttgtatgttcattagaaaactgtgaatggaaatgaaccaaatgtgtatttccaaacactctttagagcaaaagaatgattttgttattcatgcttaaacatcaaccttgtgtaaatattttgcttttatttgcagatgtcttactccctaaccccttattggttttagaaaagtctatgtgaatagagtagtaagaaatcttgaagtcgatgaattatgaggttatatatttgtgaattctgcaagcttgagtatgggttaaaaaaaggaagacatctgaaatctgagccccatgcagcactcatgctatcccttgctctttcatttatct

SEQ ID NO: 749177 - DNA, 622 bp, Homo sapiens
gctacgtcactggccaagcaaataagtgacagatgcaagactgcaactagcattttgactcctgctcccaaaaaggatttattctatattgctttttgtttataaaaggttaacagcattgagatctgaagttgatgtgcagaggcttcgtggatgtggtggtacttacrttaggctttaaaggctggcctggagtgagagaatatttcaattgcaagggaaaattatgagcaaaggcccaaacccaagcaggacctgactctgacctataggagaaaccaaagcaggttgggacaatagcagatgagaaaattagttggcctggggtggaggttcttgccttggtcaagttacagattttatacagaaagggcgatagtagccagagtccagaggtatcaaatacaatgccgaaagtcaatggcaacttgctgaggctttttaaaaggaaagtaaaatattaagaagaaaactctattacaaaatatgttaaatattataaattatcaatgttacaaaaaaactgatatgatacatatttaaattacaattctagtacagctgtaagagtggataagcaatgggtgggttgtaaagaaatgaaagaattaggtgcacaaaa

SEQ ID NO: 749178 - DNA, 622 bp, Homo sapiens
gctacgtcactggccaagcaaataagtgacagatgcaagactgcaactagcattttgactcctgctcccaaaaaggatttattctatattgctttttgtttataaaaggttaacagcattgagatctgaagttgatgtgcagaggcttcgtggatgtggtggtacttacgttaggctttaaaggctggcctggagtgagagaatatttcaattgcaagggaaaattatgagcaaaggcccaaacccaagcaggacctgactctgacctataggagaaascaaagcaggttgggacaatagcagatgagaaaattagttggcctggggtggaggttcttgccttggtcaagttacagattttatacagaaagggcgatagtagccagagtccagaggtatcaaatacaatgccgaaagtcaatggcaacttgctgaggctttttaaaaggaaagtaaaatattaagaagaaaactctattacaaaatatgttaaatattataaattatcaatgttacaaaaaaactgatatgatacatatttaaattacaattctagtacagctgtaagagtggataagcaatgggtgggttgtaaagaaatgaaagaattaggtgcacaaaa

SEQ ID NO: 749179 - DNA, 439 bp, Homo sapiens
accatgtggtagatattcttgtaagcattgggatgcaacattgaacaaagtgaagttcctactctcatgtagttacattcatgtgagtgtgtgtgtgtgtttggaagaagaaagacaataaacaaatacgtcgattgggagctagtgataagtgttactaagaaaaatamattagtgtcaaagggaggagtgacaaggtgttgttttagattgtatggccagtaaaatcctttctgaaaaggtaccagttgagcagagatccgaaggaagcaaaagagtgagatatgggaatctagggataaagtcagttcaaggagaacagcaagtatgaaggtaaagtctgaaggtggtggtgcaactagtatgtttaacaatcagcaaggagacctgagtggctggagcagagtgggaaaggcaggaagcgagaggatgacatcag

SEQ ID NO: 749180 - DNA, 656 bp, Homo sapiens
tcagggaggctgaggtgggaggattacttaagctcaggagtttgaggcaacacagcaagaccccatctcaaagaaaaagaagtcttaataaatgtagaaggaaagagaaaaacagaaaatcaccattagacaaacaccactataataattgttgcagacaagatctaccaatgaatgctaaaactagtgggtgaaagttccaggaggaacagaatttttacaattccaaagtgtctcccccaagatatttattaactacaaagggaaaaatagtgattttgaagtagagaagccaggcagaaaccaccttaaccaaatgaccaaggtcaacatcaccagtaataagatagtaataagacatcaatatctctctatatcatgaaccatggatatgatgtactaagagtgacacaacatttctgtggtattcttgccaaacatgcggttcaatcacaagaaacataagacraacccaaagtgaggggcatttgacaaaattaccgatcactactcttcaaaagtgtcatgaaagacaagacagacaagacaacaaagactgagcaagtgttttaggctgcaggagactaagggaaaatcacaactaaatgcaatgtggggtcctgaatgggatcctagataggatcctggaatagaaa

SEQ ID NO: 749181 - DNA, 594 bp, Homo sapiens
agtgacaggagcagctgttttgtgttgctaaagacagatccgcaggcattgataacatgcaggttgaggagagggatcaaaactttcagtgaaactrgaggagccaatcacttggttaaggtggcgcctgccaggtttcttaataaaaatgaagtcattatttttctctttttaaatgcaagtcattcgcaatgagcttttttgtttttagcctcctagtatcaagtcaaaaccctgtacccctcttacttttggcagcttctttctttcctaataccaccattgctaatcacaagtctactggttactaactctgtggtattggacaaatttcaattaccattgcacttactccaaaacaaggatgaatgtctagcaaggattaaaaggtaaacatgaaatcataattcgtctttagtgggaagatataacatcctctttcataatgacaaattttggtattctggtagtaatctgttctggttattgtgttcgctttaattctcacaagtattttgcatgagaaaccattaaagaaatatgagatacttatatccatctttatttggaatctataattagaaattactttat

SEQ ID NO: 749182 - DNA, 578 bp, Homo sapiens
ataatttctggtatctgagaaattttcataatgtaaaattttaaaagataagattattaaataataagaaactgatttttctcaatttccataaaaatgtcatatggcaaaatttatgtgcatcagtacaactttgtagactcttaaatagcacaaatttataccaggtatagaatatcgtatctctgaattgaggcaaaattactgccttccacragaaagagataacacatttgtattttcactaacatgtcgcagtaaccaaagcttaggtttctatggaagcaggaacattaatctgctaggtactgaatagtaaaccaattgccttattgtgttatagccgagatgacaaatatctgcagtaaagctatgcattaattgtcaatcataaaacattttgtgaataagcattttggtcaatgtactaatctatatcctagggaatacaaaaatcaataagacactccatttgtctacacatagaattgcaatacaagcttgaaattggtgggggcctaattaacatttttgaaaggctgcaagtaaaaggcaattttaaaactgtattacacttc

SEQ ID NO: 749183 - DNA, 531 bp, Homo sapiens
acatattatatctttactggtaacatgatcccacaattatactttccctctaaaatcattccacaaatttttttttttttttgagatgcagtctcgctttgttgtccaggctggagtgcagtggcatgatctctgctcaccgcaagctccgcctcccgggttcacgccattctcctgcctcagcctcctgagtagctgggactacaggtgcccgctaccacgcccggctaatttttttgtatttttaatagagayggggtttcactatgttagccaggatggtcttgatctcctgaccttgtgatccacctgcctcggcctcccaaagtgctgggattacaggcgtgagccaccgcgcctggccccacaaattatcttttaagaaggtaaaatgaatctttctagaatactacttaatattaagtcatttcttggctcaataatctacagtggcatccaggtatgggtaggattaaggctaccacataattgttagactataacctacttcctgaaatgtaaattgtaact

SEQ ID NO: 749184 - DNA, 525 bp, Homo sapiens
tccctacccacacttctgtgtcagcctgtactttcatctgccttccttctttaggctgtttctggagagaatgactcccagttctcttattactctggcccagcctcagttttcttcactgcctcatcttcctctgtccacagcttcaatataaaatgtggaccagggttctattcccagcttcttccatcccaccctctggccaaacagayacattaaaaatggggcagggaacagtggctcatgtctgtaatcccaatactttgggaggctgaggtgggaggattgcttgactccaggagatcaagaccagcctgagcaacatagagagacattttctctactaaaaaacaaaacaaaacaaaacaaacaaacaaacaaacaaaaaaaggccaggcgtggtggctcacgcctgtaatcccagcactttgggagtccaaggcgggcggatcatgaggtcaggagatcgagaccatcctggctaacatggtgaaaccccgtttctactaacaaatacaaaaaatt

SEQ ID NO: 749185 - DNA, 607 bp, Homo sapiens
atggaaaatattccaggatcatcttgtatatttcctgccctagacccagaatcagccattctctcaaggaaacttgattccttatcctttaaggaaccctgtttcctttcattggagaccaggattaagaggaccacacgccagttatgggcaactcattgccatcacattgtggttacttgtgagctttacagcaggaaaaggtaataatccattgaataccaataaaagcaacaagtataccaactacttaatataaaaattggcattttaagggaaaaaataagcatttatccaaacttttatgtatgaattgtaaagaacaaaatacttctagatgatgaggaaaacygctatgacaagaatgaagttaaaaactcaccaatttcacagcctaataaaaaatgttcaggcagcaatattcatgtattaaataatctatgactacctgaatgcaataaaccttagcaccaataaaattggagttaacagacattggaagtctccgttatgaaccggcatgaagcacacctcattttctgtaaaacgtcctttccacagaagttacacatggattcattaagcctgtagtactagcttccattac

SEQ ID NO: 749186 - DNA, 531 bp, Homo sapiens
tgggagaagcaggcttggcataacctgtctccctcattactagaattctggggtctctgccgaagaagcttggaaatcgcccttaactttagcagacacatttgcccttggcgtagaccagagtgagctcctaggcagtaagaagctgatggccaggggaaagcagactgttcrgtgctgagggagatagaaacagggagttcacaggatgcacaagggtgttggggtttccctgtagggaaagggctggccagggagagggaggggtggagcttctcccagctcgccctctgccccctgggaaccatggcattcagatgtcaagtaaaatatatttccctagttcagctgcaaccttaggggcctgtgaggctgtcattgccagagcagcaccttggttctcctgcacctgccaggcagacgcattgtcagtgcaggctgctctcacagtgggctggccagcctgggtgggcctggcctccgctgaggagctgcaccctgctgagagactaccccaccttccccaccggg

SEQ ID NO: 749187 - DNA, 531 bp, Homo sapiens
tgggagaagcaggcttggcataacctgtctccctcattactagaattctggggtctctgccgaagaagcttggaaatcgcccttaactttagcagacacatttgcccttggcgtagaccagagtgagctcctaggcagtaagaagctgatggccaggggaaagcagactgttcggtgctgagggagatagaaacagggagttcacaggatgcacmagggtgttggggtttccctgtagggaaagggctggccagggagagggaggggtggagcttctcccagctcgccctctgccccctgggaaccatggcattcagatgtcaagtaaaatatatttccctagttcagctgcaaccttaggggcctgtgaggctgtcattgccagagcagcaccttggttctcctgcacctgccaggcagacgcattgtcagtgcaggctgctctcacagtgggctggccagcctgggtgggcctggcctccgctgaggagctgcaccctgctgagagactaccccaccttccccaccggg

SEQ ID NO: 749188 - DNA, 678 bp, Homo sapiens
ctctggagctttccttacttgtaatgtctgtatctggtttgggtataaaggtaatgctgacttcatagctgagttagaaagtattccctctgtttctgtttcctggaagagattatatagaatgtgtatcattttttcctagtttagaagagcttacctatgaaaccatctgggtgctttcttttttggaaggttattgattattgacttagtatgtttagtagatattaggctattgagattatctattttttctgtgtgttttggtagtttgcatcttttgaggaattggtccatttcatgtaagtkaccaaatttgtggacatacagttgtgcataatattcttttattatacttttaatctatatgggatcaatggtaattacgcctctttcatcttaactttagtaacttgcatcttctttttatcgtggccaccctggcaagaaatctattaactttactgatcttttaaaacaaccagcttttggtttggttggttttctctattgatttcctgttttcaacttcattgatttctgttctaattgttattatttttttcttctgctgctttaagtttatattgttcttctttctctggtttcctaaagtggaagcttagatttatatctttattcttttctaaaatattcagtcacgtgctataaatttcc

SEQ ID NO: 749189 - DNA, 602 bp, Homo sapiens
ggatgtaggcctgactcaactaattcaatcaggtgtattttgttggacccaaaataccatatatatcttttgaacataaaaagctgtgccatgctaatattctctatcactaaactttctcattcattcattcaatatttctggagtgtttacccaggctagacatacaggatggtgaacaagatcgacatggtaactatactcatgaaacttaggtctacttagtctcaccaataagaaaatatataattaaaaatttaacaagtgctaggaatgaaaataataggatgaggctgggaacggtggctcacacctgtaataccagcactttgggaggccaaggcaggcggactacgaggtcaggarttcaagaccagcctggccaacatggtgaaacccagtgtctactaaaatacaaaaaaaaaaagattagccaggcgtggtggtgcgtgcctgtactcccagctactagggagcctgaggcaggagaattgcttgaacccgggaggcggaggttgcagtgagctgagacggcaccactgcactccgagcaagactctgtctcaaaaaaaaaaacaaaaagaaagaaagaaaataatagg

SEQ ID NO: 749190 - DNA, 612 bp, Homo sapiens
aaagctgagccacccatctttgtcatggagtatcaatttgacttgaaagaacaactaaagacaaactatggttattcggatctgcatatttgacattgttttaaaactaaagtgagcctatcactccaggaaaaatatctgacagcatttgttgccaattataccttttaacctttcaagcaaaaattagagttttgaaaaacttgtagtggccaccatatgcttaatagtttcccartacttaacttttttgatatcagtggtgatttaacaaatatgtttggttttgcttttaaatatgtcatataataaaatgtgccaacatttgtaagggctgcataaccttacaaaatacagtaaaccagtattttccaaatgcatgcatgatgttataaagttatgaataggtaaaagaaaaagtatgaaaagttcatcaatatagttttagattcaattccactttgcaactaaccattaagaaactaccacttgtagaatgttgctctagtatcaaagaagaatatcacaattatctgaaatgcagattaaaatattttttcctattgtaattacacatctacctgaggctggatttgcctcaccagcgtcaac

SEQ ID NO: 749191 - DNA, 569 bp, Homo sapiens
ttttatgtacagaatacagttgattttttcaggagaaaacacacgtggggggagtgcagagtaagtgctaaaatcttttaacagaaaaacacagaagcttatccagtaaaatttttcagagttctgggattgtggagaatgtaatgctctggggaaaagagcagacagatgcttaggttttttatttctgaaagcagcaacagttgatgggatctactatctgcttcaattcttcatttaaagggacaacttctgcccaaacctagaatcctaggtttgaggtgcatgctcacttatgtatacctagggcgaacacctaatgcagagtggaggaaataaaagttagttaaagcataattttgagagtcctttgattctgagcttgatttcctctgtgtccttrtatgacaaatgttttcatccctacatatgtaaataatcaaatggttgatcatctccctaacaaatcttctgttgtgtgctataaagaaaggaagtgactgagtattgtatttctattaagcaagaaggttttcaataaaaattaaatttttaaaactgaaaaactt

SEQ ID NO: 749192 - DNA, 597 bp, Homo sapiens
aaaaaaaactggctgaatttctgtatgaccggccactgttttcaatagagatatttcttatgcaaaaaaaaaaaaaaaaagacgcaaagcaaatggctaaattgtgttaaccctctgataatttcccaatctatacacacaatagttatccttacatatgtacaaagggcacccaaatctttyatgagacgtcttcatgggggaaaccctaatgtcaccattaaagcaatgaaaatgaagtcacctctggcgaggggctgagcacactgtaataacagtgtgcacggaatgccatgataggcccagatactttctgaatgtgtgactcacccaaatagaaagatttaaataggaagtcagggttttcatgtgctctgacgacagagaattcacaaagaaaaggaaaatgctgccaagtctagagaaaagtagtatggactccagaaaagggctggagatctaaggtgggacattgtcgtactgggggtaggtgcaggtctatttccattctgcacacttgttggattatcacacagagacatcactttatattcccagctaatatattgcttctcagagcagtataagaacagggtt

SEQ ID NO: 749193 - DNA, 597 bp, Homo sapiens
aaaaaaaactggctgaatttctgtatgaccggccactgttttcaatagagatatttcttatgcaaaaaaaaaaaaaaaaagacgcaaagcaaatggctaaattgtgttaaccctctgataatttcccaatctatacacacaatagttatccttacatatgtacaaagggcacccaaatctttcatgagacgtcttcatgggggaaaccctaatstcaccattaaagcaatgaaaatgaagtcacctctggcgaggggctgagcacactgtaataacagtgtgcacggaatgccatgataggcccagatactttctgaatgtgtgactcacccaaatagaaagatttaaataggaagtcagggttttcatgtgctctgacgacagagaattcacaaagaaaaggaaaatgctgccaagtctagagaaaagtagtatggactccagaaaagggctggagatctaaggtgggacattgtcgtactgggggtaggtgcaggtctatttccattctgcacacttgttggattatcacacagagacatcactttatattcccagctaatatattgcttctcagagcagtataagaacagggtt

SEQ ID NO: 749194 - DNA, 432 bp, Homo sapiens
cctatgttaattacccttgctatagctcaaagaggattaggctgccttcagccataactctatcctgaggcttctgcaaaaaccttctggccttctaagaaagtttattttacagtttttcccaccatcctgactgaactcctacatctcactgcattggacttgcatatatatatgtgtgtatctatgtatatatacatgcatgtgtatatacacatacatatatttttgagacaggggctctctgttgcccaggcttcaatgcygtgtcgtgatcacagctcactgcagcctcgacctcccaaggctcaagcagttctcccacccaagcctcctgagtagctgggaccacaggtgtgcaccaccatgcccagctaatctttaagattttttgtagagacaaggtctccttatattgcccaggatgttctt

SEQ ID NO: 749195 - DNA, 562 bp, Homo sapiens
attaagatgaccatgtgtttcttccccttcattctgttcatgtgttgtatcacattgactgattttcatatgttgaactgtctttgcattccaagaataaatctcacttggcaatggcatgaagtccttttaatatgttccatatcatttttaattttagccattataatagatgtatagtggtattgcattatagttttcatttgtgttttcctaatgatwtctcaggtgaacatgttttcatgtgcttattaaccagccatatatcttctttggggaattgtctgttaaaatttttttccattaaaaacattgagttgtttgtttctttattggtgagtattgagagttctttctagattctggaccatacgctttgaaaatatttgccccagtctttggcttgcctttttgttttcataactgcattttaaagagcaaaaatttccaattttgatgacatatattaatcagtttgttattttatgggatatacttttgatatatctgagcaacatttgcctagcttaaaattttgaaaaaaatattttatgttttctct

SEQ ID NO: 749196 - DNA, 640 bp, Homo sapiens
tcttgattacccggctaaggaaaggttgtgatgttattctttttttcccttttcaatatcatactgtttggaaggaagtcactatgcacagtctgcatatgaggagtgggaagctattccgcactacctgaaggcatagtactttcataaattctttggaattctgcttgggagatttgtccatgttcctctttatattaactaatttttaaattatttatgtcagtatgaactcatggacatttatgctatggtttcagttatactccaatactaccttgtttatttttttstcaactcgttttagctttggccattggaagctctttctgttggcttctatgtccctttgacatactcctatctttgtgttttgttagagcacttccttactttctgaaaagtccagactcaaatgtatatttcctgccctagtcctagaatcagtcatttttccaaggattcatgtttctttttcaattgaagaatggtattagaaaccaaaatctgagcacccagtgtgctcgttgttactggtgtgtcttgcttctaggttctctcagctgatagagcaaggcagtatatgcatgtgtgtccagctcatatatatgcatatatcaataaatatcttttttatcat

SEQ ID NO: 749197 - DNA, 476 bp, Homo sapiens
aggaggttgcaatgagccgagatcacccaaaaaaaaccgcaatgctggttaaataaaacattgagaaaacatggtgctctgaacaggaatgaggaaacgctatcatctggtatggaaaaaatctccaagacacattaaatgaaaaaagaaagggtcagaatagtgtgtataatgggctaccttatgtgcttttttaattaaaaaaaaaaaaggaagatgataagaacacatgagttttcctatttgcatgatggaggtctagaaggagcctagagactggctacctgttgcaatggggaaggttgtaagatagacgcaggagtgggagggagccygtccatatggatttttatattgttttattctttaactatgtgattgaattaccagttcaaagaaaaatgtaagaaaaactaaacctttgcctttaccatgtcgcaaacacaagcagaattgtagtgatgttttgtcatctg

SEQ ID NO: 749198 - DNA, 354 bp, Homo sapiens
caacagcaacccccacccaacgtgtgcttctaatcttggctttgttaaagcttcagccagctggatgttcaacacagatcagatctccaggaaaacagcttagaaaagatcaatcatgtggatgtgtgtgaatgattgataaactcttaattgctgaaggagatcagagccataggtgaacagattctatctccaaaggtagaattycaggcataggggaaattaggaaggtagccaccttatctacatatcagtaatgctgaccctgctccacttaagaaataggagacttggggctaccagtggagaaagaaggtgaacacataaacaagaaggtgaccttaccttccaggc

SEQ ID NO: 749199 - DNA, 647 bp, Homo sapiens
aaattactgcagaagatgatgtcaaagactgtcttcctaaactacatgttatagtgcctctcactgtgggtgaaattgtgatgacactttgtgattaataatagtctaggaaatcagccaggtgtggtggctcatgcctgtaatcccagcactttgggatgcccaggcaggcgtatcatctgaggtcaggagttcgagaccagcctggctaacatggcgaaacctcatctctgctaaaaatacaaaaattagctggatgtggcggcaggtgcctttcatcccagctctttgggaggctgagrgagggagaattgcttgaagttgggaggcagaggttacagtgagccgagatcttgccactgtattcagcctgggcaacagagtgagattccatcaaaaaaaaaaaggtctacaaagtctgaattatgtgcttatattgctatgcagttacaagagaaaggctgtgtagtactgaaattggcttttttttttaagcctctcccttgacttccatcctgaccaccaggctaccctcatctcctgaaactggtgctattagatcctataatccagttaggctgaaacattcactcttccccaagtacattgtcttcttccttgcctcataccttagtagctgccaggag

SEQ ID NO: 749200 - DNA, 588 bp, Homo sapiens
aaatacatgagcattagatgagggggatgcattctgactaatcacatgattagctattcagaggaagatactgcccttgtatcaaaagtagtgttgagaaaaataaaggcagagcctagcatttgcctcctagcacaggctgaaacatgctagtggccttgtgcagaagaatgatgctttcagctgagctgcaagataggagctggaccaactgggggcttggacaggggtgggatctgacctgattaggctttcyccatccaatctgggcctccaaaagccgttctctggccctctggacaaggcagactcagcaaatctgggaggtatggggattctgccaattccccacctagccccacctcccccaggtttggcaggcgatctaatccccagggtgcagccccacccccacctgaccccacatctggacaaacacatggcaaatatggaaactgaagcccagctgggctggagcacatctggttgttgctgcattggagtcatcttgcagatatcctgagataatcaggcctcacccacagtggccatgttgagacagcagttgtttttttttaaagatgattc

SEQ ID NO: 749201 - DNA, 614 bp, Homo sapiens
agcaggacttgatggttggggtttttatctccatctgccccaggatttctgtgaatgcattagcccaaagcagtcagaactttgtggcagtcctgaccagaccacttaaactattctgtgcctcactttctccagctgcgaaatgagtaaacagacagcccatcttccttctcttcccttctcaggaaagttgtaaataggctcaccctacatgttaagagtttaactgtaccattttataaaatgaaagatttcttttttgaacagcctaacaatagcatattaagttatttgctcatggcatacctagccagctaattctcttaatgaatccaggctttttttcttttgcatagcatctgattgcacaaagccaatagttaaayattttggcaggtgacgagttaatgagtatactgccagctaggtccaaatcacagacacaccagagcacagggcccttttgataaattttctttaacccaacgcatctagcaccctggccaaccatcccataggtgctcatgctgactgggttgccaaggttacaggagctgatatcataattggtgtctgagctctgcccccctaaatggccatgaggagccacttca

SEQ ID NO: 749202 - DNA, 596 bp, Homo sapiens
acaaagattcaatgtcatgcaattcagaaaagtatttactgggggcctactttgtcaagcacgggctaggctctggggacacagcagtgaaggaaacagcctccacttgcacggaccactgtggtcctaggcccgtttgttcttttsggctctgtcctgctcctagaaatgacgtcagctcttatcctttccctgccctctcctttactcactatcttgttctgggaataataccacctcactgggctggctctctgcagttcccaaagtgcctctgcatacgcaattgcatttgcttcttttgacagccctatgaggtagacacgatcatcgtcagccctgttttgtcagtgagaggcggctgcttgtgtcaagggctggcttttcaatagttcacagcgaggtagctgctttgccatgcatgaaaccctgactcagaggcagcttgctgacaagtgatttaacattgggctcctcatggactcacctcttgcacaggatgatgggattttccaggcaagaaaaatcaaggcttagagaggttaagtgtcttggccaagtaagtgcagacctgagattcaaacccagggctttcc

SEQ ID NO: 749203 - DNA, 515 bp, Homo sapiens
atctgtatttttattttatttttatttttttatttttatttttgagatggagtctcactctgtcacccagtctggagtgcagtggcgcaatcttggctcactgcaacctctgcctcctgggttcaagcaattcttctgcctcagcctcctaagtagctgagactataggcatgcgccaccacacctggataatttttgtatttttagtagagatggggtttcaccatgttggccaagctggtctcaaactcctaatgccaggtgatccacccgcctcggcctcccaaagtgctggcattacaggcatgagccaccatgcctggctgatctgtatgtttaaatagtcgcaaatctcaaaaaaatttttcastgtatttatgggggaaaaatcccatatataagtggacctgcacagtttaaactcatgttgtttcaagggtcaactatatttttgttatcgcagccagagcctgagcgaagtaagacaccttctttattccattatctcataactc

SEQ ID NO: 749204 - DNA, 590 bp, Homo sapiens
gtctggtatcacaagatacaggtcacaaaagcactgcttataaaagaggatgcagtaaagaagccagccaaggctgggtgtgatggctcatgcctgtaatcccagtactttgggaggccgaggtgagtggatcacttgaggtcaggagttcaagactagcctggccaacatggtgaagccctgtctctactaaaaatacaaaatttagctgggtgtggtggcaggcacctgtaatcccagctacttgagaggctgaggtgggggaatcacttgaacccaggaggtggaggttgcagtgaattgagatcacaccactgcactctagcctgggcaacagagtgagactccgtctcaaaaacatatatataaataaagaaaaatgaggaaaaaagaagaagccagccaaaacccaytaagaccaaagatggtaatgaaagtggcctctggttgtcctcactgctcattatagaccatttataatatattagcatgctaaaagacacgcccatcgtgccatgacaatttacaaatgctatggtaatgtcaggaaattaccctatatggtctaaaagaaattgcctgcccctttc

SEQ ID NO: 749205 - DNA, 607 bp, Homo sapiens
ttgcatacacagccagcgctgagcaaatggcagtcatgtgaccacttacgtttgcatagtgagcaagtcatagaccaaacccaggacaggcaatttcagagctcatgccttgcctgccccattgtaccaactccaggcttctaattagaacctaaagaaagcacacaggrcccaaaggcaagccagtttatgatgaaatgtggaatgctaacaagaaaggaagaacacctgcaaaacagacattttacaaagagaagcactggccccacattcatgcaggctgccacgctccctagcatcgagtacagctattcaagggtgaattgattgagtgtgggaaaggctgatgggaacacaaatgtggggcactggtaaacacatgtgacttgtggaaccttgtttcacttgtcttaaaatactgtattaaaaatccaccacatatgaaatttcttttgatttgctttggagttttttttttaatcagtttgcaaatgtgatatgaatttaaatatcttgtaataaatgttaaaacacttaaaacacaagagctatggaatcagtttgtcaatcacttttctgtcaaagcctcatcatcaactctctttct

SEQ ID NO: 749206 - DNA, 607 bp, Homo sapiens
ttgcatacacagccagcgctgagcaaatggcagtcatgtgaccacttacgtttgcatagtgagcaagtcatagaccaaacccaggacaggcaatttcagagctcatgccttgcctgccccattgtaccaactccaggcttctaattagaacctaaagaaagcacacaggacccaaaggcaagccagtttatgatgaaatgtggaatgctaacaagaaagraagaacacctgcaaaacagacattttacaaagagaagcactggccccacattcatgcaggctgccacgctccctagcatcgagtacagctattcaagggtgaattgattgagtgtgggaaaggctgatgggaacacaaatgtggggcactggtaaacacatgtgacttgtggaaccttgtttcacttgtcttaaaatactgtattaaaaatccaccacatatgaaatttcttttgatttgctttggagttttttttttaatcagtttgcaaatgtgatatgaatttaaatatcttgtaataaatgttaaaacacttaaaacacaagagctatggaatcagtttgtcaatcacttttctgtcaaagcctcatcatcaactctctttct

SEQ ID NO: 749207 - DNA, 626 bp, Homo sapiens
gtattccatgaatcttggtagcctaactttttaattaaaaagttgtttcaaaagagttcttgaatagaaactctaagtaactgcctgccaactccaactaccatgcctaaggaatcggcaatgaggagaattgaatgcagaagaaacaagattttgactatcgtcttagaggaaaagagacaccttaaaacatacagcctagagggtgggctgcatcatgatacagtgcagttgaacaacttcattctaatcgagagatcccactctgccagaagataccatattsagcctcatgccctttctgtttgtcttcacagcattaaaaaatgttttcatatattgtcaatattttttaaacagaagatctcacatagaatccagatttcagacctgtcttgaagtcgaagatatggtgaaactgagcatatatcccctgcgcccccacagctatgaagggcagacggggagtagcagctgcccctctctggatcaggcctgagttctctggttctctataatctctaccactccctaatgtctcatacactggcctgcttgtctatttgttacctccctggatcctgcagcccctttagtcagcctgtttaatccattctgcttggcaa

SEQ ID NO: 749208 - DNA, 625 bp, Homo sapiens
gcaccaatcacctggggggatctttttggaatggtggaaattttctaaacccggattttggtaatgttgtaccactctataaataacctaaaaaatcattgaactatacgcgtcacacatatgatttttatggaatgtaaaattgtacctcaatgaagttttaaaaaaatccttctggctgctttgtgaaaaataaactgtaagggaacaggagtgaaacaagagatacccctttaaaggctgatgtaattatccaggtgaaagacaatgggaacttagacggtcatgtgcagtggagggagtgagatgtggtcagaccctggacatatctgcaggcacaacccatagaactggccagtgagagaaagaagggtgccactgagaggtttactgagtgaatgaagttgccatttttcwtctgaagtgggagagtctgtaggaagagtggctgtgggagagagtgggagaaatgagttctgttttagacatgacaaagtgagatgcccgctatgcacagaagctgaaaaattgagtaggatggaatatgtaagttcatgcgagaggctgcttgagtgaaactgcaataatcagtagaaagaacaccactgtttttgtttttttgttt

SEQ ID NO: 749209 - DNA, 598 bp, Homo sapiens
tctatgagctatgatgtcccagaggagactgtcaagattatcaagacagatgtttccatgaggagacgccggtgagggaaacagggtggaggaagaggcacaggacagctctccagcgtagactttccactgaccccagatcaagcctgcactccccagccaggtgtgcagggccctccacatcccaggcctactcacctcctcctgccttctctctcactcaggragaccctccactcccaggggactgtgcctcctccagcactaactcttcagccactccattttgcttgcctccatgggctgggctgccatcttccttgatggtctcctgcttcccagtcctcagctgcatcatcagtcctggagcacctgacgggtgctggagcacacagcataatccccacaaacaacccttgacttgacttcccttttccactctcctctcaccgcccagtccccagctctgtcagcctcactccccgctgatggccaagcttgtctcagagttgcaggtaaccttggcatttgtgccaaacgttgctgaccaggggcagacttagctgtgtaaggctggtccagactcctccagcagtca

SEQ ID NO: 749210 - DNA, 598 bp, Homo sapiens
tctatgagctatgatgtcccagaggagactgtcaagattatcaagacagatgtttccatgaggagacgccggtgagggaaacagggtggaggaagaggcacaggacagctctccagcgtagactttccactgaccccagatcaagcctgcactccccagccaggtgtgcagggccctccacatcccaggcctactcacctcctcctgccttctctctcactcaggaagaccctccactcccaggggactgtgcctcctccagcactaactcttcagccactccattttgcttgcctccatgggctgggctgccatcttccttgatggtctcctgcttcccagtcctcagctgcatcatcagtcctggagcacctgaygggtgctggagcacacagcataatccccacaaacaacccttgacttgacttcccttttccactctcctctcaccgcccagtccccagctctgtcagcctcactccccgctgatggccaagcttgtctcagagttgcaggtaaccttggcatttgtgccaaacgttgctgaccaggggcagacttagctgtgtaaggctggtccagactcctccagcagtca

SEQ ID NO: 749211 - DNA, 613 bp, Homo sapiens
ttcaggaggctgaggcaggagaatcgcttgaattcgggaggtggaggtggcagtgagccgagatagtgccactgccctccagcctgggtgacagagcaagactccatctcaaaaaaaaaaaaaaaagaagaaaagaaaaagatggccaagggcagaatctctgtgttctaggggcacattcagagaggaagagggcacattaggagacaggtgggatggccagcagcataacaggctacagagagaaggtttrgagacagaaatgaaccttggcagtggtgagaacttcatgatccttcaggaatcaggttcagttgagcctcctgaatgtaccttttccttgttctccagcttttttcctctgagatataggagtaaactgcccacctggggcataaatcagaagactgggatatatgccaagggttatgtacctgaaagtttgcttggttgccttttcaggtggtaatattccctttctcttagtttctcattcagttttctccattagtgtcctttttctcttttctttctttctttctttctttttttttttttttgacggggtttcgctcttgttgcccaggctggagtgcaatggcacaatcttggc

SEQ ID NO: 749212 - DNA, 592 bp, Homo sapiens
ggctatctagacggcactaggaacttttgcaagttacttaatcactacacattagtctcctccattgtaaaatggggatagtaatcatacttatttatgactgtcggggagatgaaatgagatactgcatgcaaaaacagagtctagtccaatgtaagaatttagaaaagcatagctattattattaaaagcatatgtttttaattgaactattaggataagaaagcatatttgcctcctttcctgatgtattttgtattttgatttgatgtatagatgtattttggaaatccygatgttattttgctgaaggctttagtcaagacagaagttatttaagctgatagctttggctttagaagtattaaatcactacacagtccataaacttactaataattgtctcttgatatttcatttgaaaatctgaacttctttttgggctgttagctttgtagtaatttcctttcatcagtgacacattagaattaatctgaagtataagagaatagttcagtactcttgaccagtgttccctttgattttgtataaactgtgagcaattggccatattccacaagcaactagttat

SEQ ID NO: 749213 - DNA, 594 bp, Homo sapiens
tggagattgatactctgcttctaatctccaaaccttgtaacttttgttctatatttcccatatccttattccttcccagtactttctgggagatttactcaattgaacttccaatttactaattccttctttgactctatccattaagcaatgtatctaatctactgaggtcttaattcaatacttatcgtcttgatacccagtattttttttgttttttttgagatggagtttcactcttgttgcccaggctggaatgcagtagtgccatcactgctcactgcaacctctgtctcccaggttcaagtgactgtcctgcctcagcctcctaagtagctgggattacaggtkcctgccaccatgcccggctaatttttgtatttttcttttttcaatagagatggggtttcagcgtgttggctaggctggtcttgaactcctgacctcaggtgatctgcctgcctcagcctcccaaagtactggtattacaggcatgagccactatacccagcccccaatattttcacttagttctttttagtaactgttcttgtctgcttcttcttaccaatattctgaattacctctttaaag

SEQ ID NO: 749214 - DNA, 558 bp, Homo sapiens
taccagtagttaagaaaagtcatgcagcaccctgaacactttgctgcttagaaatttcttctgccaaatgtctagttcatcattcgagttttgccatccacaacgttctaagacatagaatgattcagcaagttgtttgccactttacaacaagaatgacttttcctccagtttccaccatcttgtttctcatttctgttggagatcttatcaaaatagtcttcactgtaatggccacttagatcatytctaagactaaggctttctctacatctctcctcttcttccaagcccccagaatcatccttaatgctctgttcacagtaatccaagctttttctaacattcacttgaaaacagttccagcctgtacccattacccagctgcaaagctgcttccacatttttaggtctttgttatgccaacattctactcttggtaccagtttctatcttagtctgtttgtgcttctataacaaaacacctaagacttggtaattcataaaacacagaaatttatttctcacagttctggagactggtaagtccaagatcaa

SEQ ID NO: 749215 - DNA, 591 bp, Homo sapiens
tctattttttaaaataatgaacatgtattgcttacataataaaaaagtaaggacaactgagactgtagaagactattaatggcccagaataaagttcaagatatattgttgtaaacaaaaactttgatacatataacaccagagcacatgtgaagaaaaaagtttctagtggtckctgtggaaaaatggtaggagtttttagtttccttttttttgaagccatattttctacatttttatattagttcattaagtcattaagtcccttaagagtccattaaggcaactctctactagtataccaccataaattttcatccaaactaggattctcatgcatgaaccaggatgtatgttaaccctagttgtgaatcatatgttggggtttatgctttgaatgcatggtcaacaatggatcaaggacaatttgttgttgcctgcctcaaaagatttagagccaatgagtgattccactctttatattaattctcaaagtcctgaaaagagaaaaagtactattgaattgtttaataaaaataaaatgtggctgggcacggtggctcatgcctgtaatcccagcactttggggga

SEQ ID NO: 749216 - DNA, 626 bp, Homo sapiens
taattttctgctccacgttttgttgcaatttctcattggccttgtcattgactccaaatggaactgagtccctttccttgcgatgcacacaaagccactcagataagcccttttgtaacaggtgtacgagattgtgagaactgcatctcaaagtaaaaatgacttaaaattgaaaatcaaacattcttgttcttagaagtctttggctactccaccacataatttgaccctcttttctttctctttttaaaaatcacctttcttgtctgatccttttttttcaataacacagaaacagaaattttttcttgttttcttgtgtataaaaatttaactctctctaggcctttctcttaaatacatttacagaattccctttgcaaatccaaaactatgacaaaagcttagagactaactgacacttgaagggacctgatgaggctcagagaaaaagcaccactgtcttgmccgatttcttgtatagaagcagataggagttctattcttttaattcagtaagcattaaaagaggaaaatgaaaggatattaacaacatcttaatacttttatctctgaatgatgatccctctaaagttattttttattttattaaatttcactttcta

SEQ ID NO: 749217 - DNA, 532 bp, Homo sapiens
ttacaactgaagtctccagagttcaagataagctcttgcctaattaacctttatctctagattggacctgatcaagctctgaacagccagcccagttacttcactacttagattagactcagccaatcaatatgctacttctttctgagctgtttccagatycttcctatcttgtaggaccacaacacttatatttaaatgacattgaattgtggcctgcatatctgtcaaggttagggtactctgcagttgcaggactaacatcacattggtgacataaatcagcacttttatacattagcacagctttccagctttccacaatcatcaccatttgtaatttttaaaacaaccgtggaacaccaatgctccagagagaattttgtgtttcactagaaaattgaaatagcagaagagtaatatatgtcttattttcttaatgtaggaagcattttacattttgaaaaataccagtacaaatataaatgcatctgcagcactcaagtttttatttcaaaggaaaataaacttg

SEQ ID NO: 749218 - DNA, 567 bp, Homo sapiens
aacaagttgtgagaccccaaaggaattttcagctcctctctggactgcagtgcctcacctataaaaggtgcaattagtgttcattctctacagataaatacaggttcagcatgcatgtggagcggcgggtgtgccatgccgtgagtaaayacaacgtgacgctgtcgtgtgtggcagggggcctggcagcgaagtccagtggccttgagctcatctggctctgtgacttgctggtcagagaacttggccagctaactgggcctgtctgtaaagtaaggacacctgcattgatctatggtcggcaccaccagcctcccttgccccggcccctaccgacactcacctgcgcagctagcaggtcagcttgagacctcgagggcgagtgccttgtcctgggggaatcctctggagggcttccttcccctccctcctctgccctgagttccatggcctccaaggtggccacagcctgaggaggccacagcgccaccaggggaaggtggacaaaaagatagagccctgctccctggaatccctgcaggtccgaaagaccagtgccagaaccgc

SEQ ID NO: 749219 - DNA, 631 bp, Homo sapiens
actctagcagttcagtgaatgtaagattactactctgtatatggaactttgaaaacaagaatgaggccacattacgcctgtaatctcagcactttgggaggctgaggtgggaggactgcttgaggctaattgtttaaggaccagcctgggcaacaccccatctgtacaaaaaaaattttttttttatttacctggacttggtgacacctgtagttctagctactcaggaggctgaggtgggaggatcacttgagcccagcgagygattgcaccactgccctccagcctgggcaacagagggagaccctgtctcttaaaaaaaaaaagagagaatgagagatggcagttcctgtgctgctcatattgtccttctttagacttagagattgtttcacattgtctgtactgtgttgtgcagtaccagaagttgctggtagctacttggtcttctgggaacctgcattgcagacgtggtgattgtaatcttaatcttgttgaaacaggatggatttatgactgggatggccggaagccacaccagacacccagtcacctggtcatgggagaggtactttgttggcttttcatagtacttacactgtgagctgcttcctgaagtggcactcttaag

SEQ ID NO: 749220 - DNA, 638 bp, Homo sapiens
gccagtgggggtcttgccagatatcaggacccctgtctctgatcaggcctggtccacagggcctgcctcccaaagggtctagaaagggatccttacagaagcactgtgggaacttgggcttgagagctgggagcctagccctgggggacgggagtkagggctgctgatggtgatcgtcttgtccggatcgtttctactgggcccccctcccctatcctgcctgcccagtcccctttgtgcaggcgaggcccttagagctgtcgctcagccctgtggagctttcagggctgagggtgagcaggactgaccggccttagaacgccgccgcccagaggtcagagttgaggtgggggccggtggggcctgcttagactgcggagcgggaaggttccccagcacctggctcgccagagcacctgagagtcccggcccagcatcctgttcctgtcggcccttccgccaaacccaagggcagcaggcgggagctgtgcctgcctggggatccattctgacagggcccttggagaaggcccaggtctgctggacccctgacacctgtggtaggaacgctccctggccccgggaccctgtggccagcgggagggcactggggcaggggaccagccagaggtaggtgt

SEQ ID NO: 749221 - DNA, 638 bp, Homo sapiens
gccagtgggggtcttgccagatatcaggacccctgtctctgatcaggcctggtccacagggcctgcctcccaaagggtctagaaagggatccttacagaagcactgtgggaacttgggcttgagagctgggagcctagccctgggggacgggagttagggctgctgatggtgatcgtcttgtccggatcgtttctactgggcccccctcccctatcctgcctgcccagtcccctttgtgcaggcgaggcccttagagctgtcgctcagccctgtggagctttcagggctgagggtgagcaggactgaccrgccttagaacgccgccgcccagaggtcagagttgaggtgggggccggtggggcctgcttagactgcggagcgggaaggttccccagcacctggctcgccagagcacctgagagtcccggcccagcatcctgttcctgtcggcccttccgccaaacccaagggcagcaggcgggagctgtgcctgcctggggatccattctgacagggcccttggagaaggcccaggtctgctggacccctgacacctgtggtaggaacgctccctggccccgggaccctgtggccagcgggagggcactggggcaggggaccagccagaggtaggtgt

SEQ ID NO: 749222 - DNA, 616 bp, Homo sapiens
ttgttgaaagttttaaaattacaaaaatatagatcaagattctttttcaccgtatttgaaacaaaaaactaataatttctcaaattgttgactattggaaatattttgaaaatattatccacattatcaattaagaagtrtcctacatttccaacaagatataatccttattggctttccagacatccttagagaaacagtgtactagattcagtgtttaaaatgtgtttccaataatagaattcctactatatacttttacaagcatattaaatttgaaagtgttttatattttcagagtggttcatacatgtaattttgttccattctgaaactggaaaagtgttaagtgagtaaaataagttttattatccctaaggaaaaaatactataaaaacaaaaagagaagagattataaggcttacttgtggttttccaattcattagtaacaaaaaaaaatgtgatttttcccttttcctctctgttgtttttttctttagaacttgaattttccttttttttttttttaattctagaccctttgcaaccaatgacatgcatgtgtgaggtaggatgctggaatattattcagccataatacagaatgaaattctg

SEQ ID NO: 749223 - DNA, 575 bp, Homo sapiens
atgattcagggtacctggcagaagaaatttctaagcagcaaagcattcaagaggttacttgggtgctgttaaaaacattcagtattaaaagggaagcagagcataaaagttgagaaaatttgcagcctgacaatgtggtagaaaagaaaattccattttctgaggaaatattcaagccagctgcaggtatttacataagtgacacagtgctgaatgttagttaatccccaagrcaatgggaaaaatgtctccagggtatcaagagacctttgcggcagcctctcccatcacagacccagagatctaggaggaaaaaatggtttcatggtcagggccagggtccctgtgctgtgtgcagtctagggacatggtgccctgcatctcagccactccagccttggctgaaaggggccaacatagagcttgggctgtggcttcaaagggtgcaaaccccaagccctggcagcttccacatggtgttgagcctgcaggtacacagaagtcaagaattggggttagggaacctctgcctagatttcagaagatgtatggaaatgcctggatgtccaggcaga

SEQ ID NO: 749224 - DNA, 575 bp, Homo sapiens
atgattcagggtacctggcagaagaaatttctaagcagcaaagcattcaagaggttacttgggtgctgttaaaaacattcagtattaaaagggaagcagagcataaaagttgagaaaatttgcagcctgacaatgtggtagaaaagaaaattccattttctgaggaaatattcaagccagctgcaggtatttacataagtgacacagtgctgaatgttagttaatccccaaggcaatgggaaaaatgtctccagggtatcaagagacctttgcggcagcctctcccatcacagacccagagatctaggaggaaaaaatggtttcatggkcagggccagggtccctgtgctgtgtgcagtctagggacatggtgccctgcatctcagccactccagccttggctgaaaggggccaacatagagcttgggctgtggcttcaaagggtgcaaaccccaagccctggcagcttccacatggtgttgagcctgcaggtacacagaagtcaagaattggggttagggaacctctgcctagatttcagaagatgtatggaaatgcctggatgtccaggcaga

SEQ ID NO: 749225 - DNA, 491 bp, Homo sapiens
tacttctttgaaaattatggagaaaagacaactcttaataattgtataagatcaagtaaaattttgcttaatattagtaaaaattcacaggaaaaataaaaaaatgactataaagctgcactaattcttaagtgcgaacttaatacaaatattctcttgcctrgaaatatgaaaaatgtcataagcatttatgaccacagtaggatgttgggaggaaaatacctctggtaataatctttaggagcaaatgcacactgttagtaatgattgatgaaaagtttcctcacaatctgctgagaaaaaaatgttaaaatgaaattaagtgtagttatagaaaacaaaattacataattgacataacagagttattggcctgagagtcatacctattgcaatctatttcttagaggctcactcctgcagatgcttggctggaacttgtcaatgtttctatacatacaggaaatgataaacagcacatatcaagcctg

SEQ ID NO: 749226 - DNA, 491 bp, Homo sapiens
tacttctttgaaaattatggagaaaagacaactcttaataattgtataagatcaagtaaaattttgcttaatattagtaaaaattcacaggaaaaataaaaaaatgactataaagctgcactaattcttaagtgcgaacttaatacaaatattctcttgcctagaaatatgaaawatgtcataagcatttatgaccacagtaggatgttgggaggaaaatacctctggtaataatctttaggagcaaatgcacactgttagtaatgattgatgaaaagtttcctcacaatctgctgagaaaaaaatgttaaaatgaaattaagtgtagttatagaaaacaaaattacataattgacataacagagttattggcctgagagtcatacctattgcaatctatttcttagaggctcactcctgcagatgcttggctggaacttgtcaatgtttctatacatacaggaaatgataaacagcacatatcaagcctg

SEQ ID NO: 749227 - DNA, 562 bp, Homo sapiens
acatttcttaccaatcctctcctccctactgctgacttctaagtctggggcaggtacaaactggggagataagaagtttctgatacaatgaacaattgaagttttaatattgtaatactaaaagaaaaaaaagttttaaataatactgacctgaacattctaatacctggaagaatgagactagtcactattatctgatctgttgaaaaagccatagaatctcaaatccaacatgtataaaaataattattgtcacaatcaactgggatttgttccaggcaggcacacaaggcaagttcaacattcgaaattaagaatcaattattttaatctrccacataaacagactaaagaagaagaatcgtatgttcttatcaatcgatcccgcaaaagctcttgacaaaatccaacacccattcttgataagaaatttcagcaaagtagagatagaggggaactttctcaacttgataaaaaactacttctaacatacttagtggtaaaaaactggatgctttaacactaaaattgagaagaaggagaggttgtcccctgttagcac

SEQ ID NO: 749228 - DNA, 616 bp, Homo sapiens
ttattgcctaatagcagtccattatatgtatataccatatttggtttatcttttcctcagttgatgaatgtttcggttatttccactttttgactattatagttaatgatattatgaagatttgtgtatgagttttgcgaggatatgtgcttttgcttggrtacatacctcagcatgaaatttctgggtcataggataactgcatttaacattttgaaggactggcaaactgctttccaaagcagctatgctgtttgcaatcctaccagcaatgtatgaaggtttccatttctcgacattcttgctaacacttgttattgtctgtctttttgattctggttgtcctagtgagtataaggtggtccttcattgtggttttgatttgcatttccttcaacgctaatgatgttgactattttttcttgtactcattagctatctgtacaatgtcttctctgaagaaatgtctatcaaatcctttgcccatttaaaaattaggttatttgctttttgggttaagttgtaagtgttctttatatattctgaattctagtttcctatcagacagtatatattatgcaaatatgtcctctcattctgtgggttgttttttcac

SEQ ID NO: 749229 - DNA, 616 bp, Homo sapiens
ttattgcctaatagcagtccattatatgtatataccatatttggtttatcttttcctcagttgatgaatgtttcggttatttccactttttgactattatagttaatgatattatgaagatttgtgtatgagttttgcgaggatatgtgcttttgcttgggtacatacctcrgcatgaaatttctgggtcataggataactgcatttaacattttgaaggactggcaaactgctttccaaagcagctatgctgtttgcaatcctaccagcaatgtatgaaggtttccatttctcgacattcttgctaacacttgttattgtctgtctttttgattctggttgtcctagtgagtataaggtggtccttcattgtggttttgatttgcatttccttcaacgctaatgatgttgactattttttcttgtactcattagctatctgtacaatgtcttctctgaagaaatgtctatcaaatcctttgcccatttaaaaattaggttatttgctttttgggttaagttgtaagtgttctttatatattctgaattctagtttcctatcagacagtatatattatgcaaatatgtcctctcattctgtgggttgttttttcac

SEQ ID NO: 749230 - DNA, 632 bp, Homo sapiens
tccccaggcgtctcaggctgttagtaattatcttaggttctctcacgtgggcatcaacagtggcaagaagacaaaaacggagaaaaacagttcagtcgaccaagaagaaacacttttcagaaaaacatgattccagaagaagaaaaagatagcccttttaaatacatatagtttggatatctgtttttaattaagctgattttaaccatagagttcctttgtttaaaaaagaaatctttttaaattttttattaccaaactctagccaggacagccaatatttctggcttttgagttctatgacaggtaacatcccacacgaatatagtaagttttaactaaggttataacttaaccatggacacataaggtgtctcaaagagatggtaagcagtgttttttttttttgtttytgttttttgtttttaacaagatttagaatctccccaagggtagttcagagcaaggaaaattcaagataggaaatcagaagttctccatggctggacagggggatgggtagaactctcaataaatggcagtaacacaaataacaaaccagaaaggaatcattcagaagccaaacattgaacctagcctgccattgtcaaaaggcaaagccttagctactg

SEQ ID NO: 749231 - DNA, 499 bp, Homo sapiens
aaaagaaaatattatgtgtataattaaatttagggaattttttttttctcatgggtcaagtttatacctggtaggggagctgatgaatggaccccaatgaaaacacacaattgggcatatttgaagggcagaattacatcaaggagaacaggagtgtgagaagttgaagcacagtgagatctgcaataataagaactggtgacttagattccaagtagttaygtctaagaaacttacacacacaccctacaggacaatcagcatttggcgtgtcatggaaaagagaatgaatattggccaaagagttttgacagctaacatcaagagaagtatacaaaagatcagtgatgtaagggattattttgtctccaatatctctcttcttctaccccaaatgcactggtagaatcacgccttaaaggagaaaggaaagatgtgtctcagccaaacactctatccatcaatgaaaataattagcatgtttaaggtgactgaggca

SEQ ID NO: 749232 - DNA, 622 bp, Homo sapiens
tattatttattctattaaatatataattgttgtaggctgtctctgtgtccaaaatcatcctgaggttctgaggtttaaacttcaagtcttcttaggtcttttataagtctgctcctttcctgggcagtgtggtgactttctaatttccttgatatatgtgattgcttttgaatttcatacttgtaatgtctggctctgagaagggaaaaacatcaacaacaaaatgcagtgagataaacagtaactggttctttaaatgccctagagttggcttcagatagaggagtgaacttacaatagcaagctgcctctgtgtccgcagcttaaaagcagcaatctgctgtgatcagaacacataaaattgctgacatgtggagaacagggtccttatcctcttggwtgccccaacctcctgcaaggtcaagatcgcctgtcatgagactggggagggtcgggggcaggaaatatgtatctgctgccaaatttagagctaaattaactaaaaattaattgcaatttatgtccaagccttcccctggacattgtaagcttccaatagagtccagagttccaaaatagttaaatcaaatagatcagatctttccagtgaaattgtctaggt

SEQ ID NO: 749233 - DNA, 622 bp, Homo sapiens
tattatttattctattaaatatataattgttgtaggctgtctctgtgtccaaaatcatcctgaggttctgaggtttaaacttcaagtcttcttaggtcttttataagtctgctcctttcctgggcagtgtggtgactttctaatttccttgatatatgtgattgcttttgaatttcatacttgtaatgtctggctctgagaagggaaaaacatcaacaacaaaatgcagtgagataaacagtaactggttctttaaatgccctagagttggcttcagatagaggagtgaacttacaatagcaagctgcctctgtgtccgcagcttaaaagcagcaatctgctgtgatcagaacacataaaattgctgacatgtggagaacagggtccttatcctcttggttgccccaacctcctgcmaggtcaagatcgcctgtcatgagactggggagggtcgggggcaggaaatatgtatctgctgccaaatttagagctaaattaactaaaaattaattgcaatttatgtccaagccttcccctggacattgtaagcttccaatagagtccagagttccaaaatagttaaatcaaatagatcagatctttccagtgaaattgtctaggt

SEQ ID NO: 749234 - DNA, 512 bp, Homo sapiens
tatagagtaacaagaacataattgctatattatgactataaattacatttttgacattttatttaacataagatataagattattctgtatatatgtaagggtatctaacatattcctaagcatatctaagaaattaatatttgctgaaataagcatgttcttataagcaaatattgaaagagaagaaaaaacagtaacaatgagaagtgcctcaatttagagcaaarattatgaaagcaaaaccaaataaaaaatttagtggtatttttacatatgcagaggaatacaaaaagaatttaatgtcatgaaaggctaggaagaaacagtaataagaaacgtggtcaactatgccaacatgtctccagtgaagtcaaataggattaggaccaaatgatttggaaaacagtctgttggtggtaatgttaagggattatttattgcagagctgtttgaaaagataacaggaacacaactgaaaaatgagtagtgctagaagaatagattaagtcta

SEQ ID NO: 749235 - DNA, 600 bp, Homo sapiens
gcttaaatacaccagatctaaatatcctaatactcaaacattttagccaacaaacttattttttgacatatgcagaaagatttattttaatgtcttaagtaatcttattgatagtagattagtatttttattctgagtctgttgtgtgtgtactataagataaaacaaatgactaattgtgrgcaattctaattatttcattccctgtattcttttttagaaattttaaatttaaattttagattcagagggtacatgtgggggtttgttacaagggtatattgtgtgatgctgaggtttgggtttccactgatcctgtccccagagagtgaacatggtaccccacaggaagttttgtatgccttacccctccctccctccctccttttggagtccccagtgtctgtgttcccatctttatgtttgggtgtgcctagggtttagctctcacttataagtgagaacatgggatattttgtttctattttatgcattaatttgcttaggatgatggcctccagctgcctcgtgttgctgcaaaggacatgatttggttctttttcatgttagccagtaaacttaccattttgcttgaaatct

SEQ ID NO: 749236 - DNA, 615 bp, Homo sapiens
atgatattaagcaacatgagcaaatttgatcaaatattcattctatagcttccccctaagtgattccatccaataacaatgacactaatccaaagccaaagaaaaatagttttacctaaaatgttggcaaaggagctggaacaaatagaattaagctgaccttttaataaatgtctgtttattgatttaaattcacttttttctttttctgagcaatgctgacgaggcctgttagaatacaagcatgtataataacttggacacaaccatttttacttcttttgtgtgtcattactgaaagattgaagcaagcttcacctaagtgtagtgatgcaaaaataatagtatcccagtctggctgcgcaagagyggaggcaaacaagagcttcatattaaagtgccttctaggtagctgacatgacgcatctagtcagacgtaaataatgacagacggaaactatcatgaggtctgtgaagcatcaacatactgctatcattttctctctaaccttgccttgctagcagctctcagccttacaggctgagagatcatttaaaaagcaaatcctaatgactctgcccactgtaacaacagtcagcaagattggcatcaat

SEQ ID NO: 749237 - DNA, 612 bp, Homo sapiens
caacaattaaagaaatggaggatttttagccttgagaaaaatctttcttgaagtgcatatgagagattgatggggaaaatggaatcatgttttatggtagattttacgctatgtttttttttttttttttttttttatgagacagagtctcgctctgtcgcgcaggctggagtgcagtggcrcaacctcggctcactgcaagctccgcctcccgggttcacgccattctccttcctcagcctccctagtagctgggactacaggcgcccgccaccacgcccagctaattttttgtatttttagtagagacggggtgtcatcatgttagccaggatggtcttgatttcctgacttcgtgatccacccgcctgggcctcccaaagtgctgggattacaggcatgagccaccgcgcctggcagattttacgctattcaaaacatgtcctgcccctctaggtgaaaagactatgcaccctcagcccacaaatgttggggttggccgtgcaacttgtgaagctcctcttcatggaagaattatgtatctcgatcatcattggcctccacagcagccacatgacttgctttggccaataaaatgtaggcagaagtgat

SEQ ID NO: 749238 - DNA, 612 bp, Homo sapiens
caacaattaaagaaatggaggatttttagccttgagaaaaatctttcttgaagtgcatatgagagattgatggggaaaatggaatcatgttttatggtagattttacgctatgtttttttttttttttttttttttatgagacagagtctcgctctgtcgcgcaggctggagtgcagtggcacaacctcggctcactgcaagctccgcctcccgggttcacgccattctccttcctcagcctccctagtagctgggactacaggcgcccrccaccacgcccagctaattttttgtatttttagtagagacggggtgtcatcatgttagccaggatggtcttgatttcctgacttcgtgatccacccgcctgggcctcccaaagtgctgggattacaggcatgagccaccgcgcctggcagattttacgctattcaaaacatgtcctgcccctctaggtgaaaagactatgcaccctcagcccacaaatgttggggttggccgtgcaacttgtgaagctcctcttcatggaagaattatgtatctcgatcatcattggcctccacagcagccacatgacttgctttggccaataaaatgtaggcagaagtgat

SEQ ID NO: 749239 - DNA, 612 bp, Homo sapiens
caacaattaaagaaatggaggatttttagccttgagaaaaatctttcttgaagtgcatatgagagattgatggggaaaatggaatcatgttttatggtagattttacgctatgtttttttttttttttttttttttatgagacagagtctcgctctgtcgcgcaggctggagtgcagtggcacaacctcggctcactgcaagctccgcctcccgggttcacgccattctccttcctcagcctccctagtagctgggactacaggcgcccgccaccacgcccagctaattttttgtatttttagtagagacggggtgtcatcatgttagccaggatggtctygatttcctgacttcgtgatccacccgcctgggcctcccaaagtgctgggattacaggcatgagccaccgcgcctggcagattttacgctattcaaaacatgtcctgcccctctaggtgaaaagactatgcaccctcagcccacaaatgttggggttggccgtgcaacttgtgaagctcctcttcatggaagaattatgtatctcgatcatcattggcctccacagcagccacatgacttgctttggccaataaaatgtaggcagaagtgat

SEQ ID NO: 749240 - DNA, 612 bp, Homo sapiens
caacaattaaagaaatggaggatttttagccttgagaaaaatctttcttgaagtgcatatgagagattgatggggaaaatggaatcatgttttatggtagattttacgctatgtttttttttttttttttttttttatgagacagagtctcgctctgtcgcgcaggctggagtgcagtggcacaacctcggctcactgcaagctccgcctcccgggttcacgccattctccttcctcagcctccctagtagctgggactacaggcgcccgccaccacgcccagctaattttttgtatttttagtagagacggggtgtcatcatgttagccaggatggtcttgatttcctgacttcgtgatccacccgcctgggcctcccaaagtgctgggattacaggcatgagccaccgcgcctggcagattttacgctattcaaaacatgtcctgcccctctaggtgaaaagactaygcaccctcagcccacaaatgttggggttggccgtgcaacttgtgaagctcctcttcatggaagaattatgtatctcgatcatcattggcctccacagcagccacatgacttgctttggccaataaaatgtaggcagaagtgat

SEQ ID NO: 749241 - DNA, 615 bp, Homo sapiens
tctgtctcttccatactactgaggtgaactgttaagaagtggctttaaaatctttattaataaaaccaatcccagacaaaagtgttcctcagagacctttcccccactccttcctctctgacttctctgctcctggtacccctgtctcccagcaagctgtgacctgggtcctattcccacaaggcctcctcctaacctttagctactaactcttgctatttttaccctttctgtatgttttggcttaattctgaaaagcctccaataaacaaaagagatcttttggagcaaaaggcacccaacatttcaccatcgatgtcccattttccttagggcactgctyataagacattacaaacttgcctttctggttaaatcagtatctggcatgaaagacaattgaaagtcaattcatctagagcaatgtctcaaggtactgccctcccatgggaaaagggatcccagagattatgaactcagaggaaagctgccacattttgatagactggaaagttccaggcaatccttagataatggccctgaaggaaggcccaaagaaaaggcttatgggcctgtttgtttaccccataattggtctaccctactcaacgtgtg

SEQ ID NO: 749242 - DNA, 632 bp, Homo sapiens
atagccttaaagaggtaattaagttaaaactatgccattaggtcctaatccaaactgaatgatgtccttataagaaaaggaaattagaatacaaaaagcgacaccagggacatgcaggacatgcaggcacagaggaaagascatgtgaagaggcagaaagagggtggtcatctgcaagccaaggagcacggcctcagagaaaaccaaccctactgtcaccttgatcttggacttccagcctccagaactgtgagatgataaatttgtgttgtttaagccacccataacaacccaatatgttgttatggcagccctagcaaattaataaaatagtccaagaattcagatgtgaattcaaaatactctatggaataggaaagaattcagaatactctatgaagtaggaaaccaaattcttaaactttgtgccatattccaagagatcatcataaagaaaattaagtattcatcaatggtccttcttcctttgtcccctcacccagacctcttaggctgcatggaacagttgctgaaactccatcctgttctgctcttcccagatgtgatctctagggtccagctgtttttctccctcaatcccttctcatttgtacatcagaatcactggagag

SEQ ID NO: 749243 - DNA, 602 bp, Homo sapiens
aaacagagtcagtcgaaggctgagagctgagagtaaatttgttatagctaatcttccttgatcctttagtgacctacgtacaatgtaatcagggcagatcttgtagctatttcaggtttagatttagtgtgtatgaaagaaacagaagcaacaagggggtcagagaggagaacaatgaggaatccagagaggagtttcagatgcaggacgtagcaaaggaactaactaactaggtgaatgctgtaaagaacagaaaaaaatgtgcccatgcataattcctattgatttagcaagaatccaccttagagttatttgctaaaatctgtgagccaccctgtgggtgggatactcatggacgcaaagaaggaaacaacagacactggggcctacctgagattggagggtgggaggagggagaggakcagaaaaggtaactattcggtactactaggctttgtcaccttagggtgacaaaacaatctgtgcagcaagccctgtgacatgagtttacctgtataacaaacccgcacatgtaccctgaacctaaagtaaaagcttttttaaaaagaaaaaaagtgaacaacttaaaaacctgaatctgt

SEQ ID NO: 749244 - DNA, 638 bp, Homo sapiens
gctcattaagaaaagagggttgagaggtgaaaatacttgggaaactcagtggcctgtatatatactttcttggagattttccacgtgcatgaatatatgaaaagatctgagaagttctgcaatggagaaatccatttaactttgtttcccagtctttctccttcctatctkactaggaagtgccatttatttgagtaacatacatttgacatcctgtggaaacagtgtttcaggggacacactttggaaaatgctgaaatggattctcgtagtcatagacagaagaatgaatcggagagttagaattctgtaaatactaaataattttcatattcataaagaatgtttgtgaaataaatgtaaatgaagtaaatgtaaagtcattttattacagattaatattacttttgtgatgttatttgatgtaccacaaaagacaacaaaccaccagatgcatgaccaatgttaactactatgggaaagtctttataaaattgaaatattttactcattgtgaaagagaaatagattttagctttgagagaactgtattccaattacttttattgtgctccagtgtctttgttattgcaccacaataaccgcatcacactcttcatatttcaggttaatgaact

SEQ ID NO: 749245 - DNA, 660 bp, Homo sapiens
acccgggaggcagaggttgtggtgaaccactgcactccagcctgctgagcgacagagtaagactctgtctccaaaaaaaaaaaaaaaaaaaaaattactactgattttcttagacatgataatggtattatagttatraagaagaacactattcttctgtctttaggagatggtgctgatgtatttaagttaagtgtcgtaaagtctgcaacctaggctggctgtggtggctcatgcctataatcccagcattttgggaggctgaggcagtggaacatcagaggtcaggagttttagaccagcctgaccaacatggtaaaaccccatctctactaaaaatatagtattagctgggcgtggtggggcatgcctgtaatcccagctactctggaggctgaggcaggagaatcgcttgaacctgggagacggaggttgtggtgagccgatatcaggccactgcactccagcctgggtaacaagagtgaaactctctgtctcaaagaaaaaaaaaaaaagtagccagagggggaaaaagcatattacatacacagaaacaaagacaaagataatatcagatttctcatgaaaagcaatgaagtaggtaacagtggagcaacatctttgtactgctgaaagaatatcaatctacaattatatact

SEQ ID NO: 749246 - DNA, 437 bp, Homo sapiens
catcacgaagctctcgtgccatggttttcagctccatcaggtcatttaaggtcttctctacactgtttattctagttagccattcgtctaatcatttttcaaggtttttagcttccttgcgttgggttcaaacatcttcctttagcttgaggaagtttgttattaccgactttctgaagcctacttctgtcaatttgtcaaagtcattctccgtccagctttgttcygttgctggtgaggagctgtgatcctttggaggagaaggggcgctctggtttttagaattttcagcttttctgctctggtttctccccatctttgtggttttatctacctttggtctttgatgatggtgacctacagatgaggttttggtgtggatgtccttttggttgatgttgatgctgttcctttttgtttgttagttttccttctaa

SEQ ID NO: 749247 - DNA, 622 bp, Homo sapiens
aacatctacatgattgtattaaccatcccaccaccgcacactccagtcttctcctatctcaggacctgcctcaataaattaactcatacatttataaagaaacaatttaaggtcctctttaaattgttattttgtaaatcataaatgccacagtcctggatattgggcaggaggtcaggtcgtcaagaccagagataagactggcatcagtaacaccaaaggctttgcagaaattggaatggatgagatcagctagaaaagaacagactggggaaaaggaagtgtgaccagcagaacctcagcatctatgtggccaggrcgggggtgggggcagaggaagagacggagtagcaatagggaggaggatctggtcatccagggcattctaatttccttcagaatcgccatgcagaggtggaggacaagtggtggaggtcagaggttgctaaggaaatagaagtgatgagagtttagcggtgacaaagtaaaaagtaaagtatcgaggacagatacttaggttagaaagcttgagtacaagtcccgtctgatgcttctggctgtcagaaccacctgggtaagcttttatttttttatttgatttgttctttattaacaacctctg

SEQ ID NO: 749248 - DNA, 641 bp, Homo sapiens
tacaatcccagctactcgggaggctgaggcaggagaattgcttgaacccaggaggcagaggttgcagtgagctgagatcgcaccatttagcttgggcaacaagagcgaaactctgtctcaaaaataaataaataaataaataaataaataaataaataaataaatagttggataaaatccaaataaacactttctcacatgaaaaatatataaaatttaaatctcagcatttatatatgaatttagaatttcaccaataaaaatttggtgaaatatttttcttttttgttacataagcatcagcgtaatatccttaattgtacctgttggctcaagaagtctaaaatatttactatctatctggccatttacagcaaacatttgccatcgcctgcattacagcactacttatagacacaaggtattggaaacaacccaaatgtccagcaatgtggaaataatcrgtagtatatccccacaataaaattccatgtggctgtttttaaaaaatgaaaaattctcatttcactgataaagatttccaggatatttttaagtgaaaaaaggcacaaaataatgtatgtcattgctccactttgtgtaagaaagtaggaaaattagaatgtatgtgtaatgtatgc

SEQ ID NO: 749249 - DNA, 641 bp, Homo sapiens
tacaatcccagctactcgggaggctgaggcaggagaattgcttgaacccaggaggcagaggttgcagtgagctgagatcgcaccatttagcttgggcaacaagagcgaaactctgtctcaaaaataaataaataaataaataaataaataaataaataaataaatagttggataaaatccaaataaacactttctcacatgaaaaatatataaaatttaaatctcagcatttatatatgaatttagaatttcaccaataaaaatttggtgaaatatttttcttttttgttacataagcatcagcgtaatatccttaattgtacctgttggctcaagaagtctaaaatatttactatctatctggccatttacagcaaacatttgccatcgcctgcattacagcactacttatagacacaaggtattggaaacaacccaaatgtccagcaatgtggaaataatcagtagtatatccccacaataaaattccatgtggctrtttttaaaaaatgaaaaattctcatttcactgataaagatttccaggatatttttaagtgaaaaaaggcacaaaataatgtatgtcattgctccactttgtgtaagaaagtaggaaaattagaatgtatgtgtaatgtatgc

SEQ ID NO: 749250 - DNA, 591 bp, Homo sapiens
ttctgttgctcattcacatgtttattcattgatccatcagcccctcgtgtagtgctgagagcacaccaggcattgattggacatcatggggactctgggcagggaagcctctgaccctgtcctcatggagctcaccrtgtaggagagagatgaagacagtactccgaggcaccaggcaggatttgcaaggtgccatctaagcagaattattctagagaatcccaaggtgctcaggagggagatcattgttttccctgaggcagtaggaagggcaggagatgcaagaacaggccctggactcaggcagacccaggttccaaccctgcttgcacactctgaactgggtagctttgagccaatcactggttgtctcatgcagaagatgggctaccagcacccaccccagggatgctatgggctgacaaccaacatatcatctatacctgtgggtggacttgcatggaatcggggctggggatccccccacggcctgtgtgcccaggagcctgggctgaggggcaggaggaaagagcatcatcctggcacctggtcccaggagccttctctgtgccagatgccatcctcagcccg

SEQ ID NO: 749251 - DNA, 608 bp, Homo sapiens
tgatcaggaaggaagttctttcaaccccctccacatcacccacatggcccagctgttctggctcccctacccatctggtgggccacatttgcccatgactgcactcttggacaagcctgcagtagccaggagacagggccctggcagtggatgtgggtgtgcagggagtagtgagcatttctaccaccctgctccggaaaggcaactgcatgaatcttgcccaaggtcactcatcagtaaccagtgtcctggagacaaataccagcacttacacggtttcccgaaactccaggctgctgcccctgtgactgctctgcagttttcggggaagatcagctgtggtggcagatggctggtctctgtatctgcacctatcggtgagcrattccactcctaccccatcacctttgcgatgacactgccctccaagcccgaggatgagcccttcccaggttaaaagctgtttatatgcacaggcaaaccttcctctctgaaatggcaaaatggcgctctccaagggcctctagaaaggacagttcccggggttgaatggcaggttaattctgatccacaaattaattttgtctctttgtatatcaagggtgcgt

SEQ ID NO: 749252 - DNA, 644 bp, Homo sapiens
tgaagacacacctgcggtcccacaccggggagaagccatatgtgtgtgagcacgagggctgcaacaaagccttctccaacgcctcggaccgcgccaagcaccagaatcgcacccactccaacgaggtacctctgcggggcatgcactgggcatgcacactggggccccactgaygccccatggcttccaggcatctgtagtccagtagatagccaggtgccccatgtcccgcccccgccactgaccagctatacatcctcagatacagaccaggactctttgagacctagacagaccggtctctttctctatgccacatcctttcctctaaaagatgccccgtgaggtcccatggcatactgaccctctctgtgcctcaatttccttatctccataataaatataatagtgccctccccaaaggccatcatgaggtcctcgagagttgaagttgaagcagggaagtggcccttctgatctcggagtgtttaacatgcatctgctccctattacttggggctgctgggtgggctctgcctccccatcctctagatgaggaaacgaagactcagagatgaagtgactttccccagtgccagagcagtgatgatccctctgcagctgtgaaaacatcctgggtcact

SEQ ID NO: 749253 - DNA, 672 bp, Homo sapiens
gctcccccacctgggagcctctgcttccccatctgcagagtgtacgcccctgacccggagtgctggggggaggctagcaggagcgctcttccctctggcactttctcatatagttctaggggcttggcctgtggccgccagcaaactactttccatgtggatgctgcctcctggccgggaggactcaaaggctggggcccttggaccactcaaagggatagggtgcaggtgccctgggcagggggaagtcagcactggtccttctcctcacagcctgtccacacccaccccactcccttggcctgggacctaccgcctccattcctcggaaaaggcccttcccagcacrtcttctgcaccgcctgggccagttgctagttggtccgagtccctctgaaactgaccagcagctgggacccagcccttcccctccccacccctgactctgcaagtgcttctaagcctccagccagggtgaacgtgacagcagagaataaaaggtgtaggatttaccttgccgggtgtcgagtgcccctgcctgccatagcaccttcagcaaggccacctctacgctgggactccgtttttccatctattggatgggactttggctgcaaccacacgcccctcgagcctgggtggtggatccgcccaatgctctcccactccccc

SEQ ID NO: 749254 - DNA, 584 bp, Homo sapiens
tttttcagcccttgcccctcccaccctccctccttttggagtcaccggtgtctgttgttcccatatttatgtccatgtgaacccaagatttagctcccatggataagtgagaacgtgtgatatttggctttctgtttccgtattagttagcttaggataatggcctccagctgcatccatgttgctgcaacagacatgatttcattttttgtggctgcgtagtattccgtggtgtatgtgtaccatgtttyctttgcatccaccctgatgggcacctgggttgcttccacgtctttgctctcgtgaacagttgctgtgacgggtatgcaggtgcaggtgtgtttttggtagaatgtttatttttctttggatatgtgcccagtgatgagtgggattgctgggttgaatggtcattctgttttaagttcttagagaaatctccaaactgctttccacagtggctgaacgaacttacactcccaccaatagtgcataacataagcattcccttttctctgcagccttgccagcatctgtggtttttttgactttttaataatagtttatctgcttttctgctgaga

SEQ ID NO: 749255 - DNA, 517 bp, Homo sapiens
tttatgtccatgtgaacccaagatttagctcccatggataagtgagaacgtgtgatatttggctttctgtttccgtattagttagcttaggataatggcctccagctgcatccatgttgctgcaacagacatgatttcattttttgtggctgcgtagtattccgtggtgtatgtgtaccatgtttcctttgcatccaccctgatgggcacctgggttgcttccacgtctttgctctcgtgaacagttgctgtgacgggtatgcaggtgcaggtgtgtttttggyagaatgtttatttttctttggatatgtgcccagtgatgagtgggattgctgggttgaatggtcattctgttttaagttcttagagaaatctccaaactgctttccacagtggctgaacgaacttacactcccaccaatagtgcataacataagcattcccttttctctgcagccttgccagcatctgtggtttttttgactttttaataatagtttatctgcttttctgctga

SEQ ID NO: 749256 - DNA, 678 bp, Homo sapiens
gactttttgcttaaaacattgtggatcctttcttttgtttttcagagtcaagaaaactttaagctatttacagcttttaacaattgagtatactcctgtgaacaaaatttggagcatatttgtttctctctacctaatttttacagaatttgaaaactatctgtgagtattcgtaacttatgacaatacagttatttgcataagtgcagtaagaatctgttttcatttgtaacaggacacaattggagaaattggttattttaccaaggctttgcctggaatgatgtgctttcctttaaggactcaaacttgacttatggaaccaatgaaagccccttggaaaaactggcctcatacctcatctacacagtccctgtacagggttcctgacctgtggtaagtaaagaatgtcactttctgacaggcccaggagctccaartttatcttggaacctcaagaagataataattcgcccaacttataggtgtttaatggtacaagtccatgactgggctcagctttaaaaaagtcttatctgagattctttctatggaacaaagttccatcaaagacaatttaaaagcctatgtaaaaactaattactcttgctgcactgtatataaataattagtccaagtataataaagcaaaccagtcctaccataatttgtccttag

SEQ ID NO: 749257 - DNA, 618 bp, Homo sapiens
tttgatattcaggatgaacatgatggcattagctctttgctattcagtgtttttcccttcagaaaatgttggcaacttttcattcttaaaataactttttcttttggcaatcactgagctgcacacttagtaaccactcagaagccatcaakgaaatgtgagaagattcaggtttaataaggaaaaaaaggcttattattgtcatctttcattacatttcaacccaaaacatggagtggaatttttttatccccattcagtgagggtctttctctacccattgaattttttttttttctacttgaaacacctacctcaatgttcccatgtgtctttcctagacactttctaggaactcttgggagaggttggatatcaatagggtaatgctcatgggaatgatacttatattacagttttgtgttttctacttctagctataggaaaattagaacaaattatgctggccaaggttagacaaaaacaaaacaaaatgaaaaaccccactgagtttgtaagtcttaaagtaacctgccaaaactcacctggccagtagtggtacaacatttatgtgattttggtggatggagtcagtatcatgaattgattacatacata

SEQ ID NO: 749258 - DNA, 652 bp, Homo sapiens
accctgctcatccttctttatagcacccctcaccacctgctgtattatttgtttatcattcagctttctctctaaaatggaagatctatgagaacaagaacctgtctgctcattgaggtgttcctctagaaaaatgtctggcccatagcaggtgcttaatcaacaatttktgaaggaaaagtggaggaaaaaaagataggagaaagcaaactcatgaagaagagtgcttgggtggggtgggaggagaagagggcaatggatccaggccctacagggattcactgttcaagcagaaagtccagggaaagccacatggcctccttcaatcggatgagctggagctgctgacatcccctgcaacctgggagccagtgcatgcaatgctccagctgggtctaaggacagaaggaggctaatgaacagccaccttcggagcaacagggtcacttcagtcctccctgtttacttccaagctgctgagagtcttatgcacatttcctcttctcacttgcctcttcacatccctagctgccgcaggaatttatggcttaattaaagtgggaagcagggtttatacatgtttatataaagttatattttcctccacctctttgttggaagaaaactcaaatgttaaaattcttaggagccc

SEQ ID NO: 749259 - DNA, 607 bp, Homo sapiens
actgaataacttatcaggagtttggtgaacataagggaaggccacctatggtggctgtattttattcagtgttggtcactgttgggcacttcatagagcttatttcatttcatcctcacaagcgccgtaggaggaaggggccccagagggattcatggttagaatagcagagtaggagcatttggcagctatattctgtgtaggtgataacttaaaaratatttttgttataaaatgtttcaaacatacaaaaaatatagagaagcagttttctatagttattaaatattcttaatgggtagtcatagaaattatcatccaaagtgggatattcttgagagaaaaaggaggttctatttataattatggtgggataacaaacttaagatgaacagctctagacaaactgggttgtatggtccctggaaaacaaggattactgtaaatgtgagtcccgccttgtgcttctctctgtcccaccaagaaaatatgatcttgatacagatgttcattgtgtcaaggcaaccatggcaaccatgatctagatacactgttcaagttttatgctgatcctacctatatatgtctcaggagctttccagagttt

SEQ ID NO: 749260 - DNA, 641 bp, Homo sapiens
taaggataattatgtaagtagaccatcttttccttgcaaggtagcggtctgctgcattgacagagggtagtatttctaggactttttcagagagtaaaatggtactttaagggataatctgctatctaaagatgaattttaaatgttggagggggttgtgggattcggggaagacaatagaataatttgtgtcatggttaatttaacaaagagtttttgtttatagaatctgatcttcggtggattttaacaaccctcttcttccttggcttttcagataaagacgcagagcctcagrgaagttaaatgattgatcctatgtcagggggtagagtcaagactcatacctatgccttttaacttcaaggtgagtgctttttctttatacaaaagggcttccaaaagttatatttctttttatcaatgactagatcttgaaagccataccttttctgatggcatttatcctgggctaattggtagagagagggtgaacagaagagaagacatagacacgcagagaagaaagtgacgtgaaaacagaggcagagattggagtgaagtgaacacaagctcggaaatatgtggaggcaacagaaactggaagaggcaagggaggatcctcccctagagcctttcgg

SEQ ID NO: 749261 - DNA, 542 bp, Homo sapiens
actttaagggataatctgctatctaaagatgaattttaaatgttggagggggttgtgggattcggggaagacaatagaataatttgtgtcatggttaatttaacaaagagtttttgtttatagaatctgatcttcggtggattttaacaaccctcttcttccttggcttttcagataaagacgcagagcctcagagaagttaaatgattgatcctatgtcagggggtagagtcaagactcatacctatgccttttaacttcaagktgagtgctttttctttatacaaaagggcttccaaaagttatatttctttttatcaatgactagatcttgaaagccataccttttctgatggcatttatcctgggctaattggtagagagagggtgaacagaagagaagacatagacacgcagagaagaaagtgacgtgaaaacagaggcagagattggagtgaagtgaacacaagctcggaaatatgtggaggcaacagaaactggaagaggcaagggaggatcctcccctagagcctttcggtgag

SEQ ID NO: 749262 - DNA, 509 bp, Homo sapiens
aaaataaaataaaaaataaatttaaattatcgtgactttttaccatttgtttttatattgtaggacgcaaggtataaatgaaaatattagcattgacctcatatgtagaatcaacacaattacacaattcacattccatagctcatccatgtgtatgtatttcattcttgctaaaccagtagatacgctgcacaaaastagctcagctctttctatctcacttcctgacacccacacactccagcaacactctctaccttgggatcatggacactaaggaaggactgaaaggacaggagctataggctgctctctcttcccctttccttgttccatacaagtactaacgaggccaggccctgcttagcttctgagacgagattgggcaccctcagggcactgtggccatagtgtcctgccctttcctttcatgtcatctcaacacaggggtcggttagcacagggaagtaactccaataagagaggatacaacagggctcctcagtcat

SEQ ID NO: 749263 - DNA, 509 bp, Homo sapiens
aaaataaaataaaaaataaatttaaattatcgtgactttttaccatttgtttttatattgtaggacgcaaggtataaatgaaaatattagcattgacctcatatgtagaatcaacacaattacacaattcacattccatagctcatccatgtgtatgtatttcattcttgctaaaccagtagatacgctgcacaaaactagcycagctctttctatctcacttcctgacacccacacactccagcaacactctctaccttgggatcatggacactaaggaaggactgaaaggacaggagctataggctgctctctcttcccctttccttgttccatacaagtactaacgaggccaggccctgcttagcttctgagacgagattgggcaccctcagggcactgtggccatagtgtcctgccctttcctttcatgtcatctcaacacaggggtcggttagcacagggaagtaactccaataagagaggatacaacagggctcctcagtcat

SEQ ID NO: 749264 - DNA, 385 bp, Homo sapiens
ttcctgcacttcccacagcatggctccccaggggcatggagaagattatgtgaatggggcggcagggaacggcagccacacacatcacgtgtggctcctctgctcctgtgcatgcccccttgtcctacaggacttcgctgacraaacagaagtgtaaagatatcgttattaatgtgacagcagagtgttaaaccgaatgcggggcactttcaagtgcaggacactatgcaactgacttcgcaggactcagaaagtggccctgcctagcacatggccacatagcagatgctaatcaatgtgttaagtaaaggaatgaagggttgtcacctgatagaagataaacagttcttctggttttgatacaaactaaaggcctctctcctcc

SEQ ID NO: 749265 - DNA, 385 bp, Homo sapiens
ttcctgcacttcccacagcatggctccccaggggcatggagaagattatgtgaatggggcggcagggaacggcagccacacacatcacgtgtggctcctctgctcctgtgcatgcccccttgtcctacaggacttcgctgacgaaacagaagtgtraagatatcgttattaatgtgacagcagagtgttaaaccgaatgcggggcactttcaagtgcaggacactatgcaactgacttcgcaggactcagaaagtggccctgcctagcacatggccacatagcagatgctaatcaatgtgttaagtaaaggaatgaagggttgtcacctgatagaagataaacagttcttctggttttgatacaaactaaaggcctctctcctcc

SEQ ID NO: 749266 - DNA, 385 bp, Homo sapiens
ttcctgcacttcccacagcatggctccccaggggcatggagaagattatgtgaatggggcggcagggaacggcagccacacacatcacgtgtggctcctctgctcctgtgcatgcccccttgtcctacaggacttcgctgacgaaacagaagtgtaaagatatcrttattaatgtgacagcagagtgttaaaccgaatgcggggcactttcaagtgcaggacactatgcaactgacttcgcaggactcagaaagtggccctgcctagcacatggccacatagcagatgctaatcaatgtgttaagtaaaggaatgaagggttgtcacctgatagaagataaacagttcttctggttttgatacaaactaaaggcctctctcctcc

SEQ ID NO: 749267 - DNA, 385 bp, Homo sapiens
ttcctgcacttcccacagcatggctccccaggggcatggagaagattatgtgaatggggcggcagggaacggcagccacacacatcacgtgtggctcctctgctcctgtgcatgcccccttgtcctacaggacttcgctgacgaaacagaagtgtaaagatatcgttattaatgtgacagcagagygttaaaccgaatgcggggcactttcaagtgcaggacactatgcaactgacttcgcaggactcagaaagtggccctgcctagcacatggccacatagcagatgctaatcaatgtgttaagtaaaggaatgaagggttgtcacctgatagaagataaacagttcttctggttttgatacaaactaaaggcctctctcctcc

SEQ ID NO: 749268 - DNA, 445 bp, Homo sapiens
tggctcctacccacattcatgcaaactcagcattctagattaaaagagatttaagagacttgccaagcaaatgcatggcatccttagatgtatcctgatttgaataaaacagctataaataataatattttggggattattgaaaaatttgactatagattagttttcaggtgatattggagaattaatgttattattgttaggtatgttagcayggtcatgcagcaatgtgtctttctttttaagagatgcatacaaaaatatttgggtgtgaaatgttcttgtcctataatttgctttaaaattcttcagaaaaaaaaagataagcaaaatagaaaaacaagataatgggtacatgttatctatttcttattctccctatttttttgtgtgttcaatttttaaaagaaatttactccatacatatatcccaccccctccacta

SEQ ID NO: 749269 - DNA, 599 bp, Homo sapiens
gtacctcatggctggaggtgtattttcaggtgggttgggactttgaagaggtggcttttcctatggacccctctgactccccacctgtgggcatgacacaggtgacctggctgccagggcagaggctgcttagccctgctccagagaaacagagctctgagggcttccagaaaccagggctcctggctcctcagtccttcccactcctctcttcctactcccgtgctgcatataaacttttctttttttttcagatggagyctcactctgtcactcaggctggagtgcagtggtgcgatctcagcttactgcaacctccgcctcccgggttcaagtgattctcctgcctcagcttccccagtagcagggactacaggaccacaggtgtatgccattatgctcggctaatttttgtatttttagtagagacagggtctcaccatgttggccaggctggtctcgagctcctgacctcaggtgatcacacgccttggcctcccaaaatgctgggattacaggcatgagccactgcacttggcctgcatataaactttttgagtttcctgcttttgacatgagcatggatatttatcacttct

SEQ ID NO: 749270 - DNA, 599 bp, Homo sapiens
gtacctcatggctggaggtgtattttcaggtgggttgggactttgaagaggtggcttttcctatggacccctctgactccccacctgtgggcatgacacaggtgacctggctgccagggcagaggctgcttagccctgctccagagaaacagagctctgagggcttccagaaaccagggctcctggctcctcagtccttcccactcctctcttcctactcccgtgctgcatataaacttttctttttttttcagatggagtctcactctgtcactcaggctggagtgcagtggtgcgatctcagcttactgcaacctccgcctcccgggttcaagtgattctcctgcctcagcttccccagtagcagggactacaggaccacaggtgtatgccattatgytcggctaatttttgtatttttagtagagacagggtctcaccatgttggccaggctggtctcgagctcctgacctcaggtgatcacacgccttggcctcccaaaatgctgggattacaggcatgagccactgcacttggcctgcatataaactttttgagtttcctgcttttgacatgagcatggatatttatcacttct

SEQ ID NO: 749271 - DNA, 578 bp, Homo sapiens
cttgtgaacttgtatgaccaatgaaacgcaatggaattgacattctgggacttttaagatgctttcacctgggcctctggaaacattttccaggagcgagagccactatgcaggaggactccagtcgacagtttcagcatagctcagccctccagctgcccacatcaagggtcagacacggtacgaagctctcttgaaccctctctctgaaccagcccacccacctgtcaaatattaaaagtgacctcaaccaatgccatgtacagtagaattgcccaggtaggccctgcctgaatctyacccccataaaattgtgagaatattaaagtaacttttttatgtaagccactaagtatttgggaaaatttgtgatgcagcagtaaataaccagaatgaggtctcttcctccttctgggtctcagtttcctcactgacaaaatgtgagatttgaatcagacccctgagttttcttccaattttaacaaaattggcaaaacaacactttgcaattgccacaatctttcttataaaatcatctaaaggtagtaagcattacaaaattaagtcacttctaactt

SEQ ID NO: 749272 - DNA, 587 bp, Homo sapiens
tcacctccagcctctgtcttccaggttctttctgcaagtcttccaccagggccactgcctcctctccactctccggatgctgctgtctgacccagatctggatctcctggagaaggacagtcgggaactgttctaggaccagcaactccaggatctgctcttttgtacacttctctggccttagccactgacaacagagcttctggagctggaggagggcctctcggggtcgtgatgcttcttggtaacggaaatgccaaaagctctggcaggatgtctctggtccagggtaattcccttgaagggaaatttcctgctcccagtgggaatcttcttccagtttaactatttggagatcttgtactgaaggagtctggatttgttggtccacagctacagccattgttcaggtcagagaagagctttgcaacygcactctaaagctcaaacctcttcatcacctcactgggaagccatcttagaacttccacttaggagtcactaagtggaacttctcttgaaattctagagtcagagacatacattacaaagttaactctagtaaaaatcgcaagtgttagcccagc

SEQ ID NO: 749273 - DNA, 657 bp, Homo sapiens
atgaacctcggagccccaccctagaactcctgaatcagacactttgagggtggctgggcgcaatggctcacggctgtaatcccagcacttggtgaggccgaggcgggtggatcactcgaggccaggagttcgagaccagcctggccaacatagtgaaaccctgtctctgctaaaaatacaaaaaaaatcagccaggcatggtggcatgtgcctgtaatcccagctacttgggaggctgaggcaggagaatcgcttgaacctgggaggcggaggttgtagtgagctgagattgcgccattgcactccagcctgggtgacagcaagactctgtctcaaaaaaaaaaaaaaaaaaaagaaactgagggcgatgcccagcattctaagtgatcctgattcaaactccaatttgagaacctctgcactagacctctgtagacctctggttctcaaactcagccgcacattaraattacctgggggcctggagcctactccagggattctaattttctgatttaattggtatggggtatggcctgggcaagggagttttgaaagtgcccaggtagttctattatgctgcaaagtgtaaagagcactgccatagagctttgttcttcagggggtggtcagtgggccagcagcatcagctcacct

SEQ ID NO: 749274 - DNA, 501 bp, Homo sapiens
acaaccaagtagctaacccagagcccacaaaagcagagtaaaaattctaacacttggtaaaataaaaatgcacatatatccctgtcatctaaaaaaaaatgcttacgtattcaaagacagcaattacagctactgagaacatcattgttagcaaactgaggcagagaaaacaaaggtgctgatgaggatttgaamcacctaagctgcagaaacccactggatggtttcctaggttccaagttggcattatctttcagaacgatcttctagaagagatcacataacactgttacaaaggatctggagaaagggaccctggcttcatcactctggctctccagtcatgctttacattttcacttcttacactctctttcataggaagtcaatttacaggcctccatcaagcccttagagacctttttgtactatccatgacaagttcttgatgttatgtctgcacttctgacaaattcttagcagttaacttacaaggcagtt

SEQ ID NO: 749275 - DNA, 501 bp, Homo sapiens
acaaccaagtagctaacccagagcccacaaaagcagagtaaaaattctaacacttggtaaaataaaaatgcacatatatccctgtcatctaaaaaaaaatgcttacgtattcaaagacagcaattacagctactgagaacatcattgttagcaaactgaggcagagaaaacaaaggtgctgatgaggatttgaaccacctaagctgcagaaacccactggatggtttcctaggttccragttggcattatctttcagaacgatcttctagaagagatcacataacactgttacaaaggatctggagaaagggaccctggcttcatcactctggctctccagtcatgctttacattttcacttcttacactctctttcataggaagtcaatttacaggcctccatcaagcccttagagacctttttgtactatccatgacaagttcttgatgttatgtctgcacttctgacaaattcttagcagttaacttacaaggcagtt

SEQ ID NO: 749276 - DNA, 622 bp, Homo sapiens
caattttacattctcacttatgcctatcctctcacatttattcattcatttaataaacactgatttcttgtcatatgccaagcactgtttgagcagtaagaataagactgaaaattcaggtttatcacatcatggaacttatattctagtgagagaagatggatataaaaattgaatatcaattagcaataaatgsttggaagaaaaataaagcagaataagaggatgtaaagtgttaggaggatgagagctcctttcttgaatacagtagactaggaatgggcctctataagaaggtgatacttgagcaacaaagggatgaaccatgtgaagatggtttgagagcattccaggtggagagaacagcaaatgtaaaggacctgatgaaagagtaggctgttgggtggcagggggaacaagcaggataccaatgtagctgaaataaagttgaggaaaatattagaagatgttaggaaatgaaagttgaggaaaatgcctagaggtgaacaggagctaaaatatttagagccgtataattgaaattacagtagccacaagccacatgtgctttttgagcacttgaaatgtggctagtctacattgagatatgtttcaaggataa

SEQ ID NO: 749277 - DNA, 616 bp, Homo sapiens
acttaaaataaaatggaaatttgacatcccctccaaggctctgtatgatctggcctgcctacttcgcaacctcctctcttaccagtccttcctcttagttatgatgcctccattatactgatcttccagggcctcgaacatctaccaagctcttgcttgcctcatgttttctytatggtctggaattttacccttccattcttcatctgtggacctcttaccagctcagagaggccttcctgtcttagagttcaactttggtcaaagttatctaagtacctcaattattactcttttacttagtctcttattttttaaaaaacactacgatttgtaattacattgtctatttatagacataccttgtttgattgtgctttgctttattgtactttgcagatattgtgttttttacaaatcgaagatttgtggcaaccctgcattgagcgaatttatcagcaccatttgttcaacagcatgtcactttatgtctctgtgtcacattttggtaactctcgctgtatttcaaattcctcaatattactgtatctattatggtgatctgtgatcagtgatctttgatgttactattgtaatgttttggggtgccacgaac

SEQ ID NO: 749278 - DNA, 530 bp, Homo sapiens
caagaatgtacgtccagcctgccccggagctggaggatcccctccaagcctaaaaggttgttaatagttggaggtgattccagtgaagatattttatttcctttgtcctttttcaggagaattagatttctataggatttttctttaggagatttattttttggacttcaaagcaagctggtattttcatacaaattcttctaattgctgtgtgtcccaggcagggagacggtttccagggaggggccggccctgtgtgcaggttccgatgttattagatgttacaagtttatatatatctatatatataatttattgagtttttacaagatgtatttgttgtagacttaacacttcttacgcaatgcttctagagttytatagcctggactgctacctttcaaagcttggagggaagccgtgaattcagttggttcgttctgtactgttactgggccctgagtctgggcagctgtcccttgcttgcctgcaggcccatggctcagggtggtctcttcttggggcccagt

SEQ ID NO: 749279 - DNA, 606 bp, Homo sapiens
caataagggcgggctcaggccagaagccaaatgcaaccaaccctgggcaggaccctgtcccccagtcatgttcctcctcaggtgaacttgacttgggtgtgtaactccaaaagccaggcaaagcctgttactgcctgggtggcgtccgctgcttgctggggtcttggccgtgggtctgctgcctcctggctgaatggtcttaggctacatctcctagagttgctcagtgggagattgtcctgcctgtagggtccagccctactgggtctgtgggttttttctcctcgtgtgcatagacaagagattgtacaaataaagacacaagaaaaagacagaagaaaagacagctgggcccgggggacactaccaccaaggcacggagatcggtaatggccccgaatgyctggctgcgctgttacttattggatacaaggcaaggggacaggttaaggagtgtgagccatctccaatgataggtcaggtcacgcaagtcacgtgtccactgggcccttccctgtttggcagccaaggcggagagagaggacagctgacgccattattttttctatgtatttcaaagactttagcactttgactaattctgct

SEQ ID NO: 749280 - DNA, 504 bp, Homo sapiens
gcctggttttccaccggtggcagtgatggcctttggggcagaccaaggtgccatgagtccctgcttcccgtggcctgggagggcccttgcaccttcaggtggggtgtagtgccagacctctgggaaggctgtcctgccggcagcacccgtcagcacccactctgtgaatttaatacaaggcctttgctttgtgcatacgacttctgattaattttcgtttccaccatctgaagtgggcctggctgcgcctcaggcctctggtctctggctcagaaccagamaaggcaagggatttcctgtttttcattcttgcacttttaataaaatcgtaggggtttcgagtttgcgatagcaaaagaaaacattaatacttttttgaaattttcttgtttttttcccaatacaattcatgaaaggtcattgaagttaatcaatgccactttcttaactgacatgggccacagatcaaaggtgggcaaaggtggcgagtggtgtggttttgtt

SEQ ID NO: 749281 - DNA, 599 bp, Homo sapiens
acttgatgtaactcatgggttatagaagaaatcaacggaagtgagaaaagacttagaaccgttggcagtgggcgcggcagatccgtgcttgtggagtagatcccaagtggtgtgtagaagggaatttacagtcctcagtgactgtattagaagaaataggagtgaaaaatagctgggcacagtggctggcgcctgcagtcctagcactttggaaggccaacagyggggaggattgcttgagttcaggagtttgggaccagcctgggcaacatagcaagacctcgtctctactaaaaataaaaaaattagttgggtgtggtggctcatgcttgtagtaccagcttcttaggaggctgaggtgggaagattgtttgagtcccggaggttgaggctgcagtgagccaagatcacactactccactccagcctggatgacagtgcgagaccctgtctcaaaaaaacaaaacaaaacccagaaatgaatgaaactgacaacaaagccacagcggagaagacccacaaggttttctttctgagaccaaataactggcaaaagtcttttagcttaattgagaaaaggggagaatgagcaaataaat

SEQ ID NO: 749282 - DNA, 599 bp, Homo sapiens
acttgatgtaactcatgggttatagaagaaatcaacggaagtgagaaaagacttagaaccgttggcagtgggcgcggcagatccgtgcttgtggagtagatcccaagtggtgtgtagaagggaatttacagtcctcagtgactgtattagaagaaataggagtgaaaaatagctgggcacagtggctggcgcctgcagtcctagcactttggaaggccaacagcggggaggattgcttgagttcaggagtttgggaccagcctgggcaacatagcaagacctcrtctctactaaaaataaaaaaattagttgggtgtggtggctcatgcttgtagtaccagcttcttaggaggctgaggtgggaagattgtttgagtcccggaggttgaggctgcagtgagccaagatcacactactccactccagcctggatgacagtgcgagaccctgtctcaaaaaaacaaaacaaaacccagaaatgaatgaaactgacaacaaagccacagcggagaagacccacaaggttttctttctgagaccaaataactggcaaaagtcttttagcttaattgagaaaaggggagaatgagcaaataaat

SEQ ID NO: 749283 - DNA, 599 bp, Homo sapiens
acttgatgtaactcatgggttatagaagaaatcaacggaagtgagaaaagacttagaaccgttggcagtgggcgcggcagatccgtgcttgtggagtagatcccaagtggtgtgtagaagggaatttacagtcctcagtgactgtattagaagaaataggagtgaaaaatagctgggcacagtggctggcgcctgcagtcctagcactttggaaggccaacagcggggaggattgcttgagttcaggagtttgggaccagcctgggcaacatagcaagacctcgtctctactaaaaataaaaaaattagttgggtgtggtggctcatgcttgtagtaccagcttcttaggaggctgaggtgggaagattgtttgagtcccrgaggttgaggctgcagtgagccaagatcacactactccactccagcctggatgacagtgcgagaccctgtctcaaaaaaacaaaacaaaacccagaaatgaatgaaactgacaacaaagccacagcggagaagacccacaaggttttctttctgagaccaaataactggcaaaagtcttttagcttaattgagaaaaggggagaatgagcaaataaat

SEQ ID NO: 749284 - DNA, 553 bp, Homo sapiens
gggaaaacgggggtgggggagaagtgaaccccaggctttctttgaggggagagtaattggtgcacctgtggctagggcctatatcccctgtgaggccctcagggctgcagtcactcaagctctcaagctgtcccctcccttcccctcttcccccgacccctctcccagctgcttccacttactccaatgggctgctggagcagtcagtcatggggccgccagcagcaatgggggcctgcacccgctcagccaagggagggcagaggagaggaatagccatggtgaccatgtactgagcacccaccagctgccaggcatgctgagtgtgttattytgatcctcacaatagccctgcaaggtcagaactactagccccatttgactgaagcactttgcctgaagcgctagagctaggcagtggctgactttggacctgaacccagggcttttgcactctgaagtactcatgcaccttctgccaggccgcattctgcacacttgaaatcctgcagaagagcccaagaaccgtggttaatttcaaaataaattcttt

SEQ ID NO: 749285 - DNA, 634 bp, Homo sapiens
acagcatccactcagtacttgctatgagggttgttgtttgaagaattccttttccccttttccccttttcctaggcagcccagagccctcagaggaagccctcagcaggctgagtagattatcttaagctcaaccccttccctgcctgcctccaaggatacagatgcaggttagaaggtgtctcagagggggtatggcctttgaggtttccagggatctaacagggaaacttctgctgcagagcagctccaggccctccagcgctgacccaccaaattttgctgcatcaatgtgcttcgctgagctgttatgtggccctggcgtggctctgaaggccgactgagaatcccaatccatctaggaggatccttggaattaagccaactggggatgagggcaaagaraggtggttgggatgggtcccaggggcagaggcctccctgtgctactgctgagtgggcagcagctttggattctgagaaggggtcattttgctggtgctaaggccgggagcttattctgatgctgcgggctctctgactggcctttcacctgcagcccccaagctcaggcttcccagaatgaccatcctccggggctggcaccaagaactggctctgtgccgcagttagag

SEQ ID NO: 749286 - DNA, 564 bp, Homo sapiens
  misc_feature 540, 541, 542, 543, 544, 545, 546, 547, 548, 549, 550, 551,552, 553, 554, 555, 556, 557, 558, 559, 560, 561, 562, 563,564: n = A,T,C or G
acagataaagggttttatttctcagagttcatcttatttgagatagagaatatatgttttagtaataccaaattgctatacacccatcatatttctttatagtgaaacaatattgtgcttattgagtattaaaattctacaaatgtagaaaggcttgtgacaatgtgataattaaataaagttcaacttactattaaagtcacatctactcaaatgttcctaatacataatcattaatgaagaaggcttattacaattctgaagtgacakgaaatgtatgtgatgtggatacttacacagataggtcacacatcctgcaaaaaggactcagcagggtatctgttcatctttagagaatagcttagtctctaggcaggagtcctgcctgattatgtaatgtggctcttcactgagagatgcctaaattgcatatagtttctgcaaatgggcattttccagggaagaggctcctgtttcccacatgttgcatatgcagcagatgacaatcaagagaatgagaattataatgatgtaattatnnnnnnnnnnnnnnnnnnnnnnnnn

SEQ ID NO: 749287 - DNA, 562 bp, Homo sapiens
gtgaagctgctcctgcccatgtacagctcacagtctactgatgttcaaagatggtctcagaggttgggcccactagagtaaactgagtccaaaacctctacacaattatgttcaactgtgctctctgataccaggagcaaggtggcgtggtttagggtgttgcaaacttcaatgattacacgggaagtttcacatagcaagctttggtacttggttaatccagcatttgttagccaatgatgycctttggtattcatcaaagttaccacagcatggggggcctttatattcaggttttgcctaagggttagtttatctgcttcttgtgctaacagggctgttgctgccagggcccttagacatgggggccagcctttggaaaccccgtctagctgttttgagagataggccactggccttggccagggccccacagtctgggttaaaactccaactgccattttttctctttctgactcatagaatgtaaagggttttgtcaggtcaggtagccccagggctagggctgacatgagtttttcttttaactcatgaaaagctc

SEQ ID NO: 749288 - DNA, 553 bp, Homo sapiens
gccagggtgaaagggatagccaattggactaaagtataagtgccactccacttattcggcagagggcccagtaaaggtccaccacaataccaccacacatccactcggggatgaacaagggctgactgattgataagctcttgaaaattcttaagctcactgaatcccttcaggtctccaaggaacgctgtttcctccctgtcatgagagacatgaagcraacttagtgctgagagacggaagctggatggccctcgggggctgacccacagggtgccggactttgggatatagcagagagagcttggcacgacttattattccagactgtagaatcctggaaaagagctaccatgcagcccatgcctggtcaactgaaggaccaccttagtggaaaggggacaatctgggcctctggcctgccatgtgcacaagcataacaattgcttttgtttaacgtgtggatggaatatttgactattccaaccaggcatttgcatcttggtatcctgtcttaattgccaaagtttgttttaagtctttaacttctatg

SEQ ID NO: 749289 - DNA, 439 bp, Homo sapiens
ccacaagtaagtgagaacctgagatgtttgtctttctgtgtctggcttatttcactaaacgcaatgatctccagttcaatttctattatttcaaatgactgaatgtcatctttttttttttatggctgaatagcactacatacacaatacctcttgtgcgcttgctctcccctctcttatctttgctttcttctacgttagtttcattctcagtgagatcatatccaygtgatggcagcaatatccctgactagtacagatttatattcaaacagtgtgagaatcccagaagaaagatagcagcccctcattggagaatgaagtatctatgtcataagaacacattcctctgacctataacacctagaacactgagataatttataaatatatagagagagtctggcagagatcatcttcccagaggaatactgaaaaa

SEQ ID NO: 749290 - DNA, 612 bp, Homo sapiens
caccattcttattgctaaaggaagcctgattgataatatactcaagatgagtttgtgctgaatttaaaaattatttattgctatgatcaattttattcaaatttcattgcatttgatgaattccttaaggaaaataaacaatgggccaaagtgtaaaaattaaataacatacatagactagaaatattatctgaaaacaggtgacaaaaatctaatgctgcttcctattaaataataattttcaactcattttatatcaarctataaagttttttaaacatctaattcaagattatataatactagtttcagtgaagattcgttttcctataacttcttctgcattctcttagtatgactaaaggctcagtgtaacagaattgatataaaagtatctcaaacaattactgttgatacctaatgtgaatggttaaaaaagttttgattcttatgactttgtaccaaaataaagcttctgatatatctttaggattgtatttgatgatcagttaacgatacaagcaaaaaatacttgaactaagttaacatttacatataaaaatagagaatatatacaactatagtgatcttgatgatatcttcaagtatggt

SEQ ID NO: 749291 - DNA, 513 bp, Homo sapiens
cttggaagtcagtacaccagacaatcctttttatttgtgtccgtttcattcagtggggttgctttaggaaagggtttttttgggggggagtgggtctgattaacagtcactgatgtaactatatggcaatggtgttaaatatttaaaattctgagattaaaaaggtacgcagttacatactatctacatctttcctcctgttgcatcctctgtaggctttcactagataactagtgataatgacagtttgccaaccccctttyttttcctttaagtgaacccaatttgttcacatacatacacatgcaaatcccaaaagaaggttttatttgaagtgttcctgacaaataaaggggtaaaggagattttttttaaaaaagaagaagaagaagaaatctattctggaacatagctagagcaatgttccctaacctgtgttggggtggatcacctggttaaagatcagcaggagagaagataggcatcagacagaaattataggaccaaggtaat

SEQ ID NO: 749292 - DNA, 485 bp, Homo sapiens
gggtccttccctgagacttctgctgctagaccatagaaatggcttaatgaaggggaagaactctggagagcagagatggtcatctgtactggattacattggttcagctgaccatggggatgggtaactcctttagtgaaatgaatatatggttttaagaaactgcaggtacttgttggggtggtccatccttgctctttagtattttgtaratcattggaccaacttcagcagagaagctctgctctaggaggacaagatttgcagtttatactggaatcttcgtcaaactcttcccaaactaacttatcccagttaacagatttccagtctgaggagagctaggaaggataaagatacttttctgaagtggagagttgcctctgatttggcaaatctccacagggcatcacaaggcagacatcaaaagtaatagtttggggtgaacttgacctagttacattaataatgagaggactagcaat

SEQ ID NO: 749293 - DNA, 502 bp, Homo sapiens
ctttctctctctctctctgcctctctctctctctctgtctctctctatctctctctctctgactccctctttgcctctctgtctctttctctctctctctttccttctctctctttgactctctgtctctrtgactctctctgttccctctgtcagtctttctctctcctcttagaatttttttctctacctttgagtctcctggctttactcttttgtaccctttatattgcctggagagtggtgggtctaggcttttttttataggttctggccccctgggtactttattgtatggtggacagcagaatttttgccttctgcttttgtttttcttcatctcttcttacaaatacttgttgggcttctcttataagctcttctataggtttatctttctagttctctgtcttttgtaatttcttgttaatatctggccaacttagtgacaaagtgaagttttaacattccctgcccaagaggatcctcgagacctagacca

SEQ ID NO: 749294 - DNA, 594 bp, Homo sapiens
tggagagtggtgggtctaggcttttttttataggttctggccccctgggtactttattgtatggtggacagcagaatttttgccttctgcttttgtttttcttcatctcttcttacaaatacttgttgggcttctcttataagctcttctataggtttatctttctagttctctgtcttttgtaatttcttgttaatatctggccaacttagtgacaaagtgaagttttaacattccctgcccaagaggatcctcgagacctagaccagcctattttctcatttgttcctttaatctgtctaaaaattctatagatccttcatctttcccttgctgtatatcaaatgtttgggtaagattctgggttcggggtactgattatttaagcccctttattaattccctaaggtcctgcatattttcttggtaggctgcattgttattatcccacygggggtcttgggtgggatatttttgatctgctgtaggaacattttggccaggagggtgttcacgttcctaggctcccatagcagctctacagatcatgcctctttcttccccctgagaagaggggaaagggaagttctggat

SEQ ID NO: 749295 - DNA, 466 bp, Homo sapiens
tcccaaagtgctggactaacaggcatgagccactgtgcctggcctgtactctttttcttactctccttctgcccctgagtttggacttagttttggattatccagcctgatgattggttgaaagtggagtgagaatggtatttcacattttggccttacctactaagcctgggagaatagtagattgtattcagcgtctgttgtgctggaggctttaccctaagaggcccagagcggggcaagagctggagcaccttacttgggtgtgcctgataggacttgagtgtcttctcagattcygggctccatctgcagcacaagccaggaaaatggtgtgttgttgctgtacttggagtagacagtgagtgcttcagtgcctgaggagttgcagcaaggagggcctggatgtcagctgaggaggagtgggtagaagctgacaaacagactgtcccatcttctttaccca

SEQ ID NO: 749296 - DNA, 584 bp, Homo sapiens
attactgaggtattcatcttttaattaccaatacaaaaatctcttaattagcctttgctttttaaataggctacaagcaatttttcttagtctgctgtttgcattttgattttgtggtttctgaacactagttttccatttttaagaagctaatctttctttagggtttctgtctttggggtcatgcttagaaaaggcctttcccaaccaagattatatcaatatcctcttatattttcttctagtaatttaatggtttcatagattacatttaatcagctcattcattcatcaactgattgcagactaaggtcgtattttttttcctaactggttgcttaatcaccccaacrgcgtttattattctagccttcctccacttacttgagatgcgtatttctagtttttataaatacacttggatttctgactggcagtataaagtctctggcaaagatacttgtttggggaaatttttaactccagatataagaacttttcaaataagtggcatcttagatataaaatactcagagtacatatccttgttcatcaaagcatgtgtggatgttggtgtcttacat

SEQ ID NO: 749297 - DNA, 474 bp, Homo sapiens
tatgtgaccctgccagtcacagctgcatggtgacttcttatagctctgtcccagtcattgcttttttaattttaattgcggtaaagtatacaccacataaaatgtaccatcttacctatttttaagtgtacagttctatgccactaagcacactcaygctgctgtacaaccatcgccactatccatccctagaagttttttcattttgcaaaactgaaactctgtcccagttaaacactaaccccctgctgatttaccacctcccccagcccctgggacccacgattctactttctgtctctgactactctaggaacctgtattagtggaatcatacagcatttgtgactggctcatttcacttaaggttcttccatgtcgtagtgtgaatcagaatttccttccttttgaaggccaaataatattccactgttatggatagaccacactgtgtttatccattcatccatggac

SEQ ID NO: 749298 - DNA, 487 bp, Homo sapiens
ggggacaacattgtggtttctcgttgtctagtcttttgtctgtgtcatgtcccgccacccaccttttggatgttccccggagtcacttagctctttgacctggtttaacatctggttttcttgtggattttaatgttgtttaccaaatcccagggcctgcccgagggcctggtgaccctgggcaggccatttcccgtcctgtgcaactctgatctgcaggatggggtggtgtgggagcacccatgtccctgcctgaggactctccaggcctccgtgggggcggtagcagggcctggcccatgcggcgcgctggtgctgctcacccgcctttctggctttargaagtatgcttggagctcatctaacatcttattttccattttctgtttcttaatacttacagaggcttccgactttttctccaggtctgtattttccttgttcttctctggtaatttggaaggtagacagtcagtttttagttcaa

SEQ ID NO: 749299 - DNA, 641 bp, Homo sapiens
ggtgagatgaggaagggtaagaattttccaacattcatgaaccatggatgggcagagtcagggctctgcatccatcactccatctcctctgcatgagcatatgggaagactgcacttcccagcctcccttgcagctaggttggcaccatataacagattccaagggaccgtgggcagcagaaatggaagatgcctctgggtgtggctaaaatacctctcatcatgactcagccctcagtgaccagggagcctggagctccaggtgccrgagttatatgttggaaggggatacagcttaggggagagctatggagaagaaccacttcctgctctggcctgtgcagagtgataaatggtgtgaatcattaagatgtggaggtttatttgttactgcagcacagcctagctttccctgattaatacacatagcctcaaggacatgggtgaagatatgaagacattatctgggcagaggatcccatttatatcagaaaaatgtaatcactctgccagactctcttactgtagcttagcatctgactccttcagccttcaggtcactattttgatgtagtgtcttcgagaattcctccctgaggctgcctgcctgatacacagggactctgtccatcacctgagtc

SEQ ID NO: 749300 - DNA, 523 bp, Homo sapiens
attttatttaagaaattcttttctgtacctgtgttaatatttttttcttcatttttccctcaatgttttacttttcatgtttagatctctaattcatttggaatttatttttgtgtattcttctttttttttttttttttgagacggagkcttgctctgttgcccaggctgaagtgcagtggcgcgatctcagctcactgcaagctctgcctcccaggttcacaccattctcctccctcagcctcctgagtagctgggactacaggtgaccgccaccatgcctggctaattgttttgtatttttagtagagatggggtttcaccatgttagccaggacggtctccatctcctgaccccgtgatccgcccgcctcagcctcccaaggtgctgggattacaggcattttcgtgtattctttaaggtaaagatccaagttctattggtacagataaccaactggcctggcacattcaataaacagaaaaccctttccccagtgactggtgatgccatatctttcac

SEQ ID NO: 749301 - DNA, 554 bp, Homo sapiens
caagattaatcaaactttttatagtttctgctaactgtattttatttaagaaattcttttctgtacctgtgttaatatttttttcttcatttttccctcaatgttttacttttcatgtttagatctctaattcatttggaatttatttttgtgtattcttctttttttttttttttttgagacggaggcttgctctgttgcccaggctgaagtgcagtggcgcgatctcagctcactgcaagctctgcctcccaggttcacaccattctcctccctcagcctcctgagtagctgggactacaggtgaccrccaccatgcctggctaattgttttgtatttttagtagagatggggtttcaccatgttagccaggacggtctccatctcctgaccccgtgatccgcccgcctcagcctcccaaggtgctgggattacaggcattttcgtgtattctttaaggtaaagatccaagttctattggtacagataaccaactggcctggcacattcaataaacagaaaaccctttccccagtgactggtgatgccatat

SEQ ID NO: 749302 - DNA, 523 bp, Homo sapiens
attttatttaagaaattcttttctgtacctgtgttaatatttttttcttcatttttccctcaatgttttacttttcatgtttagatctctaattcatttggaatttatttttgtgtattcttctttttttttttttttttgagacggaggcttgctctgttgcccaggctgaagtgcagtggcgcgatctcagctcactgcaagctctgcctcccaggttcacaccattctcctccctcagcctcctgagtagctgggactacaggtgaccgccaccatgccyggctaattgttttgtatttttagtagagatggggtttcaccatgttagccaggacggtctccatctcctgaccccgtgatccgcccgcctcagcctcccaaggtgctgggattacaggcattttcgtgtattctttaaggtaaagatccaagttctattggtacagataaccaactggcctggcacattcaataaacagaaaaccctttccccagtgactggtgatgccatatctttcac

SEQ ID NO: 749303 - DNA, 584 bp, Homo sapiens
ttatctataacaatattttaatttaacacattttcaagattaatcaaactttttatagtttctgctaactgtattttatttaagaaattcttttctgtacctgtgttaatatttttttcttcatttttccctcaatgttttacttttcatgtttagatctctaattcatttggaatttatttttgtgtattcttctttttttttttttttttgagacggaggcttgctctgttgcccaggctgaagtgcagtggcgcgatctcagctcactgcaagctctgcctcccaggttcacaccattctcctccctcagcctcctgagtagctgggactacaggtgaccgccaccatgcctggctaattgttttgtatttttagtagagatggggtttcaccatgttagccaggacggtctccatctcctgamcccgtgatccgcccgcctcagcctcccaaggtgctgggattacaggcattttcgtgtattctttaaggtaaagatccaagttctattggtacagataaccaactggcctggcacattcaataaacagaaaaccctttccccagtgactggtgatgcc

SEQ ID NO: 749304 - DNA, 607 bp, Homo sapiens
agtattgaactgaaatagacagccaaaaacagataattcatccagggagggggaaaaggagcaagagccaaggacagaattaaatggtgcccagaatgtcatggagctgaggcatactggcatgaacagatgcctggaggggtccctaggagaagagcrggtgcttgtagcacttttattctttcccatagcgctttttaatgccagtcttatgttgtatcatgcagacaatcatggggtttgaagctggccagagatataatccagagacatggacactttgccttgtgttttcagcacccacttaatatcaaagtcagaattccccagcttcgaaatgtccatgtcctgactactcaggcttcacgagccagtgagtagggaggtggctgcattaagcgggcccttgaaggctatgagttccaaccaactgatctgtaagcatttcagtcttgggaagaatttccctccctgagctgcattatctggaaaggctcgaggggcgcatgcatgcatctgagaatcagttctggtcattgctggctaccatggctggtaaatagatggccctgtaggtatctcagagatgcccctctgagctgaaccc

SEQ ID NO: 749305 - DNA, 621 bp, Homo sapiens
tgtatttttagtagagacggggtttcaccgtgttatccaggatggtctcaatctcctgacctcgtgatcggcccgcctcggcctcccaaagtgctgggattacaggcgtgagccactgctcccggcctctgtgtatttttaaaaaatttttcaacttttattttagattgaggggtagatgtgcaggtttgttacaaggtatattgtgtgatgctgacttttggggtaggattgaacccatcgctaaggtagtgagcatagtacccaataagtagcttttcaaccctttcctccctccctcccscttcttgtagtccccagtgtcgaccgctccgatctttatgtccatgtgtacccaatgtttagctcctacttataagtgaaaacatgtggtatttggttttctgttttgcactcatttgcttaggataatggcttccagcagcatccatgttgctgcaaaggacatgacttcattcttttttatggcttttttatatatagtattcatatatatatgcaccgtattttctttatccaatccataattgataggcacctaggttgataccacgtatgctattgtaaatagtgttgtaatgaacacatgagtgcatgtgt

SEQ ID NO: 749306 - DNA, 646 bp, Homo sapiens
gcttcaaaggagatccgaagaacacacccacactctctcatatacacaaaggagaactgagcagaaagaagcggctgtaggaactgtgacggccactgtgggagttcccaggacacaggctggaatgcccagaacytagtccaaaatgccaatagtagggccatacaaatagagtcagaattagagcaacaggaagaataaaaaaagtagcaatccaggcttgacctaccactgggattagcctgagattgaaatactaaagtttcatgatgacccttgaaatagtaacaagaaaaggaagatgagtctgagactgcatcttgagacaaaactctttgggaaagagctgatatttcaggaacaaagggaccccttgactgccagcagaagcaaagacttctccttcctgatgtctgactaaccagccaaaccctttatcactgttcatgagcctgcatatactttacttcaggccacttctcttttcacaccaagcagatgaccaggtagaccacccaaagctctgccagttggatggatttccctgtcttcacatggcttttttctagggccactcctaagtggggctgtagtgaagcagccgtccatttcagcttgcctctacacatccagcctatctatcaca

SEQ ID NO: 749307 - DNA, 565 bp, Homo sapiens
agacagccacagctgcctttgctttccacatagaggagatgtttaattctgtaaaagcaagtcttatggaattcatttgaggcacagcacactcatggtgcactttttttttttttttttttgagacaaagttttgctcttgtcacccaggctggagtgtaacggcaccaacttggctcactgcaacctcctcctcgtgggttcaagtgattctcctgcctcagcctccatagtagmtaggattaaaggtgtctgccatcatgcccggctaatttttgtatttttagtagagacggggtttcaccatgttggccaggctggtctcgaactcctgaccttaggtgatccacccatgtcggcttcccaaaatgctgggattacaggtgtgagccactgcgcccaggcccacgctgcgctttcaatcagctttattactaacaaagctgatccttgttccccatttacctaactcctgcatctacttctcagttggctccaagcttaggaaggtaaacattaggtgttattcattagccacacagtctctttttgcagattcctttct

SEQ ID NO: 749308 - DNA, 568 bp, Homo sapiens
tatctttttgagggatgaggtacaaggtattgctggatcattaagcgatactgtatagttttaaaatacattaaataatattaatgcaaacagatataccctgcaattagatgcaaaattataattcttaaactttattaatgctattcatatttagaatacatcaaaagggagcatagtatttgaacttgaatgataatttgagaaaatgttttcctgatcataactttccattattattcccaggacactacctcacttcagcttcattcatcattcttgattttatagctacactttccaaaaatttattgattcattttatcagcaaacatttwttgtgctcctaatatgtatttaaagcaccatgctagtcatgattggaagtatatgatgactacagcatctttcattcctgcttcaaggatcaagatgataatagtacctgtacatgggactctaaagctaagtagaaagtaaatatcactgaagttgatgttataaactaaggaagccagagtattggcagagacaccaatgattatactgaagtcactgggaatgttgc

SEQ ID NO: 749309 - DNA, 625 bp, Homo sapiens
ttctctcggttgcctgttcactctgatgatagtttcttctgctgtgcagaagctctttaattagatcctctcacagtgtacattagaatggctataatcaaaatgacagataaaaacatctcttggtaagaacgcagaaaattggaactctcatacattgcttgtgaaggtataaaatggtacaagctttttgaaaaactgttcaacagttattataaagttaaatacacacttaatgtatacctcaaaaattctacttctgtgtatttactcaagatcaatgaatacatattttcataccaagatgtgaacatggccggcatggtggctcacacctgtaatcccaacactttgggagaccaaggcaggtgcattgcttgagctcaggagtttgagaccagcctcagcaacataatgaaactgygtctctacgaaaaatacgaaaaattagcagggcatggtggcacacacctgtggtccaagctactcaggaggctgagacgggaggatcgcttgagcctgggaggcagaggttacaatgaactgagatcatgccactgcactgtagcctgggtgacagagtgagacccggtctcaaataaaaaaaaaaaaaaagatgtgaaca

SEQ ID NO: 749310 - DNA, 651 bp, Homo sapiens
atgcgctacaaaacagcacatttatgatggcactttgaaaagatatgggctgtggtgtcacatattgacaattccttggccagaagcttaacagtgccagcagtgccagaagattaagaagacagcaaaaacagaaaagggagaagatggtgaagtagctatataacatgagcgagaatgctcctgattacaaagcagagaaattgactttttttcttagtgttttctatagtcattgctctatccctgttctagaattcaagtcatgataagaatttcttcacgttgacttcctgcattgctttcagacattgcaattaaagaatgcgaagaaagaacctcacagaggtaacagagtttgttttcctgggattctccagattccacaaacatcacatcactctctttgtggtttttctcatcctgtacacattaactgtggctggcaatgccatcatcatgaccatcatctgcattgaccgtcacctccacactcycatgtacttcttcctgagcatgctggctagctcaaagacagtgtacacactgttcatcattccacagatgctctccagcttcgtaacccagacccagccaatctccctagccggttgtaccacccaaacgttcttctttgttaccttggccatc

SEQ ID NO: 749311 - DNA, 621 bp, Homo sapiens
aaaaattgtttctggacacaagagattaagtttcatatttgcaatctaggaagtatagtgtagagagaaagatcatggactcttaccccagacgctggctccctcccaatcctgtgtctgcctctttctgagagaactctacaagttacatcccagtatcttaggtgcccatctgcgataatgggaataatgacastacctacctcactgggtttctgtggtgtttaaatatattaattttgcatgaaggatttagtacagtggctagcacatagtaaatacttttataatgttagttacctttattatttatattcctcttctttgcctatcagttttgtttaaaaaaaaaggctgctaaaaaaaagtatagagaacaaagttaaaaattaatggaaggaagaactcttagtctatgagttttaaaacatgaatgaatgctattattaaatgcctttaaaatcaattatatgatcatacatattttttaaatgaatagaatttatttcttggaacagttttaggtttacggataaattgagtagatagtacagagttcccctgtacagtttccatttctttcttttttcttttttttcttttttttgagatggagtctct

SEQ ID NO: 749312 - DNA, 624 bp, Homo sapiens
cagctatgtctctagctcagaccactctcctgaattctaggtccacgtatctagctgcttcctggatatctccacttgaattcctcacagatatcttaacctcaaaagtccaaaaattaaattcattgtcttttttttacactctgacttgcttctcttccagtgttccttgtattagttgaggacactgccrttcaccccattgcctaagccagaaataatcaggatcatctttggctccattacctctcacactgaatccatcaccaggaaatgtcatcttgccgcccacagatttcttaaatctgtcaatttctcttcatcagcacagcttccacctggcccagcctaccaacacctatctttgtattcctactgtagattcccaatcagtcttccagccagtcttgcccctttataatccatttctcccctctgtgagcagggtgagatttctgaattacacattaaatcataccattgctttacttaaagtcacataaatgttcttcattatctttagggtacactctctgtagtatgggtttgaagttctttatcatgtgactactactgtctttcttctttgctcttctatcaataccccatgaatgttatacccca

SEQ ID NO: 749313 - DNA, 507 bp, Homo sapiens
gtttctttgcctaagtacttgtaaagcattttgatgtattttctctgaaaagcatattaattcatttgaaaatatatttatttcttaaaaaccacattagcagactccgtctcaaaaaaaaaaaaaccacattagcaccttaattgtcctatcttggggttatttttytaaattgaggctaagtgttcaccactctattactaccagctcagtaaaagcttccctttcctctctatgctgtttccatctttgagtgattcaaaatatgctcatgttgcatgtgtagtgaaatatttttaagattgtagtttatagagtaacttagggcacagtgtgacattcttttaaattggcatgatctgagagagaattaaatttgctcatttttcacagtacaaggccatcagaaaggttgtctttcacaggcactatcacttagacttagaagagggactagagggaagaagcctagcctcaggtacccggtgaggaacacgcatggtccat

SEQ ID NO: 749314 - DNA, 507 bp, Homo sapiens
gtttctttgcctaagtacttgtaaagcattttgatgtattttctctgaaaagcatattaattcatttgaaaatatatttatttcttaaaaaccacattagcagactccgtctcaaaaaaaaaaaaaccacattagcaccttaattgtcctatcttggggttatttttctaaattgaggctaagtgttcaccactctattactaccagctcagtaaaagcttccctttcctctctatgctgtttccatctttgagtgattcaaaatatgctcatgttgcatgtgtagtgaaatatttttaagatygtagtttatagagtaacttagggcacagtgtgacattcttttaaattggcatgatctgagagagaattaaatttgctcatttttcacagtacaaggccatcagaaaggttgtctttcacaggcactatcacttagacttagaagagggactagagggaagaagcctagcctcaggtacccggtgaggaacacgcatggtccat

SEQ ID NO: 749315 - DNA, 507 bp, Homo sapiens
gtttctttgcctaagtacttgtaaagcattttgatgtattttctctgaaaagcatattaattcatttgaaaatatatttatttcttaaaaaccacattagcagactccgtctcaaaaaaaaaaaaaccacattagcaccttaattgtcctatcttggggttatttttctaaattgaggctaagtgttcaccactctattactaccagctcagtaaaagcttccctttcctctctatgctgtttccatctttgagtgattcaaaatatgctcatgttgcatgtgtagtgaaatatttttaagattrtagtttatagagtaacttagggcacagtgtgacattcttttaaattggcatgatctgagagagaattaaatttgctcatttttcacagtacaaggccatcagaaaggttgtctttcacaggcactatcacttagacttagaagagggactagagggaagaagcctagcctcaggtacccggtgaggaacacgcatggtccat

SEQ ID NO: 749316 - DNA, 489 bp, Homo sapiens
aaagaaataattttcacataaagcgatctttcttcctttcttcattgtgagctgagagaggattgtagcaatacaggttgagcaattttcttttttatgaatctcgtgctcaatttatgaaagccattttgcaacccatttacatgcagtaaacctttgccttaaagttctgtcatttaccttgatcatgattatttatagtccttttagacaaggctctttactggtttagctctcaagcacagcactgtcacaagccagttttctacgtctttcaaggcagggtaggaagctaagacagggccagtcttgtagctcgctgtgaggaatgggggckttgggtaatgggaagaacactagttggcatcaggagtcttgcattcgcaacctctgcactctcactctgtaatcctggccatttatgcttctttagtttcagtttgttcacttatagaaatggagcgacactttcatcacaaggctataaag

SEQ ID NO: 749317 - DNA, 604 bp, Homo sapiens
gctgagcagaagcattttagtttaatatagtcacatttgtctatttttgattttgtttcatgtgctgttgaggtcttagccataaaattttggcctaggccaatgtcctaaaatgtttcacctatgtttcattatagtagttttgcagttttgggtcctaagtgtaagtctttagtacattttgagttgatatttgtacatggtgagagaaagcagtctagtttcattcttctgcrtatggatattaagtttcctagcaccatttattgaagacagtttcctttccctctatcagtgttcttggtacctttcttaaaaaattatatggctgtaaataagtggttttatttctgggttctctattctgttccattggtctacgtgcctgtttttataccaataccttgttattttggttactgttagccttgtaatatattctgaagtcaggtaatataatgcctccagctttgttcttttggctcaagattgctttatctgtttggcctcttatatggttccatatgaatatgaggatagatttttttttctgtttctgtaaaaaatggcaatggtattttgataggaattgcattcaatcaag

SEQ ID NO: 749318 - DNA, 601 bp, Homo sapiens
tcttttgtttctttcattctttcttattgtgtatcattttggtttggtggtttttttgtagtggtaacattggagttctttctcttcctcatttgtatgtttaaaactctgtcagtgagttttatactttcatgtatttcacaatgatagatataagccttttgtttccaggtgtaggacacccttaaacatttcttgtagggatgatctaatagttataaattccttcagtttttgcttgtctgggaaagactatttcttcttcattcatatagcaaaactttgctgkgtatagtaatcttgattgccaatttttttttaattttcttttagccctttgaatatatcatcctatactctcctggcctgtaagatttattctgagaaatccagtgccaatctgctgagagttctcttacatataacaagacaccctgctctttgtttttagaattttctatttgtatttgcatttgacattttgactataatgtgccatgaaaaacaccttttgaatgtatccatttgagaatctctaagtttactacttctggatatctaaatcttgctagacttaggaggttttcagttattattttgt

SEQ ID NO: 749319 - DNA, 672 bp, Homo sapiens
tgtatctctttgcctttggaacatcccaaatttaaatattttattgctttatgatgttctatatgtgacatagattttgtgtattcttttaaaaactttttatctgactgggttatttcaaaaactgtctttaaattctaaaattctttattctacttaatctagtctattgttgaagctcttaaatttattttttgtttcatgtattaaattcttcatttctgggatttctatttgattcttttttatgatatctatcactttgttgaatttctcacgtaggacatgaataagttttcaatttatttgtattattttgtctgtgtctttttgttttcatggaacttctttaatatcattattttgaattcttttttctggcatttcatactttttttattgaaatctgttgctgaaaaatcactgggatcctttggatgaaacatatttccttgcttttttatttttcttgagttcttatattgatatttgtgcatatggtgtaacrgtcgcttcttccattttgggatttgctttcttagaggaagacttttttataaagatgtatttatgctgttggctgagcagggcactttaaatttgattatgggtgcattaagtagtatagtcttcatatgccttcttcagctgtaaagaacagcaatgatgtct

SEQ ID NO: 749320 - DNA, 672 bp, Homo sapiens
tgtatctctttgcctttggaacatcccaaatttaaatattttattgctttatgatgttctatatgtgacatagattttgtgtattcttttaaaaactttttatctgactgggttatttcaaaaactgtctttaaattctaaaattctttattctacttaatctagtctattgttgaagctcttaaatttattttttgtttcatgtattaaattcttcatttctgggatttctatttgattcttttttatgatatctatcactttgttgaatttctcacgtaggacatgaataagttttcaatttatttgtattattttgtctgtgtctttttgttttcatggaacttctttaatatcattattttgaattcttttttctggcatttcatactttttttattgaaatctgttgctgaaaaatcactgggatcctttggatgaaacatatttccttgcttttttatttttcttgagttcttatattgatatttgtgcatatggtgtaacggtcrcttcttccattttgggatttgctttcttagaggaagacttttttataaagatgtatttatgctgttggctgagcagggcactttaaatttgattatgggtgcattaagtagtatagtcttcatatgccttcttcagctgtaaagaacagcaatgatgtct

SEQ ID NO: 749321 - DNA, 499 bp, Homo sapiens
aaagatactacttaaagcccttaaccttatgaaattagcatagaaatgagtatgtatagaaagaggctcaaatactggatactgacacataagattgagagaaaaggtaaaagcaaaagatgcccactgatcattcagaaagaaaaaaaaaaactaagagggtrtggcattctagaaaccaaccagtatttcaagggatagaaattgttcccttgcgataaatgctgttgctaagtaaagtatgatatggcctgagcagtgtgaggaatggagtcagagacatcataatgagaactgtggcagtctgccctaaatttaatagtggatatgaaatgaagaaaatgttacgttaagtgaatttttaagcataagaagactggttggaagtagaggatgaggaaaagggagtgattctaatgacactcaggtatttggcttaagtatctgagtcagtggggagacctctacaagatgagaagtatcaggtaaagatcagtga

SEQ ID NO: 749322 - DNA, 594 bp, Homo sapiens
ttccagttctcactcttttttctgttatacaaaagactgtatcctgagcagttggcatcagaactttcagtaacccgagtttacttaccatgtttctgccatctcttgaaggaaattccctacaatgcggacctttgattccaatgctgttagaatctaacctggccaggagaggctgcttctgaaatcacattgccaaggtacagacatcctttcaaagtctatttgagggtctgttggccaacagtagagaaatatttgaagcaggatcccatagctgtttctttcttattttttcatccagaaacaacaattattaagacaaatgtgtgaatgatttcatgaatgcacacatggcaacagaattytatatgctccatcaactctggaaagcagaaggatgtgactaagagcacaaaaaataatgtcccattcaatatatagttactggctgcattatttactgttttattttattttgttttttaattgtggtaatggcacttaatgagaactaccttttaaacaatttttaagtgtccgatacagtatcattaactgtaggcacagtgttgtacagcctttagaacttat

SEQ ID NO: 749323 - DNA, 594 bp, Homo sapiens
ttccagttctcactcttttttctgttatacaaaagactgtatcctgagcagttggcatcagaactttcagtaacccgagtttacttaccatgtttctgccatctcttgaaggaaattccctacaatgcggacctttgattccaatgctgttagaatctaacctggccaggagaggctgcttctgaaatcacattgccaaggtacagacatcctttcaaagtctatttgagggtctgttggccaacagtagagaaatatttgaagcaggatcccatagctgtttctttcttattttttcatccagaaacaacaattattaagacaaatgtgtgaatgatttcatgaatgcacacatggcaacagaattctatatgctccatcaactytggaaagcagaaggatgtgactaagagcacaaaaaataatgtcccattcaatatatagttactggctgcattatttactgttttattttattttgttttttaattgtggtaatggcacttaatgagaactaccttttaaacaatttttaagtgtccgatacagtatcattaactgtaggcacagtgttgtacagcctttagaacttat

SEQ ID NO: 749324 - DNA, 551 bp, Homo sapiens
catactgatagttgaagggtagtgaaggcagagaattttattgagtgaccaaacagctctcagcggagaagagatgggagagttgggttgtctctcttgaagtcaggtcatctctctgtgtggctgagtctgcagcttttataggcataggataaagaagtatgtactgatccattcaagagtttggaaaaaggttaaaacaaaggcaccagtcaaaggtgggaacagtgtaaaaacaattaggaaagggtaggtatatgtaaaataggtgaagggtgaagctcaatcaaaggaaagcactacaaagaggaagacaggttctctatctggtctgtgaatttgacttgtagcttggtcttcaggctttgaactgtctttggcttgaagatgaggtttcatgggatrcccacccctggtatgcctaggatttctctgcctcctgcctgtgtcatttcctcctctgaagaggtgcatctaactgctgttagaatagggatcatgaccgatattagctactccctgctgacaggggatgctgttttgggaaaacg

SEQ ID NO: 749325 - DNA, 545 bp, Homo sapiens
ggtatcaatataaaaggggatcccattaaaagaacagtaggctggaacttgggatatgactaggaaaacagtcagaggtgaggctgtaagggctttttagggctgtactgaggagcaaatacctcatcaaagaccaaaccacttactttcatgagcactgggaaactactgatttttttaaagagagtaacatgattaaagctgttttaggaaaattaatctgactataatcacggtttgggactcagacatgtttttatactcttaattcttcagcaaaaagattcagtggatatctgtctgagtcggttaagaggagtcaccacatgacttccctttcaaagggtggagtctcccattcaaaaaaaaaawttttaagtgatccccagagcacctttcatttccttgtaaactgttgagatcctcaaagatacgaactctatcgtacacaactagcagtcaccacaggagctagaatagtgtgttacacatatttaactaatattcaaagcttagattcaaagtggaaagaggattcatgcaat

SEQ ID NO: 749326 - DNA, 608 bp, Homo sapiens
gttgatagtaatcaaaacagtgcttttcttgatagtgctgggattgcagaatatggtgtctactgaatgcgtatcacatccacatcatcataaagttgaaaagccctaaatagaaaaatcctaaattggggtcatttaataccttttttttttttttttttgagatggagttttgctcttgttgtccaggctgcagtgcaatggcatgatctcggcccactgcaacatctgcctcctgggttcaagcgattctcctgcctcagtctccccagtagctgggattacaggtgtgcgccaccatgcccagcgaatttttgtatttatagtagagacggggtttcactatgttggtcaggctggtctcgaactcctgacctcaggtgatctgcctgccttggtctcccaaagtgctgggattacaggtgtgagctaccaygcccggcccatttaataaatattgatgtgtactttctaatatatgccaagtactatttctacgtaccagtcatagtaagttctgtaaaaaaatagtgcagaggaagggaagaaacagtgacggtggtgggcaatagagtgtgctattttgtgtaagatatcctttgagctga

SEQ ID NO: 749327 - DNA, 605 bp, Homo sapiens
tgcaccaccacgtccagctaattttttgtgtttttagtagagacacggtttcaccatgttggccaggctgttctcgaactcctgaccttgtgatctgccagcctccgcctcccaaagtgctgcaattgcaagagtgagacaccgcgcccagcccaggctggaaccatttttatttctcttttggaaaacccacagttttccaaaatgcttttatcttttgggaaaagtatagttttcctgtgataaaatgaagaccatcgtttcttgtctgcttcctaaatgtctgacgccatgctaaacacttgatatattttatctcactcactgtattgtgaggttggctcaggagaaagaattaaccattgttaaataaaatgtaacggaaacaataaaagyttatgttgaagtcacaataatttttataattgctaataattaataccaagctatgatcatttttaatttagcaataaaacttctttatatagtgagtcggtcattcaattcaccaggacacacaattaaatccatgcagctacttgccctggatcacgctacgcagagtcagttgcctgcgtgaggagcagttcaatcaaaaatcgatg

SEQ ID NO: 749328 - DNA, 651 bp, Homo sapiens
ctatgtggctctgagcaagtcctttaacttcactggctcttcagtctctgtgaaatgagtgagctaaagtagatgattcctgttttggttgtctattgctatgccacacaccactccaaaatgtaggtgctgaaaacaataatgattcattatttctcaggatggtatggattgtctgggctcagctggctagttcttctgctttatatggtattggctgggatcactcacgcagctgctttcagaggggtgmtcagctggagctgcaacatccaagatggtgttgcccacttgtttagcagctatgtttgtcaacctcaattctaccctagggagaggaactcttatcctctagggctagaataatccaaacatgtttacgctgtcttcatcctgaaatccatatagaccctaaggcacatttgagacctgacaagattcagagttgaactgaaaggaatcactgcgtcatgcaagaaagcaaaacttgatctgcagttctttctctacacagtccctcctgctggataacctgaacttccttacatggttccaagaggatgaaaatggaagcttgaaagcttcttaaggcctagtccagatgtcattcaatattactttcattgtagaatatttatcaaagcaagtcag

SEQ ID NO: 749329 - DNA, 631 bp, Homo sapiens
  misc_feature 611, 612, 613, 614, 615, 616, 617, 618, 619, 620, 621, 622,623, 624, 625, 626, 627, 628, 629, 630, 631: n = A,T,C or G
gggaaccggctcccaatatttcagcataggttctttctattttccataagtgttggctggctgagaaataaaaagaaagagtacaaagagaggaattttacagctgggcctccggggctgaatcacatatcggtaggaccgtgatgtccacctgagccacaaaaccggcaggtttttattgaggatttcaaaaggggagggggtgtaaaacagagaataggtcacaagatcacatgcttcaaagggcaaaaaggagaacaagatcacatgcttctgaggcatgatcacaaagatcacaaggcaaagggcaaaatcaaaaactcctgataagggtctatgttcagctgtgcacstattgtcttgataaacatcttaaacaacagaaaacagggttcgagagcagagaactggtctgaactcaaatttaccagagtggaatcttttccacctgttccctaaaatcactgttattctgttctttttcaaggtgcactgatttcatattgttcaaacacacgttttacaatcaatttgtacagttagaaacaattacagtggtctgaggtgacgtacatctcagctaacaaagataacaggattaagagataaannnnnnnnnnnnnnnnnnnnn

SEQ ID NO: 749330 - DNA, 505 bp, Homo sapiens
caatatcactagattataggaatttttcagctccattataatcttatgggactaccattctgtatgtagtctatcattgaccaaaatatcattatgcagtttatgactcattatgtataaaatgtaactttatatataaattttataaaatgcacgtaaacatgaagtaatatttaaaaaataatttataaaattacaaaataaagttataaattatgttaatatatataaatgcactggattttattggtagcatgaaaatagaactcaccttgagccacttacgcactgttggttgaacaggaaaataatactgaacttgtgataacctttctgatcaacagtttaaacccygagatccattttattcttttcagtcaaaaaaagtgatcgtggttattttcttgggagaattcctagacatgaactgtctgggttaaaagtatgcacaaaagcttctacactggtagaagtaggttggaaggccaggtgtctgtgggaaagg

SEQ ID NO: 749331 - DNA, 658 bp, Homo sapiens
aaaccaggcctcttaagctcagaaacagtctgtggccccagcaagccccagggcccgggaccccaaatgcagaagaaatgcctagtagccacagggcccagaggggtgtgcagtactgggagacagagatggcactaattcccaggacagtggcggccaccagggcatgcccaggagctcaggggtcttggtggtacccgggaagctccttccctcacccagcaagcagctgaggctgcggagaccaggtacctgctcaagaacattcatctgacaaatactcattattgagtgcctacggtatgctgagctgttccaagtgctctagatggggctggctgtgatcaaaacagaaagccctgccctgaaggactgggtagacctcagaaatacctcttataagtgtgagagtttgctttatgcttttctgtgtataaatgggcttrcattgctttgaaaattaggaaaaaggttattaaagaatgttattagaaattgtttttgaataaatatccacgaggaaatagaaacatgataaggaaataccagctaattacacatccgcaagtgcagtggactctgtactctgatgaggcctcaggaggtgtggtcagagaatcaacaccagatggtcctagaagaactgattgtgaactgt

SEQ ID NO: 749332 - DNA, 518 bp, Homo sapiens
gctcattggctacctgatgggagccctgcctgatacagtaggacataggacctgcttcctaggactattgtgacaatgaaatgagtgaatacgtgtaaggcaggtgctccatgtagctagcacatggaagggggattagccctctttcccagtgcatttgcaaacgccctctgcagggctatagtgtggccagcaaacactgtgtttggcggggtagtttgtccagtagccccacctccattctctccccagttttggctggcttccaaagggaaacgagcatattcaataatgaagtcgtgatttgtatactgggaaaaagagaaaaaaatccattaagttcactgaaggtgcaaatraagggtgaagaagcatacacagaagtatgtatatatttatttatcctaagaaaatatattaagcacctgccatgtgcaaatgatttggcaatgaataatatagatgtggccccatgctctcatagagctccaagaggaaagactcacagtgaaacagag

SEQ ID NO: 749333 - DNA, 592 bp, Homo sapiens
tatggacttgcttattctggccattttatataaatgggatcctataatacatgaccttttgcatctcactttgacttagcatcttgctttcaaagttcatccatgttgtagcatgtatagtacttccttttttatggctgaataatattccattgtttggatatatcacattttgtttatccgttcatcagttgatggacatttgggtagtttccacattttggctcttaggaatagaactgctgtgaacttccatgcaccagtttttgttggmatacctgttttctatactcttggatctatacagtacctaggagtggaattgctgggtcatgtggtaactctacctttgaccttttgaggaattgcagactgttttccaggaacagagatttttaagagtgaaatgttttgagagtggagaggaagcccagacattggtgctgccagggggtgagaaggttaaacaaggagctcaaaagggggagaggggaaggttcaacacaaattacccaactttccagtctgtcccagaagctggatgaccatggtagtcaacagccacgtttctccccagatctttctcatctct

SEQ ID NO: 749334 - DNA, 597 bp, Homo sapiens
caccatttattaaatagaggctcctttccccattgctagtttttgccaggtttgtcaaaaatcagatggttgtggatgtgtggtgttatttctgaggcctctgttctgctccattggtctatatatctgttttggtaccactaccatgctgttttggtcactatagccttgtggtatagtttgaagtcaggtaacatgatgactccagctttgttctttttgcttargctttgcttggctatacaagctcttttttggttccatatgaaatttaaggtagttttttctaattctgtgaagaaagtcaatgatagcttgatggggatagcactgaatctataaattactttgggcagtatggccattttcatgatattgattcttcctatccatgagcatggaatgtctttccatttgtttgtgtcctctcttatttcctttagcagtggtttatagttctccttgaagaggtccttcacatcccttgtaagttgtattcctaggtattttattctctttgtagcaattgtgaatgggagttcactcatgattttcttctgtgtttgtctattattggtgtatagaaatgcttgtgat

SEQ ID NO: 749335 - DNA, 631 bp, Homo sapiens
gagggcttaaagacaaagtgggctgtgtatttccacttagtcactttgcggtgagcttgatcactttaatgtggcaggatatggggtcactcaaagtgagtaatgagatgtattcaaacaacataagcttaaatatatatctggccacaaaggttccccagaccccaagggtcagttttctctcctttgtggccaagttggctttgagttattgttataaaatgyctattttaaacagtaaataagtgatcatactaaacagctgcagggcacggcctagaaaaaaagattgacagagcagctgtcagctctgccttctatcactgtgctggtctcaaatccaatgtgcctgtttaaatgggacacattagcagctttctagtgactgataagattgccacacagtaatttagaacatatggtgcctctctactggagacagatcagatttcagaagatgaaatttattaggaatggggtgatagcctgggcattcccttagtagcaaatagtttacactattgaaaacacagaaaaggaattgaggacatgctagagtactagacagtgcagaatgttatcattctacttttagggggagacgttgctggacatttgtttctaatggtaa

SEQ ID NO: 749336 - DNA, 654 bp, Homo sapiens
attttctaccttagaaatgcaacatctattatatttcttctaagtgcatgttaacatactataagcaatttaacttgtttttacttgtatattaaacacaatactgactttgcaaaactatcaattcactttttcattgcttaaaaagtcaattttcttctttaatcactaaaagatggttttacttctactttctggtattgtgtttttaagttataagatctgacattatcagagattccacaattcttaatttcmacaatttaagagtaattatgaatctcaaggtaaaacaaatgtgaatcaaacaattaacacatagtttgttttctcttgacaaatttaaagatttatgtgaaataaaatcaagtctagaaaattgtttctcagctgggcatggtggttcatgcctgtaactccagcgctttgggagcccaaggcgggcagatcgcttgatgtcaggagtttgccacaagcctggccaacatggtgaaaccccatctctcctaaaaatataaaaaattagccaggcatggtcgtgcacacctctattaccagctactagaggctgagacaggagaatcacttgaacctggaaggcagaagtttcagtgagccaagattgtgccactcaaaaaaaataatgtttctttg

SEQ ID NO: 749337 - DNA, 654 bp, Homo sapiens
attttctaccttagaaatgcaacatctattatatttcttctaagtgcatgttaacatactataagcaatttaacttgtttttacttgtatattaaacacaatactgactttgcaaaactatcaattcactttttcattgcttaaaaagtcaattttcttctttaatcactaaaagatggttttacttctactttctggtattgtgtttttaagttataagatctgacattatcagagattccacaattcttaatttccacaatttaagagtaattatgaatctcaaggtaaaacaaatgtgaatcaaacaattaacacatagtttgttttctcttgacaaatttaaagatttmtgtgaaataaaatcaagtctagaaaattgtttctcagctgggcatggtggttcatgcctgtaactccagcgctttgggagcccaaggcgggcagatcgcttgatgtcaggagtttgccacaagcctggccaacatggtgaaaccccatctctcctaaaaatataaaaaattagccaggcatggtcgtgcacacctctattaccagctactagaggctgagacaggagaatcacttgaacctggaaggcagaagtttcagtgagccaagattgtgccactcaaaaaaaataatgtttctttg

SEQ ID NO: 749338 - DNA, 654 bp, Homo sapiens
attttctaccttagaaatgcaacatctattatatttcttctaagtgcatgttaacatactataagcaatttaacttgtttttacttgtatattaaacacaatactgactttgcaaaactatcaattcactttttcattgcttaaaaagtcaattttcttctttaatcactaaaagatggttttacttctactttctggtattgtgtttttaagttataagatctgacattatcagagattccacaattcttaatttccacaatttaagagtaattatgaatctcaaggtaaaacaaatgtgaatcaaacaattaacacatagtttgttttctcttgacaaatttaaagatttatgtgaaataaaatcaagtctagaaaattgtttctcagctgggcatggtggttcatgcctgtaactccagcgctttgggagcccaaggygggcagatcgcttgatgtcaggagtttgccacaagcctggccaacatggtgaaaccccatctctcctaaaaatataaaaaattagccaggcatggtcgtgcacacctctattaccagctactagaggctgagacaggagaatcacttgaacctggaaggcagaagtttcagtgagccaagattgtgccactcaaaaaaaataatgtttctttg

SEQ ID NO: 749339 - DNA, 653 bp, Homo sapiens
aaccctcccacctctcttctccaaggctagtcccacttctaaaaaccactccttgtccctggtggtcttctagtttctcctataaggaagatttctaatataaattttgggactctgttcccttctttaggcacctgggctcaccaatcagaaagacataatttttgcctgaactcccatttgggggggcattatcaggaattttaggatccatcctcagactagcaggcctaacaaaggctattcccraagctaggatatggggagcctcagaaattatatccttcctattcatatgatgagaagtgaggacaaaagttgtcactcttccaaccctggagatcccttccctccctcagggtatggccctcgactccattttgaggcataactttataggacaagggtaaggtcccaatacccacaggagaaaatgcttaggactctaactaacaggtttcaagaatgcttcagtaagggccactaaatccaaccttccttggtcccgtttgtggtctaggaggaaaactagtgtttccgctgctgcttcagtgagtgcaactattctgaacacagggtccagggactgttgtaggttcttggcaggtgggaaaaaatgggcagttttttctttcaggtgggaaacactcagg

SEQ ID NO: 749340 - DNA, 476 bp, Homo sapiens
atacatgaagccaaccagtggaaaatacttaagaccctccaccaaacttttcatatgggtattgagaacactcaacaaatggccaaagccctatttacagggccacatctcctttggaccatccggcaagtagtcaaagcctgtgaggtatgccaaaggaataatrctttgatccatcataagttccctctgggagaacaaagaatagggcactatcccagagaggactggcagttagacttcacccatacgcctaagtcaaggggatttctttgctaacttaacctaccactcccattatgaaggaaaagaccctttccaacttctaaatatgcaatcattagctgacttccccatctctgatagaaccaaaaataccttaacaggatgagcaatccagcttttacgctcttacatttctaacctcacctattatatgagcaatgaaaagcgcatacatagcctgtaaccacgaa

SEQ ID NO: 749341 - DNA, 643 bp, Homo sapiens
ccagatttttaaaataacatttatgtcactctcttcaagtcattttagaccctcactaatacctactgtcatttcaaagccactcctagatcacaacactttacttccagttatcaaaatctttattatctatatactgtggcataacaatccatacagtgcttagcaatttaaagcaataaatatttattaattcacaaagcttcatattgtgaagaatttatgagtaggttctctgcattgcactggctcaggattcatcatatagctggagtactatgtaagaggaaaatatgtatgttgtagataccaagaattggggatcatgggacaatcttgaggactgcctgccacagaagcaaaatgataccagctgggtattcagatatacctaatggaaggaagaatatcagaaatggtaaaaacataattaaatatrtaagacttttcttattattaaatacctttagaggacaattgactttaattaaacatagtaacaatatagtgtccttaatatgacatattatttgatgcttatgtaggcccatttcttacattgagtctaattactctatttaaaatgttaactaaacactccaagatgtaaataaaggtaatatatttaaatattatatgacaa

SEQ ID NO: 749342 - DNA, 576 bp, Homo sapiens
ataaatcctttaaatagctatagcagggttttaaatatagaattctattaatttaaaataatagcatataaaactttatcacagatgctaattgtgacattgaactcagtaatttcagaaacatgaatgtattctctgacgtattgttttaaataatgagactttggtatgaaactaaaaaattatttagaaaaattaaatctaaagaaacaaaacacacacacacacacacacacacacacacacmccccacatacacagctactctcatagaaaactcacagttacaaactgaaacctcaggagcatcttcttctcgaagccatgggagatgaacttaatagttgcctctgacttttcagatgaacaattcaaacttctcatcatgattgtattcattcaacaaacacatagcccaacactgtgccagaatggttccaagcacctcaacaagttggctcattagttccttataacaaccttatagaattagtttagagtgatttttaagaaaatgcagttcttgtttcatttttaaacatccacccatttgcttgatgattgtagtacagagtg

SEQ ID NO: 749343 - DNA, 639 bp, Homo sapiens
ctttagcaacaaagaaaagttcttaacagaaataaaagattgaaaaaatctacaaagtaataacaatttgatctataaccaagttgtcaaaactgataaaggaagttaaaaaagagaatgatactcttatattactaaaaagaaaaaatagtcaatccagtattagctatctagaaaatctatttcatgcttgaatgtaaaataaagatatttatgtgcaatgagagaaaaggaaatgattattaagagacaatttttaagtaaatttctaaaaktcgtgctgcatgaaaaatcaaaatgaacctggaaataattttgatgtaaaggaaaaactctgaacaataaactaagcaattctgaacagtatgcctctatagaacaaataaaatattatcagtttattaggttaaaacaagaaatgatgtataaactggacaaaacaatatgtaaattaacatgtaaatggaaggacatgctttttccgaagaatgccttttacattgaagtcactttcattcttttttaaaagtattttacagacatatatttcttaatattccctactttcagggagtgaaaaatgagcaagtctcacaatagacatgtaaattgggatggagatattctcccttcttgtat

SEQ ID NO: 749344 - DNA, 639 bp, Homo sapiens
ctttagcaacaaagaaaagttcttaacagaaataaaagattgaaaaaatctacaaagtaataacaatttgatctataaccaagttgtcaaaactgataaaggaagttaaaaaagagaatgatactcttatattactaaaaagaaaaaatagtcaatccagtattagctatctagaaaatctatttcatgcttgaatgtaaaataaagatatttatgtgcaatgagagaaaaggaaatgattattaagagacaatttttaagtaaatttctaaaatwcgtgctgcatgaaaaatcaaaatgaacctggaaataattttgatgtaaaggaaaaactctgaacaataaactaagcaattctgaacagtatgcctctatagaacaaataaaatattatcagtttattaggttaaaacaagaaatgatgtataaactggacaaaacaatatgtaaattaacatgtaaatggaaggacatgctttttccgaagaatgccttttacattgaagtcactttcattcttttttaaaagtattttacagacatatatttcttaatattccctactttcagggagtgaaaaatgagcaagtctcacaatagacatgtaaattgggatggagatattctcccttcttgtat

SEQ ID NO: 749345 - DNA, 658 bp, Homo sapiens
atttatggtatctaacaacaattattttttaaataatgaataatgaggcaaatcagagtgcttatacggaaaactaggtttatatttcttcatggttatttaaatattctttttctctcttttgaaattatcctgtcaaacagttagtagatctccaacacacccaaaaaatcttgacagtaaacatactgcaatactgcattaatttaaaaaaaatcactaagagaaatcctttttggtattttctctgtcatatgcccattttttttttagctcttaaagatttctatgcaaaaagagggtcaggactaaataagtttgggaaatggagcctactatattccatccatggaaaatcacaacccacaaaacaagggttctgaacaatctttcagtgaataagtgttcagctttgtttatcctactttttacaagtatgctttaccagagaacagkttttaaagtaacctctctctttacatcctgtagatatagaattccacagaaaaccctctgaaatgctgttctgtgctaaacaagaactccactgcatataacctaagttactttgtaaccttcttgcctattcaagcacagacagtcaaggtaaatctgaatccactctctagagtgtttgtatgtatgaattatctctcta

SEQ ID NO: 749346 - DNA, 630 bp, Homo sapiens
ctctatgtgtccatgtattctcatcatttagatcccatttatgagtgagaaacatgtggtatttggttttctgttcctgtgttagtttgtgaagggtaaggtcctccagctccatccatgtccgtacaaaggacatgatctcgttcttttttatggttgcataacattccattatgtatgtttaccacattttctttatccagtctatcattgatgggcattcaggctgattccatgtctttgctattgtgaatagtgctgcaataaacctacacgtgcatgtgtatttataatagaacagtttatattcctttgggaatatacccagtaatgggattgctggttctaatggtatttctgtctttaggtctttgaggaatctctacaccttcttccacaatggctgaacgaatttacactcccaccaatrgtataaaagcgcacatttttatccgaaatctccccagtgtctgttattttttgactttttatcatagccattctaatttgcgtgagatggtatctcactgtggttttgatttgcatttctctaatgatcagtgatgttgagctttttgtcatatatttgttggtcacatgtaggtcttcttttgagaagtgtccattcat

SEQ ID NO: 749347 - DNA, 630 bp, Homo sapiens
ctctatgtgtccatgtattctcatcatttagatcccatttatgagtgagaaacatgtggtatttggttttctgttcctgtgttagtttgtgaagggtaaggtcctccagctccatccatgtccgtacaaaggacatgatctcgttcttttttatggttgcataacattccattatgtatgtttaccacattttctttatccagtctatcattgatgggcattcaggctgattccatgtctttgctattgtgaatagtgctgcaataaacctacacgtgcatgtgtatttataatagaacagtttatattcctttgggaatatacccagtaatgggattgctggttctaatggtatttctgtctttaggtctttgaggaatctctacaccttcttccacaatggctgaacgaatttacactcccaccaatggtataaaagcgcacatttttatccraaatctccccagtgtctgttattttttgactttttatcatagccattctaatttgcgtgagatggtatctcactgtggttttgatttgcatttctctaatgatcagtgatgttgagctttttgtcatatatttgttggtcacatgtaggtcttcttttgagaagtgtccattcat

SEQ ID NO: 749348 - DNA, 663 bp, Homo sapiens
acatggaactcaataaataaataaataaataaataaacacattatgtcattacaaagtaggcaaatgacataaacagacatttatcaaaagaagacatgcaagttgccaacaaacattaaaaaatactcaagatcactgaagatcatagaaatstaaatcaataataaagtgtgtattagtctgttctcatgctgctatgaagaaatatcccagactgggtaatttataaggaaaagaactttaatggactaacagttccgtacagctagggaacattcaggaaacttacaatcatggtggaaggggaagcaatcatgtccttcttcacatggcagcaagaaggagaagaatgagagctgagcaaatgtggaatccccttataaaaccatcagatcttgtgagactcactcactatcacgagaacagcacggagggtaaccaccctcatgattcaattacctcccaccaggtccctcccatgacacatggggattatgagaactaaaattcaaaatgagatctgggtggggacacagccaaaccacatcaaaaagtgactcatttgacttagtcttccctatcttctctcatttagggtaacattatttccttgaatcaaaagggtatctctatagactttgagttcatcttgacgtctttga

SEQ ID NO: 749349 - DNA, 597 bp, Homo sapiens
gagagggctgttgcaaccttacagcatgatacattttgagaaatatggttttgaacatttttattaaaaatataggtatcaaaatctctaccatttgtgtcatgttataataattaactataaaactgcattattcagaatacataacagtaaaagttaatattaaaaagttttaaaatgtatttgcttttgcatatattatttcaattgatcataacaaccagatatgataaccggggccaggtatttctactgttatcattagaaatcaaagaaaactaacatatttgatggttttaaaaattgtaaaaattataagtgtacatataaatattaacttgtaagtcatcttgcaagtattataatcaaatttcattttcaaatcgtgatgaatctaacatgatacctaagtttgtgtaytgaaaaatgtgtatacgtgtgcacacacttttaatttagatttttctcattctgagtgataatgcagcaaaatttaaagagattacactataattatgtttaaaaccttagttgtacttttgaaacaaattacaggttgagtcatgataacaggacaaaatatacttaactgctgaa

SEQ ID NO: 749350 - DNA, 437 bp, Homo sapiens
gtgtctatttgattcttctctcttttcttctttattagtcttgttagcagtctatcaatttggttgatcttttcaaaacaccagctcctagattcattgattttttgaagggttttttgtgtctctatctccttcagttctgctctgatcttagttatttcttaccttctgctagcttttgaatttgtttgctcttgcttctctagttcttttaattgttaggktgtcaattttaaaagtttcctgctttctcttgtgggtattcagtgctataaatttccctctacacactgctttaaatgtgtcccagagattctggtatgttttgtctttgttctcattggtttcaaagaacatctttatttctgccttcattttgttatttacccactaggcattcaggagcaggttgatcagtttccatgtaattgtgctga

SEQ ID NO: 749351 - DNA, 437 bp, Homo sapiens
gtgtctatttgattcttctctcttttcttctttattagtcttgttagcagtctatcaatttggttgatcttttcaaaacaccagctcctagattcattgattttttgaagggttttttgtgtctctatctccttcagttctgctctgatcttagttatttcttaccttctgctagcttttgaatttgtttgctcttgcttctctagttcttttaattgttaggttgtcaattttaaaagtttcctsctttctcttgtgggtattcagtgctataaatttccctctacacactgctttaaatgtgtcccagagattctggtatgttttgtctttgttctcattggtttcaaagaacatctttatttctgccttcattttgttatttacccactaggcattcaggagcaggttgatcagtttccatgtaattgtgctga

SEQ ID NO: 749352 - DNA, 437 bp, Homo sapiens
gtgtctatttgattcttctctcttttcttctttattagtcttgttagcagtctatcaatttggttgatcttttcaaaacaccagctcctagattcattgattttttgaagggttttttgtgtctctatctccttcagttctgctctgatcttagttatttcttaccttctgctagcttttgaatttgtttgctcttgcttctctagttcttttaattgttaggttgtcaattttaaaagtttcctgctttstcttgtgggtattcagtgctataaatttccctctacacactgctttaaatgtgtcccagagattctggtatgttttgtctttgttctcattggtttcaaagaacatctttatttctgccttcattttgttatttacccactaggcattcaggagcaggttgatcagtttccatgtaattgtgctga

SEQ ID NO: 749353 - DNA, 613 bp, Homo sapiens
gagggcatccttttcttgtgctggttttcaagggaaatgattccaggttttgccctttcactacgatgttggctgtgggtttgttatagatggctcttattattttgaggtatgttcctttaatatttagtttgttgagaattttttacatgaagtgatgttgaattttatttaaagcctttaaataaaggctttaagaactttatttaaagaactttatttaaagttcttattatgtaatgaatcacatttattgatttgcatatgttgagacaatcttgcatcctaaggacaaagcctacttgatcatgctggattagcattttaatgggatgctgaattttgtttgcttgtattttgttgaggmattttgcatcaatgttaatcagggatattttcccctaaattttattttttcattgttgtgtctcttacatgtttctgttaggatgataccggcctcaaagaatgagatggagaggagtcccttctcctcacttttttgaaatagtttcagtatgaatggttccagctcttctttgtaaatatggtagagtttgtatgtggatccatttggttcttggcttcttttggtttgtaggctattttttta

SEQ ID NO: 749354 - DNA, 633 bp, Homo sapiens
tatttatttggatcctctctctttacttcttcgttagtttagctatcaatttatctatctcatttttttttcaaaaaattatctcctggattcgtcaatcttttgaatattttttattgttgttgtcaatctcctacagttcagctattgtcttctaataactttggaatttgtttgcccttgattctctagttcttttatttgtcatgttaggttattaacttgagatctttctaattgtttgatgtgagcatttgttactatacatttccctcttcatagtgccttagctgtgtcccagagattatggtatattttatctgtgtttttattagtttcagagaacttcatgatttctcctttaattatttacccaaaattcattcagggacaggttgtttaatttccatgtaattgtacagttttgagtgattttcctaatcgtgattttcattttttttttttttttgctgttttccaagagagtggtwggtatgatttcagttcttttgcatttactgaggattattttatgtctgattgtgtgattgattttagagtatgttaaatgtgctaatgggaaaaatgtatattctgctggttttgggtatagagttctctggataactatca

SEQ ID NO: 749355 - DNA, 602 bp, Homo sapiens
aaaagaatattaaactaagactatggctattgatgtaaagaaatgtacatgattttaggaactagaaaccaaactgcaattacccaaatgtccataactaggtgaacagataaacacactgtagtatatacataaattggaatttattaaggaataataatgttcaaataatataatgaatatttttattatattattacatacaattacaagtatacatattattttattcatatattctaattattatattaatacatacaataacatgtataaatgttaattatgcttgctgaaaaacagtagacaaraagtacatactttatgattccatttatataaaaatctagagaaagaaagtaatctaaataataaagagtgaatctgtgatggctcgaggctggtgcaggagggagtttgacgaaggaatagaatggtaggattatagagatacacagaaaatttttggttctatgctggatatgtttggcttctcgattatggtgacagtttatcaggtgggagcatatgtccaatgtatgagactgaacattgaaactgcaataatcatataatgaaatattgagcaataaaaggaatga

SEQ ID NO: 749356 - DNA, 602 bp, Homo sapiens
aaaagaatattaaactaagactatggctattgatgtaaagaaatgtacatgattttaggaactagaaaccaaactgcaattacccaaatgtccataactaggtgaacagataaacacactgtagtatatacataaattggaatttattaaggaataataatgttcaaataatataatgaatatttttattatattattacatacaattacaagtatacatattattttattcatatattctaattattatattaatacatacaataacatgtataaatgttaattatgcttgctgaaaaacagtagacaaaaagtacatactttatgattccatttatataaaaatctagagaaagaaagtaatctaaataataaagagtgaatctgtgatggytcgaggctggtgcaggagggagtttgacgaaggaatagaatggtaggattatagagatacacagaaaatttttggttctatgctggatatgtttggcttctcgattatggtgacagtttatcaggtgggagcatatgtccaatgtatgagactgaacattgaaactgcaataatcatataatgaaatattgagcaataaaaggaatga

SEQ ID NO: 749357 - DNA, 606 bp, Homo sapiens
  misc_feature 121: n = A,T,C or G
tttacaatacctttatcacctctttctctcatttttgctctaaataattaagttggacattttatcaagttgataagttgacataacttagtctccattaatagtaatgtgattagtccanggttctctagaggaacagaactaatggaatgcagatatatatatatatatatatgaatgaatgtattaagtattaacctcatagggatcacaagggtcccacaataggccgtctgcaggctgaggagcaaggagagccagtctgagttccaaaactgaagaacttggagtctgatgttccagggcaggaagcatccagcacaggagaaagatgtcggctgggaagctaggctagtctctcttttcacattcttctgcctgcttatattgtagccacgttggcagttgattagattatgcccaccrgattaagggtgggtctgcctttcccagctcactgactcaaatgttaatctcctttagcaacatcctcacagacacacctagtatcaatactttgtatccttcaatccaatcaagttgacaatattaaccatcagtaataatagcaaatatttattgaatgcttatcaagtaaatttcatt

SEQ ID NO: 749358 - DNA, 561 bp, Homo sapiens
  misc_feature 542, 543, 544, 545, 546, 547, 548, 549, 550, 551, 552, 553,554, 555, 556, 557, 558, 559, 560, 561: n = A,T,C or G
aaatgcattaggttttcctgtggaaagttatttaacatattcaatttcttcactagatataaaactatataaaacgtttattatttttatcattttcaaattgaattgagttttaggatttttaacttactgagatatctaactcaaaatctctgtatcttgttatatactcaaaggctcagatccaaatctgataaatttgagacagcaataattcatctttacccatttcgttcaaagtcttccactaatttttttgagtttttaatgccatcatattttatgctttttatcactgaaatatgattcaacacatataaaaatgtacatgttatatggtgaggcattatttctcggttatttargcagattgttaatgattcatcaatgttttgatacatgattctgatttctgcttttatctaaactaattaacttttgatagaaaaactaaaataataatgtatttgtggctaaaatacaacatagtatcttaaatgtttttgtggcggttcaattctagtggtgctgcagctccttgnnnnnnnnnnnnnnnnnnnn

SEQ ID NO: 749359 - DNA, 583 bp, Homo sapiens
tctactattgcaaacttacatttttttttatttttagtcaacaaatatgttaggggagacactttgaggctattaaaactttccatctctacctaaacttttacccactaatttaaacattaatttgttggtcacgtctgcagcaattactcccatgtttatttatttatttatttaagagacagagtctcactctgttgcccaggctggagtgcagtggtgccatcatagctcactgcaccctccacttcctgggctcctgcctcagcctcctgmgtaatggggattacaggagcatgtcactgtgcctggctaatttttaatttttttctagagtcaaggtcttgccacattgcccgggctggtcttgaatttcctgggtctcaagcaatcttcccaccacggcttcccaaagcactggccaaaattgtatatatttatggggtacaacatgatatttttaaatatgtatacattgtacaatgggtaaatcaagctaaatctattctcttaagcaattttcaagtaaacaatatgtaattattaacagtagttaccataatatataatacaatagatctct

SEQ ID NO: 749360 - DNA, 579 bp, Homo sapiens
ttttacaacagagaaaccagaaaagtcatggattttgcctgagttattatccaggagcaaggggaagaattggatgtgaggatataaaattttttttttttgagatggagtcttgctctgttgcccagctgtagtgcagtggcgcaatctcggctcactgcaagctctgcctcccgggttcacgccattgtcctgcctcagcctcccgagtagctgggactacaggtgcctgccaccatgcccagctaatttttgtatttttagcagagatggggtttcaccttgttagccaggatggtcttgatctcctgacctcgtgatccgcctgcctcagcctcccaaagkgctgggattacaggcgtgagccaccgcgcccggctgaggatataaaattcatgttttgagccattctgagtgaaacaatacttgtgagaggcgttcgaagcagagcaaccccatcttgaacagggattgagtaaaataaggctgagacctactgggctgccttcacaggaggctgggtattctaagtcacatggtgagattggaggttggcacaagatacaggtcacaaagacc

SEQ ID NO: 749361 - DNA, 630 bp, Homo sapiens
tgaataaataaacaaacagcgagttgaatagcccatagtcaattgtgatggtttgtacaggtttcagtttgaaaagcagtcactaatgagctgcttggtcacattttgtcaattatttagatgtagagatcaaagtcagattataggttgggtacagtggctcacatctgtartcccagcactttgagaggctgaggtggaagaattgcttgagccctgtagttcaagactggcctgagcaacacagcaagaccccatctgtacaaaaaataaattagccaagtgtggtggcctgtgcctataggcccagctacttgggaggctaaggcaggaggatctcttgagcccgggagttcaaggctgcagtgagctatgattgcatgactgtgctctagcctgggtaacagagtaagactttgtctctaaaaaaaattttaaatgaaaaagaaaaaaaagtcactttatacatttgatgcatgacagaaagttgaaagggatagataacactctccagaaatgaggttcaaatggttttggctgattacaatcaacaagatttaatttaatgaggatgagggaaagccctaaagttatgtccaaaattccaatggtgaagcacaggattgttgt

SEQ ID NO: 749362 - DNA, 630 bp, Homo sapiens
tgaataaataaacaaacagcgagttgaatagcccatagtcaattgtgatggtttgtacaggtttcagtttgaaaagcagtcactaatgagctgcttggtcacattttgtcaattatttagatgtagagatcaaagtcagattataggttgggtacagtggctcacatctgtaatcccagcactttgagaggctgaggtggaagaattgcttgagccctgtagttcaagactggcctgagcaacacagcaagaccccatctgtacaaaaaataaattagccaagtgtggtggcctgtgcctataggcccagctacttgggaggctaaggcaggaggatctcttgagcccgggagttcaaggctgcagtgagctatgattgcatsactgtgctctagcctgggtaacagagtaagactttgtctctaaaaaaaattttaaatgaaaaagaaaaaaaagtcactttatacatttgatgcatgacagaaagttgaaagggatagataacactctccagaaatgaggttcaaatggttttggctgattacaatcaacaagatttaatttaatgaggatgagggaaagccctaaagttatgtccaaaattccaatggtgaagcacaggattgttgt

SEQ ID NO: 749363 - DNA, 582 bp, Homo sapiens
ggctgattacaatcaacaagatttaatttaatgaggatgagggaaagccctaaagttatgtccaaaattccaatggtgaagcacaggattgttgtgtcctgactcggctgcaactcatggaccaagaatctgggacttttagtgacggtcatttcaacctgaccctgactagtcctgctcaactcctacccaaatcctccgggccctggtgaaacacatagggcccacagaaaaagagctgtccatgatcgccctgcctctgtgagcttcaatcctaacttacctgtctcatcagcctcatgtttagctctaccgctgcccattctcttctgtaccccaacatagcctccttaattttatgcacaatttaattttctgggcccctttctcatcyctctgcttgttagtcatttcacttgcagtcttctgggtctgcaattcatactaggaactttggaagaaatgaaggatacatttctcttagagaagagactatgggaagcaaaatgggaccttcaaatgaaagctagggtggacaggtcctgtgctgctgcagccaccgctgttagaaccagaagggag

SEQ ID NO: 749364 - DNA, 605 bp, Homo sapiens
agactcacccagtggcaaaatcctggatccacagtgacatctccaagccaggcccactctcccagaaaggcactgacaaagatgaatccttttgaatgcagaggagtaacagaccacaagctgtaatttcaaaggggtcagaatgacctgcagaaaagcctgcaaatacttccctacctgtcttcttgcttctggccctgkaaattagcccaacccactcccaagctgcacctgcagaagatgaagggtagctgaaaatagccaccagtgtgcagagcaatttcccagaacctccattctctgatttggctcagattctatcttagcttcctccaatctcctggctctgacttcaccttggttatttgaaccttggcttgacttatcctatagaccagagaggttttcaaacttgagctagcatcggaatcacctacaggacttattaaagctgaagctgctcatccccagaggtttgtttttgtttttgttttttcttttttgagactgggtctcattcttttacctaggctggagggcagtggtgtgatcaaagcttactgcaggctggacctcccaggctcaggcaatctttccacctcagc

SEQ ID NO: 749365 - DNA, 655 bp, Homo sapiens
actagtccatgctgcatacagcacagagctggagggtcaggaaggcagcagcccaccacctcaacagtgtggtttgcagagaaatttgggcacccagacacatccagttgtccaagtggggctgcaagggggagctggtgtcaaaggacatagaaggccaatgctctgcccggtggagggcatggggttgctgtcggtccctgtgggcctggagggctggtcatgagggaccacagccgaacttggattgaaggagaaggaggacatgcttgtggctgccgaattccctgyatctgccactcaatctgaccacgacggctttcactctatttccatcttctaaaattatatacaacttttccttttggccaattctattcaactttttcttttggccaattctattctatatacagggaagggaattatgggaatacttctaagtcaacttagctaagttaacacagaacaaaaccactgcaaggtattctactaccacaacaaatctaaacagtgctggaaaaatacagaagacattgtctcaagtatgcaaatcagtttcaaaaattaagataatactcagcggctgccaacagagccaatatttaaaactaaatgagcaccaagtctggtgaatagccagggtggatgctgc

SEQ ID NO: 749366 - DNA, 655 bp, Homo sapiens
actagtccatgctgcatacagcacagagctggagggtcaggaaggcagcagcccaccacctcaacagtgtggtttgcagagaaatttgggcacccagacacatccagttgtccaagtggggctgcaagggggagctggtgtcaaaggacatagaaggccaatgctctgcccggtggagggcatggggttgctgtcggtccctgtgggcctggagggctggtcatgagggaccacagccgaacttggattgaaggagaaggaggacatgcttgtggctgccgaattccctgtatctgccactcaatctgaccacgacggctttcactctatttccatcttctaaaattatatacaacttttccttttggccaattctattcaactttttcttttggccaattctattctatatacagggaagggaattatgggaatacttctaagtcaacttagctaagttaacacagaacaaaacmactgcaaggtattctactaccacaacaaatctaaacagtgctggaaaaatacagaagacattgtctcaagtatgcaaatcagtttcaaaaattaagataatactcagcggctgccaacagagccaatatttaaaactaaatgagcaccaagtctggtgaatagccagggtggatgctgc

SEQ ID NO: 749367 - DNA, 614 bp, Homo sapiens
ttgattataaataaagaaaaaaatcaataaaagatcaacaagctgtgaagcaatttaaagcagcccaatatatgaagtcccctaagtagattgagcaggataacagcaaaaaatgtgaataaataatggctgaaatttttcctaattagacaaaaactataagcctacaaatttaagaactattgaaccacaatcaaaaggaacatgaagaaaactacactaagacacatgatgatcaaattactcaaaaccagtgataaagagaagattttaaaagcaaccatagggtacttatcaggcatataaggataatgacttcttgtcaaaaataatgcaagagggaagacagcaaagcaacatctagaaaaagcagaaaggggaaaataraaaagctaccaaccaagaattctatgccttggaaaaaaaatctcaaaaacaaaggcaaaataaaaggtttctagacataaagaagcagaaagaattcatcatcgtcagcagagccacgctactagaaatttttttttttaattgtactttaagttctgggttacatgtgcagaacgtacaggtttgtgacataggtatacgtgtgccctggtggtttgctgcaccca

SEQ ID NO: 749368 - DNA, 629 bp, Homo sapiens
tctgcagctcgctgcccttgcagctggggtccatgcagcctcctctcatgctgaggcaaaacataagaaaaagctgaaggctgggtgctgtggctcgcacttgcaatcccagcactttggaaggctaaggcaggtggattacccgaggtcaggagtttgacaccagcctggccaacatggcaaaaccctgtctctactaaaagtacaaaaaattagccgggcatggtggtaggcactaagtagtagggttgtaatcccagctacttgggagactgaggcaggagaattgcttgaaccccaggtggtggaggtgcattgagcgagatcgcaccamggcactccaggctgggtgacagagcaagattttgtctcagcaacaacaagaacaacaacaaaaaaggctggtgattaatggacaaactctgccccagttttcactctattttcttacaaatagttgcaaaagttaaaccacatgactcacatagtcactgaatattttatccctttagaaaattttaaaccctatctttgacctagtaacatctacaggacaacctaaacaatagcagggtctgttgctcttagccacaggtgagcccagcacccctggactattcgaagcagtg

SEQ ID NO: 749369 - DNA, 614 bp, Homo sapiens
tggtttgactttcggttttttactttactatgggtatgaaagtaatatacattcagtatgctcctggacttacaacggggttaggtcctgataaacccatccctgtttgtctactgccctaccttaattattatagagggcccttctcactctcaaaagtgccctgctttggacaataaattatayggtcttacctatgctggaaactatatggatatattaaagtagcaaatttattcctctcgcttgaaaatttacaatttttttttagtgagaccgagtgtacaggtaatcagaattctgttttgaattatacattatttgacattaatatagtaatttctgctttcccttgtttgtaattgccagatatacattttctgttcactctatttttgtgcatgtgattttggtttaagtacattacttaatggcataaaatcatgtgtgaaaagtttaccagaggtaaaaagcattcttagaagattaagtaaatggcacagctattaagcaccggaggagttgggaaatgaatgacttatccattataaattggtgataaaaatgtgatgattttgaatcaagatttaaatagtataaaattctactttcca

SEQ ID NO: 749370 - DNA, 481 bp, Homo sapiens
catccctgtttgtctactgccctaccttaattattatagagggcccttctcactctcaaaagtgccctgctttggacaataaattatatggtcttacctatgctggaaactatatggatatattaaagtagcaaatttattcctctcgcttgaaaatttacaatttttttttagtgagaccgagtgtacaggtaatcagaattctgttttgaattatacattatttgacattaatatagtaatttctgctttcccttgtttgtaattgccagatatacattttctgttcactctatttttgtgcatgtgattttggtttaagtacattacttaatggcatraaatcatgtgtgaaaagtttaccagaggtaaaaagcattcttagaagattaagtaaatggcacagctattaagcaccggaggagttgggaaatgaatgacttatccattataaattggtgataaaaatgtgatgattttg

SEQ ID NO: 749371 - DNA, 594 bp, Homo sapiens
tacttcatgctactacttattgtttatacctatgttatagcttctccaccaggatagaaacttctttaaagcgctaatctcaccttgtggatacgtatccccttacagcacttagaacaaatatgtgatatatatttgttaatttaacatacttttcattatctctgtagcacraaaataatgtttcaggggccatgtgacaaaaaaacagaatcatattagatgtgcctcaaaaataaagggaacagagttgttgaaagtgaaataataacttaaaaagtactagtctgtttggaagttttgtttatatgtaaatgcaagtgtgtgtgtgtgtgtgtgtgtgaatgttaacattagtcaaagagtaagaagaattacaaggggacccacaaaacctttaccaatccatgtaatgttgtcaaagataataagtaatatctaatttcaaaatcaaaggagcattgtcccagtcattctttaccacttttaccttttaccttggaatacactaaattccattgtttgcccatgtatctattattttattaccactttatatgtttaactcatcaaatgttcttgcaaatctgatac

SEQ ID NO: 749372 - DNA, 609 bp, Homo sapiens
atatctgggtgccccgtagcccagtcaacttgacacataaaattgaccataacatcatataaattaaatcatacagtatttgtccttttgtgactggcttatttcacttaacatagtgtcctcaagattcttccatgttgtagcacatgtcagaatttccttcctttttaaggctgaataatatttcatttatgtgtatactgcaatttgtttatccattcatatgttgatggacacttgggttacaaacattttggctattgtgaataatgctgctatgaacatgggtgtacaagtatctcttttagtttctgcttttaattcttttgggtacatacccagaagtagaattgctgtatcatatggtaatactatgtttaattgttttaggaacacaccrtactgtttttcatagcagctgcaccattttactttcctaccatcagcgtgtgagggttctaatttctccacatcctcaccaacatttgttattttctgtttttttttttaatcgcagactttcctaatgcatgtgaggtggttattagtttctcttgcacttaaatgttagtcattttctgtcactttctgtccatttttgtcatgtac

SEQ ID NO: 749373 - DNA, 550 bp, Homo sapiens
ggtgaggttcaagaattaatatttaaaaaaaaacacaaagaatgtggaaaattcaaattcttctctgtatagcactgtactggctccatttgtgacttctgctcaccatcagctgctacacagataaatcaaatccatcctctttgtcactttcaaaatttgaatttgtctcctttgcttgagggaaaacacttcagttttgcttaagtaacagacttcattttatgtagtttttagtcctttaacatatagttttytttcttgtagatatccattaagtgtcaacatctattcaaaacgaggcatccaaaactgctccttgttcagcatcattacccaaaagtctgcctgtggtaggtagaattctaagatggcaggtggaattaagtttgctcatcagttgacagtaagaaaggaagattacccaggttagcctaacctagtcacacgggcctcttaaaaccagagagttttctcctgctggttgcagaagtcaaagagattcaaatcgagagagggatccactgaaaggactcttctccattgctga

SEQ ID NO: 749374 - DNA, 604 bp, Homo sapiens
tgtaactgtttttagtccaatgtcttaaagctgcagaattgctcatttcatgccctttgcttaaagaaaataaaagtaatttctcttttaaattatatacacacatggatgctccaggatgtcacctaaattttcagaaacgcctctgtgtcacaagtggaagctccttagatggaaaaccactttaatgccccaaggagaatgcaactttaaaaacagcccttcgatgagccttttgtaaagctaagaatccttgaaaaatcargcactgcctgatttatccagtaggtatacactttcatatgcgatgctggcttttagaggagtgttaaacaggtgtgtaaagtgcaaaggtcagtgaggatgcatgtcttttacagatgccttcaagaattccagaagaacctctagcttctaccagtcatgtcccagcatgacctccacttctcatctaaggaatggaatttggcgtcatgggagagatggatcaggggagatttcaacactctacattttatttgtgtcacttctttcctgtctcttctaactactatctattgtgtcctctcaaacaatttttctttggcctatatatttccttatt

SEQ ID NO: 749375 - DNA, 579 bp, Homo sapiens
gtctactcaccttcttcatttcctgaaacaatggagtacacaatactttgattaatggcagcagcagaaattacaccaaccatggtccctttggtggcaagttcacttactggaggaggtctgcaggtttagagaagatgatgtatttatttttaaatataatttttgatgtaactttacgttcacagaaaaattgagagaaagataagagatttctgatataccctctgccctcacacattcatggcctcctccatgatcaaatcccccacccaactgctacctttgtgataaatgatgaacctacattgacccattatcactgaaagtccatcatttacatkagggtgcatattgttgttgtacattttatgagtttggacaaatgtgtaatggcatgtatccgctttcatgtagtatcatatagggtattctcactgttctgaaaatcctctgtgccctgtatattcatccctcccctcaactcaacctctggcaaccactgatctttgtagtgtctctatggttttgccttttccagaatgttgtatagctggaatcacacagtatgtaaccttt

SEQ ID NO: 749376 - DNA, 599 bp, Homo sapiens
aatttttttaactgtgaagaatgatgatggtatttttaggggaattgcattgaatttgtagattgcttttggcagtatggtcattttcacaatattaattctgcccatccatgagcatgggatgtgtttccatctgtttgtgtcatctatgatttctttcagcagtgttttttagctttccttgtagaggtctttcaycttctttgttaatattcctaagttttttttttgttttttttttgttttgttttgtttgtttgtttgttttgcagctatgtaaaaggggttgagttcttgatttgtcataggtggcttttgttacattgagggaagtcccttgtatgccagttttgctgagttttaattgtaaagtgatgctggattttgttgaatgttttttctgcatctattgagataatcgtgtgatttttgtttttaattctgtttatgtgctataccacatttattgaccttttgtgcaggtatatctttctggcatgctttttttgtttgtagtaatattattctcccccttattctcttttttcttacaatactttggggttgtttgtttgtttgctttttgagacagtctcact

SEQ ID NO: 749377 - DNA, 642 bp, Homo sapiens
tagagaacctaaacaaaggtgctgagaacatatattgcggaaagaacaccctctttaataaatggtgcagtgaaaactgagtctcaatgggcacaaagaaggaagctagacccctatctctcaccatataaaaaatcaactcaaatagattaaaaattaaatatactcaaaactataaaatwctagaaaaaatcatgaggggatgatgtaagagattggtgtgtgcaaagattttatggccaagacttcaaataaacaggtaataaaaagaaaaaaaaggcaaatggtactatattaaactaaaaagcttctgcatagtcacagaaacaatcagcagagtgaagagaccacatgtaacatgggagaaaatatttacaaactcttcatttgacaaggtactgacacctggaatatataagggactcaaacaactcaccagcaaaaaaataaaaatataaaaataaaaaagcccacaaatattcccataaaaaactaggcaaagaatctgaataggtattcttcaaaagaaggcattcaaatgtccaacagtcaacatcacttcaaaagaagacattcaatccgttaacagtcaacatcactaattatctgagaaatgcaaatcaaaaccacaatgagatatca

SEQ ID NO: 749378 - DNA, 642 bp, Homo sapiens
tagagaacctaaacaaaggtgctgagaacatatattgcggaaagaacaccctctttaataaatggtgcagtgaaaactgagtctcaatgggcacaaagaaggaagctagacccctatctctcaccatataaaaaatcaactcaaatagattaaaaattaaatatactcaaaactataaaattctagaaaaaatcatgaggggatgatgtaagagattggtgtgtgcaaagattttatggccaagacttcaaataaacaggtaataaaaagaaaaaaaaggcaaatggtactatattaaactaaaaagcttctgcatagtcacagaaacaatcagcagagtgaagaraccacatgtaacatgggagaaaatatttacaaactcttcatttgacaaggtactgacacctggaatatataagggactcaaacaactcaccagcaaaaaaataaaaatataaaaataaaaaagcccacaaatattcccataaaaaactaggcaaagaatctgaataggtattcttcaaaagaaggcattcaaatgtccaacagtcaacatcacttcaaaagaagacattcaatccgttaacagtcaacatcactaattatctgagaaatgcaaatcaaaaccacaatgagatatca

SEQ ID NO: 749379 - DNA, 616 bp, Homo sapiens
attaataaataaaaccagatgacatagctaactgatggtagaatcggaattgaccctcacagtccactcctcacttccttctattgaaagtttctaccttagagatttaattctgtgtagtattctttgttgcacactaaaaaagtgcagggaaacacacaatttaattctgttaaaaagtttggccaatctgtgttttattctagaatcttattttttttaatgcartggtttaaaaaatattctaaatacttttgttgtatatttatgtttcatagataagattaaggaaatagatttattcatgtttgaatttttcaatataatttcatttttcaaaaagtattaagcttttgacttgtttacatctttttctggttaaactgcccagcgattttttatttttacacatttgtacttgttgctatgtactcttgctcacagagcaaactgttcaagtgattttctctacacatattttctctaatctttaacatattggtgttacagggcactatgtgtttcctcatttttaaattgcctgcagaactttccttgaagtttcagaatatgaaaagtagaggtgtacctttaatctacatacaaagggaatcat

SEQ ID NO: 749380 - DNA, 616 bp, Homo sapiens
attaataaataaaaccagatgacatagctaactgatggtagaatcggaattgaccctcacagtccactcctcacttccttctattgaaagtttctaccttagagatttaattctgtgtagtattctttgttgcacactaaaaaagtgcagggaaacacacaatttaattctgttaaaaagtttggccaatctgtgttttattctagaatcttattttttttaatgcagtggtttaaaaaatattctaaatacttttgttgtatatttatgtttcatagataagattaaggaaatagatttattcatgtttgaatttttcaatataatttcatttttcaaaaagtattaagcttttgacttgtttacatctttttctggttaaactgcccagcgaytttttatttttacacatttgtacttgttgctatgtactcttgctcacagagcaaactgttcaagtgattttctctacacatattttctctaatctttaacatattggtgttacagggcactatgtgtttcctcatttttaaattgcctgcagaactttccttgaagtttcagaatatgaaaagtagaggtgtacctttaatctacatacaaagggaatcat

SEQ ID NO: 749381 - DNA, 600 bp, Homo sapiens
tgtttgagatatttcgcagaccctgcactggatgaatcagctggcaccacccagttcaataagctgttttatctggtctcgtggcccttacccaagaaatgactcagcgcacgaggacagcttcaactccctatgatttcatcttggacccaatcaaccagcacccttgactaaatggtgcyttaaccaccaaagtatccttaaaaactctgatccctgaattcgtggggagactgatttgaataataacaaaactcacctctctggtacagccagctctgcatgaattaaactctttctctattgcaattcccctgtcttgataaattggctctgtcaaggcagcgggcaaggaaaacccactgggcagttacagacacagcttctttccttccttactacttttcttattactattcttccttttgtcctgtcttcctccattcttgcccacctgctttctatccagtcactattaagtacttggtatagagctttgtgcatcctagatgctcaaaaacctttgtaaaatgaattaatgaatcagaatatcaattttcatatggcttgtaacactttctagttatacaatgttaacta

SEQ ID NO: 749382 - DNA, 581 bp, Homo sapiens
catataaagataggggaagtattcctttgtcttctgctctccccctttcttctaagcacacaggcccaaagtgctccgtagtggcaccatcagaatgtctcccacttgttctttgtcccccaaactccacccaggctccacatctcagaatgtccatgctaagtccatcatgtcactctgtctcctctttgaggtcctgcgggagaaaactctcccaaggctaagctcaaagaagcgttgtgcctttaccaggtgctttgcttttttaccttgtgtctagtgtctcatcggcagtgattgagcagtcggtcctctttgctctgctttgctctttcagagtgrtcaggatatctcgagtgaccctgcagggacagggcttacaccttgcttcccacccctcagctttcatcttcctgaccaatttttttctttactctagttttttaacttgatcaatcttgttataatttatgtattcttgtcccctgcattaaatctcttttgtggaatgaggcagggtacaaattaataataatctagtcctttttcacaccaaaagccccatttatgaacactttccc

SEQ ID NO: 749383 - DNA, 632 bp, Homo sapiens
ctataaggatattcatcttcccaaaggcaaacctgaaaacaacctagatacatccggccaccggggaccaattatgtaaattctcttctatgtacacaggtgattattctgcaagcatttagtcatttgtacaagaatattcaatggccaacatatttttaggcaaaaaatgcaaactacaaagtacaaggtagtatatatgamcccgttgatatattctgaaactccaaatgatttttgtgtgggaagtattgtccatattttcaacacatttctacacagtataacttttataatgagaaaaatattttaagttagctatgaggaagtacttcacgagattaaatcccgtcaatgcttatctttacctacttcaggtgcatgtctctgtaagctgccttttaactgtttttagaacatggtagggtgtgagtaataatcccaaataaactactcctcctcagcttgcttgagtggttacagcaggtcagagagtcaatctttcaggctccttggccataagatctggctgcaactactcaactgtgctgctgtagcacaaaacaggcgtcgctgtgttccaaaaaaataccctttaagtacaaaacatgatgggccagtttgctgacccc

SEQ ID NO: 749384 - DNA, 591 bp, Homo sapiens
agtattgtccatattttcaacacatttctacacagtataacttttataatgagaaaaatattttaagttagctatgaggaagtacttcacgagattaaatcccgtcaatgcttatctttacctacttcaggtgcatgtctctgtaagctgccttttaactgtttttagaacatggtagggtgtgagtaataatcccaaataaactactcctcctcagcttgcttgagtggttacagcaggtcagagagtcaatctttcaggctccttggccataagatctggctgcaactactcaactgtgctgctgtagcacaaaacaggcgtcgctgtgttccaaaaaaataccctttaagtacaaaacatgatgggccagtttgctgacccctggatcaragaacaaactcaaacgctggtatgtcaatctcaagtagtcagaaagcatgacagacagggaaaaggtgccccccacccactcagccctgccaatcagatctaaggaggcagtgcccgttcccaacgtgagcaggccgccctgctctgcgtggactagcgagctcatttcctgaatgggtattcttgattctaatgaag

SEQ ID NO: 749385 - DNA, 472 bp, Homo sapiens
gctaacacccgcaaacacacggcctaatgcacggaacagatgaaagctgtgtgaacactggcgggtttcatcacttctccctctgcactctggggtgtccaaacctggagcgacagcaagcgcctcctgccatggggctgggcctaggaagcaggagagaggacgagcatgtcctctcagggagctggggctgcgtgggaaggagttacccggaaaacaacttcactgaggggytgcgccttggctggccttcgggctccatgtccacatgacccaggcagggccaccggcctgcatagctctgaggcagctctgtcccttctccctgaccacagactgggtgattgcaggggcagagaccggaagaacctggtgcttggtgatgggggtggctcagaaggcccctccagctgtgagagctgtgggagccccgctgacatggtggatcctggctgtttcactcggtggccca

SEQ ID NO: 749386 - DNA, 551 bp, Homo sapiens
ccgtctctcaagctacaggatggaggaaatgaaaaagggaacctcccctcccttttaaggatacctcctggaagtgctttgcaaacttctgctttcatctcacttcactggtcaaaatttcgtctcacatggctgtgcttagctgcaaaggaggctgggaaatttagcatttttagccaggtagcattgtgtccaccttaaaaaaaaaaaatcagtttctgttaatttgtgaaagttagggaaggcatggctgtttagtctctgccagatcacctctgtgtgcctccatttcctcttttggaagtgygggtggtgatagttcattgtagaattatgtgggcttcagtgaaatcatacatgtaaagtgcttagcccaatgcctgacacagaccaggtgctaatcaaatgataggtactaatattgaggacctggtgccaagctgcgctcctgtcacgtgtgttatcgaagcctcatgacaacctggtgaggctgaaattatcctccccattttgtagatgagagcactgagtttcagagaaggtagctctgt

SEQ ID NO: 749387 - DNA, 551 bp, Homo sapiens
ccgtctctcaagctacaggatggaggaaatgaaaaagggaacctcccctcccttttaaggatacctcctggaagtgctttgcaaacttctgctttcatctcacttcactggtcaaaatttcgtctcacatggctgtgcttagctgcaaaggaggctgggaaatttagcatttttagccaggtagcattgtgtccaccttaaaaaaaaaaaatcagtttctgttaatttgtgaaagttagggaaggcatggctgtttagtctctgccagatcacctctgtgtgcctccatttcctcttttggaagtgtrggtggtgatagttcattgtagaattatgtgggcttcagtgaaatcatacatgtaaagtgcttagcccaatgcctgacacagaccaggtgctaatcaaatgataggtactaatattgaggacctggtgccaagctgcgctcctgtcacgtgtgttatcgaagcctcatgacaacctggtgaggctgaaattatcctccccattttgtagatgagagcactgagtttcagagaaggtagctctgt

SEQ ID NO: 749388 - DNA, 596 bp, Homo sapiens
gcagcatacagcaagattcctgaggttctaagtgtgtttctcaggtgattgtgttttgttttttttttttttttttctgtctcagacttgggtcaagtatctattgcagcaaaagtttgttcaaccctactgagatgcctgttggagtttgaccctcatgccaccatcctctatgtgtagtccgatgtaatctcttgtttcctagctaaataattgggctagaagtgagatgtgaatctgaggatttttttccccatttttttggttctaaaatcaaggacctgttttaaraaacataggcactctcaaggcagtttataaaatatttttagggctaggtatggtagctcaccgctggagtgcagtggtgagatctcggctcactacaacctctgcctcctgggctcaagctatcctcccacctcagtctctcgagtagctgggatcacaggtgcgtgctaccatgcccggctaattttttgtagagatgaggttttgccatgttgcccaggctggtctcgaactcctggactcaactgaccccacctcggcctctcaaagtgctgagattataggcatgagccaccggcagctgg

SEQ ID NO: 749389 - DNA, 523 bp, Homo sapiens
caggcgggaaccgtccagttgccgtgctgctgtcaagacccaggccccccgcccgccacccgccacctgccaccaggtaaggaggcagggccacctagaggaagagtgccgtgaacctgggaaagcctgagtctcargagtaaaactctcgcttggattgcaacgtcctggggcctcagtgtccacttagttgtgccctcattgtgtgcccttgggcagatcccacccttctctgagcctccgtttcttcatcttaacctgagggctgccagctctaaaatcctgtgggcaggagggaagagctgtcttatgaccatgtattatgtgctaggctcttgctgagcatcttatacctgtcacatttagttctcataacacccccaacatgggtggtatcatccctattttaaagatgaggaaacagactcagagaagtgacttgcccaaggccacacagtgctgtgtgactgagctgagattcacaccttggacaggccagcactgcagacaggaagagccaccc

SEQ ID NO: 749390 - DNA, 472 bp, Homo sapiens
tgcagaggagatggccgctgattgattgaggtccagatggagctgttaaagataacaatgaagtcagagaagctgccctgcctaatgaagcaggcaggcctgcgcctgggagggacaggtctgtggggcagcagtaatgaaaagccggagacagaccaccctgggtgcccaagacctcctcccttgcctgaacttgggcrgttgtccatctgagcatggtaacaaggtataaagtctcattccccagacccaaggactgcagagactgatgtgtcggggctggaacaaggggtcctggaaggccacgtgtgttcactcattctttcataacatgtacacaccaacgtgggtgagcagccatgatgatgagtgtgaatattatggcagctggggccatctgcacggcctcccagggcccctaaacacagcatgtacattatttcctggagtgtatatgtttctgaggcctgct

SEQ ID NO: 749391 - DNA, 472 bp, Homo sapiens
tgcagaggagatggccgctgattgattgaggtccagatggagctgttaaagataacaatgaagtcagagaagctgccctgcctaatgaagcaggcaggcctgcgcctgggagggacaggtctgtggggcagcagtaatgaaaagccggagacagaccaccctgggtgcccaagacctcctcccttgcctgaacttgggcggttgtccatctgwgcatggtaacaaggtataaagtctcattccccagacccaaggactgcagagactgatgtgtcggggctggaacaaggggtcctggaaggccacgtgtgttcactcattctttcataacatgtacacaccaacgtgggtgagcagccatgatgatgagtgtgaatattatggcagctggggccatctgcacggcctcccagggcccctaaacacagcatgtacattatttcctggagtgtatatgtttctgaggcctgct

SEQ ID NO: 749392 - DNA, 601 bp, Homo sapiens
ctccctttagtttctggattattgagagatcagtgtatcatgaaggatccacttgggggctagggacacatggcgagctcagggcagtagctcttaactaaccagtttggatgtaacaaccagtaacaactggtacatccagctctttatgtggggagggggagctcaggacatcaagtgcccaataattggaggtccaactccctgagtggtgtcctcagctcccagcaagccagtgttccataagacacctacatcaaacaggcaccccctgccaccccgaagcttcgtagaaaaggatagggcataggacagaacttttttgagttaagcattttattccataaagtttccttaactgtcagtgcttagaaaggcaggatgatgatratgtttaagaacacggactctggggccagatggcctgggtttcaatctggtcactggtacctttgagaaatgtaatccaagttatgtaacccctccctgccttgttttatcttctctgtcaaatggagacaatagcagtgccttcctcatggggattttgtagggattaaaggaatcaaaatacgtaaagctcttagagccatgcctggtg

SEQ ID NO: 749393 - DNA, 609 bp, Homo sapiens
attgctaaaccaaagaacatgctgtttcccttttgggaggttggaggggaaaggataataagtaattagaggatcacacagggactagaccaggcctgctgattttccagcccccgcccttggatgtcttggattggaataccataatggtcctagttagataaaattattgattttttwaaaaatgtaattgatttaaaatagattgttggctgggagtggtggctcatgcctgtaatcccagaactttgagaggccaaggcaggtggatcacctgaggtcaggagtttgagaccagcctggccaacatggcaaaatcccatctctactaaaaatacaaaaattagccgggcatggtggtgcgtgcctgtatctcagctactcgggaggctgaagcaggagaatcacttcaacccaggaggcggagattgcagtgagccaagattgtgccactgcactccagcctgggcaacaagggtgaaaactttgtctcaaaaaaaagaaaacacaaaaataaaataataaagtaaagattgttgacaagagatttctgtagggaaaagcttctccacatggaatgagaagcagcgcagggttctgaagtgtaag

SEQ ID NO: 749394 - DNA, 590 bp, Homo sapiens
cttttgagcttctaagggtccaggtcctggcagtttagggtttccaaaggtgcttttggctttcaaccccctttctgcctgctaagaagtgacagatgttctgccagggcaggtgtctatgcagataagcctgggtatcgtgtagaccctcactgcctgytcttctccatgctatgctcctgcagtgtggattttgtgaagtggtcctcgcaggggatgctgcggatgagtccagatgccatgaacgccctttttaagccgaccatcgatagcatcattgagcatctccgtaagtatcagccaggctcggccactcggcgaggcagagctgagaaaggggatgggctttcccagcatcaccagctggtgcctgtggagtcaggttggcctggatctgggagccacaggcaagggccctgcaggactgggcagggcttgggcatgtatgggagaggttactgggcataggctctggatccctctcctcgtactgcaaagctgctgagagcttgtctcacccaagctttccgtttggcctcaaaagtcagagagctggtaatgacaaagaggaagaattaaataaacaaaca

SEQ ID NO: 749395 - DNA, 645 bp, Homo sapiens
aaataaaataaaataaatcaaaaaattagctgggtgtggtggtgcgtacctgtgctcccagccactcaggaggctgaggtgggaggatcactcgagtgtgggaggtggaggctgcagtgagtggtgactgcacctctgcastccagcctgggtgacagagagagaccttgtctcaaaataataataattattatataataaaataaaaataaataaaaatattgttctgaggagggctctatagatttcctcaggtgaccgaagagtccatgaaacaggaaggttaagaattggactcaagggagagccctcttcctacagggaagacacaccaactcttgtgatcttagactagctccaggtatggtggaggatggaggagatggtctgcgacagtgccctgcagctatgcagggagtgactgctgttccttgttgctgggcagtccctgtggatgaacgggatctttgcccttcgcgtgagaaggacgcagtgcccaaacagcttgctctggcggaattagtggtctctgactcgtggctggcctgggtgcctgcctcctctaggtaggtcgaagctccttcagggccggccagcccttgtccatgttctaggggaagggtggctgcagtcccctagggagtg

SEQ ID NO: 749396 - DNA, 509 bp, Homo sapiens
acccatttccttgaattcttttagaacacttactttactttcagactctttgcaggggtttgccctacaggatcatggaatttgtgctctgggaggtgggtgccataattattcccattcacagatgaggaaaataaggcttacagtaactaagatcacaaactaagaagcagcaaagttgggattccactccaggtctatgacaggcaggatgaggcaggaagaataagtatgatttttgtcctcattctacagatggggagactgggcatcagagaggttaggtgacctgtgcaaagccacacagcaaaagacagaacctggtcttggagccagggatcctgagcccaggctgggtgttatctcaccmctgatcatagtgataactgcagctagtgaagtgctcagtgtgccaggtgtcttttcagggtcctcttggtccttacccaggaagagggatgtcctggaaagaggctgaatgggacacaggcctgtctgagcccgcaggc

SEQ ID NO: 749397 - DNA, 532 bp, Homo sapiens
tttctgatttaattctgctagatttcattttctaagtgctaaccatgaaccactagattgatttcatgaccaactaatggatagatgttcaaccaaactaagtttgaacctctctagaaggagccttctctgcttcaccatctgatgaggagraggaaggtagtatcaacttgtatttctctagtgttcactacagggagcaaagggataaagaccgcgtcctccagacttagatcacccaggtttaccctgactcagctgtttcttttcttttcttttctttctttccgttttttttttttttttttttagacggagcctcgctcccttgccaggctggagtaccatagtgcgatcttggctcactgcaacttttgactccctggttcaaacgattctcctgcctcaacctcctgagtagccgggattacaggcgcgtgccaccacacccagctaatttttgtatttttagtagagatggggtttcaccatgttggccaggatggtctcgatctcctgacctcgtgatcca

SEQ ID NO: 749398 - DNA, 423 bp, Homo sapiens
tgtgatggagagatcagggagtacgcgaacctctaatagggtacctgaccttgcctggggtccaggaaagcttccctgaggaagtggcatttgagtaagcattaactggtgaaggcagacagggaataacattggagaaaagaggctgggagcagtggctcatgcctggaatcccaacactttgggaggccaaggcaactggatcacttgcgcctaggagttcaagatcagcctgggcaacatggcaaaaccctgtctctgcaaaaaaaaaaaaaaaaaaatgccagstgtggtggcatacacctttagttccagctactgtagaggctgaggtgagaatgtcacttgagcccaggaagttgagacttcagtgagccgtgatccactgcactccagtgagccgtgagccactgcactccagcc

SEQ ID NO: 749399 - DNA, 644 bp, Homo sapiens
caaagagtgcgcagcagcatgatttattgcaaagagcaaaagaacaaagctatcacactaaggaaggaggccagagcgagttgcctctgccggctcgggcagcctgcttttattctcttatctggccccacccacatcctgctgattggtagagctgagtggtctgttttgacagggcgctgattggtgcgtttacaatccctgagctagacacaaaggttctccacgtccccaccagattaggtagatagggagtrtggacacaaaggttctccaaggccccaccagagtagctagatacagtgtcgattggtgcattcacaaaccctgagctagacacagggtgctgattggtgtgtttacaaaccttgagctagatacagagtgctgattggtgtatttacaatccccgagctagacataaaggttctccaaggccccaccagagtagctagatacagagtgtcaattagtgcattcacaaaccctgagctagaaacagggtgctgattggtgtgtttacaaaccttgagctagatacagagtgccaattggtgtatttacaatccctgagctagacataaaggttctccacgtccccaccagactcaggagctcagcttggcttcacccagtggatcccg

SEQ ID NO: 749400 - DNA, 610 bp, Homo sapiens
agttaatatgctggaagaagaggatagcttttagtctatttccagcacacggcctacactcactggcaccccatacaacaggaatgaatgccgacttagcatttttgccttcacagcgctggcaactaaaaggctcacagatactctgatctttaagcagataatcatggaattctcaacatcatatccactaggttaggctgagggttcatctataaaagtatttttccaaaaataatgmttaaaagagacttctagaaacagtgggactgtatcaggatcaacagaagacttcttgacccaaagattcaaatatagaactaggaattgattttcacatgtagtttttaggtaaaggacatctctttcagttgattcctacagccaagactagctttgatcctgggagattcagaaacctcaagatgggtagctggcttgagtaacatcctagataatagtcccagtcaaaaaccccattgaggttgaaggactggaaactgacctgtgtgaaaaagagctatcagtgcaggaaaagactcatgctgattttgaccttcctctggcccttttccctcaactgcttggtggggagtagcgaggagaagga

SEQ ID NO: 749401 - DNA, 596 bp, Homo sapiens
tgaatctacagggctcagtgatgagggctgagtatttttgagaagaagtcctcactggtggtgtgtgtgtcacattgcgtcccatcaggaggtcctcgatgtcgggttggcccacagttagcgatgctgagattgatcgcggccttaggctggygaccctggtagttacgtccccccttgtgactataacagtggttctttggctctcggcgaagatccagttccccatcagtctttcacctaatggtgttggcgttcttgtccaaatcaatcacgtaattagaagatggaatagggcaatatttgataatctattattcggtccacattgcttagcagacattcttcaattaaagaaaaaagagccttctctaactaacggggctgtctggatagggacaaatgagtttttctctgggggttttctttgaggacttgtgggttttcatcttgcatcctgcttcactcaaatgctgccatcagtacttgtgaggctcaggttgtctcatcttaggcagcaggagcctcttcaggtgcttgggcagccccttggttagcctccgtgcctccaggcgctatgcgacattccaggctca

SEQ ID NO: 749402 - DNA, 620 bp, Homo sapiens
ggggccgctggagttctggaatgaggttcattcaggtttaggaaacacaggaattctgccttgtgtctaggcagatctccccttcccacactatcccccagtagtgccacttcccctgtttctgacccctgggtcaactctcagttgaatatcaggatttccccagctccaagcctggctcctcaagccagagatggacagttctgcaaagaggactgggcacraagtatatgcctggacaccaatgtctaggggcaacagagggcagatgctccaccccctggatgctttgcaccaatgcacaaagtgcaggttacctcctgggccactgcacagatgatttttctgcagggagtagaggaaccccgaagagaagaggtgacatagttggggcctgatgtgtcttgatctgctctgtatccgctttgtgtggacccttggaagtgagcagagaccccttaaaggcctctctagggctcttgctcctctatgacttggaacatagctttgcttcccattattctaaaatatgtctaatgcctgacatatattattgccaccatgaggtggagttgaggggtgggacaactcttgggggtctaggttctgggcagatcatc

SEQ ID NO: 749403 - DNA, 624 bp, Homo sapiens
gtggggtgagtaagcctccttcaccacccagatggggggaaaagggagaagagaggtgtgtgcatgcagacagaggcgctgctaccaccctcttcactcatgccctgtggcatcaacacttgccaagcctcaccatggggaaaacaaaggtggggggagcctggggagggaatgttgtagttcaaaggacatcagaaaagacggcttaccaaatgggagaaactttctaccagtctgaaatctgataagagacttacttctgtagggtatgtaactgagcatatgatccttcccaacagggcctgggacacyggcttgatcatcatgaggcccaggacggagccacacataggtcatgatagtggaagcagcacagggtgtgaagctgatggccacaaccgaccccttccagccccactgtggaaccggggtggcagttcagagtttgggtgtctgctgtgtgcagaagggagaccaatcagagccaggcttagacgcaggcaaatcatgggccctttcgaaaagacaggctggccaagtgcgatggctcacacctgaaatccctgcactttggaaggtcgaggcaggaagatgagttgagcccgggagtttgacaccagcctg

SEQ ID NO: 749404 - DNA, 540 bp, Homo sapiens
agcctcctagaagctttgacaaaaatgctgatagtgatatgaacaataaggtccaagctgaggtggtctcagatggagatgaggaacttgttgggaactggagcaaaggtgactcttgttatgttttagcaaagagactggtggcattttgcccctgtcctagagatttgtggaaattttgaacttgagagagatgatttaggttatctggtggaagaaatttctaagcagcaaagcattcaaaaakgtgacttgggtgctgttaaaaagcattccatcttaaaagggaaacagagcacaaaagttcagaaaatttgcagcctgatgatgcagtagaaaagaaaaaacaatttttttgaggagaaattcaagctggctgcagaaatttgcataaatagcaaggagcctaatatgaatccccaagaccatggggaaaatgtctctctaggccatgtcagagaccttcacagcagtccctcccatcacaggcctggaggcccaggaggaaaaagtggttttatgggccgggcccaggggagt

SEQ ID NO: 749405 - DNA, 624 bp, Homo sapiens
cagaataagatctcaccacagaggtatgagcaaaaagaaacaggatatggtctgttcctttcaagcttcccacaggggccaggagccccttttgcaggatgtcttaataaatgggacataaaggtacccatttgtctagagtgcagtgttggctgcagacagtgaacatatgaaatgatgcccttaaaatgccctttggctcaaaacgagtccccttccctgaccctagctttagaaatcaaaaggaagatgatcatgtcatgggaccccaaattacactcacactgcaggtgaaacactggggtgactttcacacgcacagctaagaaggaagccagtttccgtatgactgcaagtgcacagaaaatctagcatgccgaacaggaggagcagtggaggggagtgctcgcttaggagggacccaggagcrtgcagagcctctgtcctgaatctgctccctctatgtaaggaggccatgaataaggtacccattccaagaacaacagcaaggggagggttaggagacattctcatccaatgtgaatataaaaatcttaagaagaaaacaatacccactgctttctgttccattgtcccagcttactgtgtgattttctgttagga

SEQ ID NO: 749406 - DNA, 614 bp, Homo sapiens
ttcatttggctgcaccagagatcaacaaacaatggtaaggatggggggagtcctgagaggtaagaccagatcatgaagggtgtcttgagccctgtcaagacatgatgaggtcaaccaagcaacaataacatcacaagacaacaggtttctttctgggtcctgacagtgtatgtaagttatgcggcttgaacttactggacggcattaatgagcttctrttcatgtctaataaggaaaaaagagggttctatcatgggttatgccacatttgtttttcttggtagttgggacagttgctttgttaattgccttttttgaacatactctcctatacccacagcacatttgctggagtcatgggggtggggtgtgataatctgcactattcatgagctgtggccaggtgatccagcacaaagatgcccagctgtggggaatacattcattcttccctaacacattaaaaccacaaccaaggaaagctggctgaataaaactgagtggccccaaggatacaaacacctccaacacgagtcatttatttatgaaaagtgaataggatacaaattaaaagcttgggcgcaggagccagactgctgtgacttgaatcctgg

SEQ ID NO: 749407 - DNA, 665 bp, Homo sapiens
ttgaacttctgactgtgattccgaatccttttttaaaaaaggattttgtagcactgaccccaaaggcagcacaaacacgttggtgagtgtgcattaatcgaggccattgaggatgttattttctcctttaagaccctgaccagaagctgaatatgccagcagcaaatgcaggcagtgctgctgttcccttcacagtcctcggaggcagtgaagcctgtgcttgagacgcgcagggcggartgcttgttttggagagcattcagcggatagcatttggtttcctccatttaaccaggtcacccaggcatggaatgcacagctctgccagacagaaagcgctttggatgcctgagaaacaacagcttgtccgggctactgatgcgaagagaggccatggtttcctttttctctgctctgaatggcagccttgacgtcacaacagctaggaaccactggagggacaaataacaaggcgcaagccagaagcgccctgctctgtcgcaggggcagggccattttcatccagttctgatgtcttctgtggccgctgcgagtcggcgggagtagagacaaatgactggagctttaggcgtaaaggcggtctctctctaggctgatcaaacagccctttgcccagtgctaattgccttcacggaacctggata

SEQ ID NO: 749408 - DNA, 626 bp, Homo sapiens
tgaggtgtgtatgtgtgtgtgtgtgtatgcacatttgttggcagtgtgtggactgagcacaacatatagagaggcagtgttctcaggacttctgtgctcctatttggaaaaattcggcagaagaaacaacagctctgagacactcagcccctttcatcagctctttctttgcttaattaaatacacagttccccccaaagcactctttccctgaggtcatagtgtcagtcttgtttcatgagaataatctgctatgaatatttactcactttcaaaaacaaaagagggttaaaaatctgatccaaaatgtcacttacgacacctacaacagaatctacccctctgcctccaggctgtcctgacaacccatgtcctcaacaggaatctgcrgtctgttctggaatctggtctttggactcaaatgatcttacctgggtagctaacaaagtcttctgtcttgttcctgctgttaaaaaatccaagtatgttcaggcattaaacaatggagaagataaagcaaaaataattttttaactacatctttctttttcaagtggtggttatgctcaagaggtgaaatttattgtggccctacccctgtttttataagagctttttatagtata

SEQ ID NO: 749409 - DNA, 655 bp, Homo sapiens
ataaggtaggttcttttagtatccacatgatatggtttgcctgtgtccccacccaaatctcatcttgaattgtagctcccacaattcccacatgtcgtgggaggaacctggtgggagttgattgaattatggggatgggtcattcctgcgctgttcttgtcatagtgaatgastctcacgagatctgatggttttgaaaaaatggaagtttccctgcacaagctctctctttgcttgctgccatccatgtaagatgtgacttgctcccccttgccttgtgctatgattgtgaggcttccgcagccacatggaactgtaagtccaattaaacctctttcttttgtaaattgtgcagttttttcagcagcttgaaaatggactaatacaccacattttggagataagaaaaattaagacaaagtttaaacgacttgctccatttccatagtgactaggtgacagagctagtattcaaatccacatagcctatatttacctctgctgatataatgtacttattctttttttatttagaaaaagcatttaagagtttgatttattgttgtttggtgtataacattccatatctatcacatctgctgtgaggattataccctttattggtataaaaatttccttttttaaatttaatgta

SEQ ID NO: 749410 - DNA, 530 bp, Homo sapiens
ttaattacactaaataaaacaattgaagcaataaatccattaaaaactatttctgaaacattcaaacgttttttgctttggtgacttttataaagaatggctacagctacttctcaattgagtaaagggatgaggcaaagccaatagtttgaatrtttttaactgacagttcctaagtctacaaagttgccccatgtggctatagcagaaatagttgatgcagaagaactctctgcccgccattccacccacattaaaaatgctagataaaacaaagcaaaataattttggaacataaatttgccctgagtacacttggccataaaacctgtgggcagttgttatcatatgaacttacattaaaatatacatatatatggtgtacagtattctacattgtgaacctatctatatatgcaatgttagaggagaattaagaactttgtaagtgcatgttacgtgttaataatcttcgtgatattcacattataatcatgaagtaatgcaaactaggtaataaacctttagtc

SEQ ID NO: 749411 - DNA, 602 bp, Homo sapiens
aattgacagtaataagttaaggatccatcttgtactctatctagaagaaaccataaaaaattaacacaaagcaaatagaggaatgaaaatggaatataaaaaatattacttcagaagacaggaaaagaagaaacagataaacaaaactagataagataacttggaaataaataacaagagggtagacttacacccaaccatattattaattatattaaatgtaaatgaattaaactttctatttaagaggtagaaactatcagactagattaaaaagcaaaaggcagccatataatcctaaaggagacagaraaacaatttaaataaactggcacaaatagatgaagagtaaaaggatggaaacagtaagcataagaaggatggtataggtatatcaacagaaaataaacttccagacaaggaatattaccagtaataaaagggtactgcatataatgataaacaattcaattcaacaagaagatatagcaatcatataacttatgcagttaataacagaggttcaggatacatgaagaaaaaaactgacagagctaaaggaagaaatagacacacccacaaacatagttacagattttaat

SEQ ID NO: 749412 - DNA, 631 bp, Homo sapiens
aaaacaaacttcaagtctagatgttttcactgttgacatttatcaaatatttaagaaagaaatagtatcaatattaaacaagttggttcagtaaatagagcagggaaacacttccccactagttttttcagaagaccaacacattagaggaaaaaaaattgaaaacaaatatctgtcataaatataggtgcagaaatccttaacaaaatatcaaattgaatccagcactatagaaagagctaatacatcatgatcaagttggctttctttccaaattttcaaatgtcttaacactggaaaatcaatcagtgtaattcattatattaacagagtacaggagaaaaaaaaatacaatcatcttaatagaaggaggaaaagcatttggcaacatttaacatctattcatgataaaaaaaaaaacctctcaacaaattaagaataagaggcaacttcctcaatatgacaaaaragcatcatatttaatggttaaatattgaaccattaatattttcctccttagactgaaagtcttgggcaggacttccaggtccaggaaatctttaaaggtagctacccaattggctggtccctttactcttccctcgtcccctgtctcttttttcctagaatg

SEQ ID NO: 749413 - DNA, 605 bp, Homo sapiens
aatataaaggtgccattgaaaagggcttctgttgcatgaaactgactgattctttgagattaatccatggcttcagattggaccagaactcgagtgtcattgaattccaaatctgatagttcttcacagctctgctctttcacctgagggccttctttagggcacaatgtgtgcaacttcctctgagaacacaggattgctttgtatccctagaaacaggctcagaagacacaacattaagcatgcagtgttaccagggtttgcaacctgtgatttttttttttttttttttgtaacgctggttgctgtgacaacaatttttttacagctgctatgaacgagagtaagaaggtccagttgaactttccagagatgattgggaagctcttcttgtcagaggrgccaaggttggatctactagggaggaaggtgggaaaagtttgaaccatccgatcaccatattggatagctctagttcatctaaaagtatctgggccactcccataaaagatttgtgatccatgcggccataatctccccagacgatgatctgttggcaaaataaaaagtagagtgatgtcagtgtaactgtgtacatagaaaaa

SEQ ID NO: 749414 - DNA, 590 bp, Homo sapiens
gtggataatctgaactcaggagttcaagaccagcctgggcaacttggagaaatcctgtctctaccaaaaatacgaaaaattagccgggcatggtggcgcacgcctgtagtcccagctactcagaaggctgaggcaagaggatcacttgagcccaggaggtggaggttgcagtgagccaaggttgtgccactgcacccagcctggatgagagagtgagggcctgtataaaaaaataataaaataaaataaaygacataaaaaggaaagttacagaatacaaatgccaataagcgtgaaaaaaatgttaactcttacaagtgttcatggacaaatctatcctttgttgataggtttgacagagtttaaaatgattgacaatgttaactcttggtgaggttgtgaagatttcctcacacactgctggagaaagtgtaaattgccctctccttttgggaggacaatcatgtaacatctaacagaattgtaaatgcacatagcttttcatccagcggttcccttcttggaatttacccttagatggggtccaagaagaccatacacagaaaaaataagctacataaggtggaaca

SEQ ID NO: 749415 - DNA, 670 bp, Homo sapiens
aattctagatccttgaggaatcgccacactgtcttccacaatggttgaactaatttacactcctaccaacagtgtaaaagcattcctatttttccacatcctctccagcatctgatatttcctgactttttaatgattgccattctaactggagtgagatggtatctctttgtggttttgatttgcatttctctgatgaccagtgatgatgagcattttttcatgtgtctgttggctgcataaatgtcktcttttgagaggtgtctgttcatatcctttgcccactttctgatggggttgttttttttcttgtaaatttgtttaagttctttgtagattctggatattaaccctttttcagatggatagattgcaaaaattttctcccattctgtaggttgcctgttcactctgatgatagtttcttttgttgtgcagaagctctttagtttaattagattccatttgtctattttgcgttttgttgccattgcttttagtgttttagtcatgaagtctttgcccatgcctatatcctgaatggtattgcctaggttttcttctagggtttttatggttttaggtcttacatttaagtctctaatccatcttgagttaatttttgtataaggtgtaagggagggatccagtttcagctttctacatatgg

SEQ ID NO: 749416 - DNA, 670 bp, Homo sapiens
aattctagatccttgaggaatcgccacactgtcttccacaatggttgaactaatttacactcctaccaacagtgtaaaagcattcctatttttccacatcctctccagcatctgatatttcctgactttttaatgattgccattctaactggagtgagatggtatctctttgtggttttgatttgcatttctctgatgaccagtgatgatgagcattttttcatgtgtctgttggctgcataaatgtcttcttttgagaggtgtctgttcatatcctttgcccactttctgatggggttgttttttttcttgtaaatttgtttaagttctttgtagattctggatattaaccctttttcagatggatagattgcaaaaattttctcccattctgtaggttgcctgttcactctgatgatagtttcttttgttgtgcagaagctctttagtttaattagattccatttgtctattttgcsttttgttgccattgcttttagtgttttagtcatgaagtctttgcccatgcctatatcctgaatggtattgcctaggttttcttctagggtttttatggttttaggtcttacatttaagtctctaatccatcttgagttaatttttgtataaggtgtaagggagggatccagtttcagctttctacatatgg

SEQ ID NO: 749417 - DNA, 535 bp, Homo sapiens
cctggattatactcttttccccttagagttcaaaagcaatagtacaaaattatctaaaataaaattacttttaagagaaaaattgtgaaattaaacaaacatttgtggaatttttgttatcttgacataatttttcccaaaatttttaccataattatagctcttttaatggactcagtagtacagtttaagtttgggatacataatatgaaattacaacagaaagggttgacggctcagattaaagattttacctacttaagtgatttggtcatggtattcctaacggtgaaaagtcttattttctctatgmccctacaatgatcacaagtaatatcttagaatgctgaattaatcataattttttttacctacttctaagtgtatcttttcataaaaacacatgctgcaatttaaatttaaggatgtttagatgttttccaaaatactctaaggactattaattccaagatatgcttcaatagacaaagggttatttggtcaaagtgagtcaggaaaaagtcacctattctat

SEQ ID NO: 749418 - DNA, 634 bp, Homo sapiens
tctgtacttctttggacagtgctccttattttttacctcctgcttctgcagagatagaaacaaaaagtgtaacagctttgcaatcactatgtggtaagaaatatcagcgaaggctctgagcatcatcagatgcaaagaactgtgtaaataaaaagtgctcttgttaaggaggcagaaagaaaaggtatttaaaacaattttaaacaatgtcatgttgagtgggwtgaagattttctaaaaaatctgtagaagcacaaaacaccattgttttatttccatttaaaacagtgtgcaaattgttaatataagaaacaaaaagattcaacctaaggaaaaaaaataagccttattttcattgtaatacttaaatgcaggttaatttatgcctatcttttgttttcattgtaatatttaaatgccagattaatttctgcttaccatatttttccctttcttttaatcatagtaaaagaaccaggccttcacacaatttacaaagaaacagatggtgagtaatcctcaaattccagtcttaacttttataggaaagtctgtttttgtagggtgatagatattagaaggaaaaagaatctacacaaaggagagagcctagtttgccaatagtttcacatct

SEQ ID NO: 749419 - DNA, 598 bp, Homo sapiens
tcccagtggctccccttttgtctttttgtaccacctgatacaagtttgctgtctttgcattttctctgcttctggacattttggcaattgttaactacattatttcattcttggtctctgaatccagacgtttgcttttccaattgatccatgttgcttatgaagtgccttgtcatctattaatccaggatagttactgagttattgtaggtggcacagccaccaacttggtgtgtgtgtgtgtgtgtgtgtgtgtgtgcgtgygtgtgtgtgtgtctcctaagggaacagaacactgctgagttcaggctgattattagctcgtggactgtcagcaaaatacattcacaagaaggctatgtgctgatttgtctttcgcagtgaagtcatgttgctcatgttttatgtttttcagagttcattagtttctatttgttctcaattaatatccagctcaatagattgtgtaagtggaatacccccaaattgaaattcacccacttaaaataaagtgaaaaacatgtcacccattaaactatagttgaaaatatgtacccattagttctgtgtaccaaacactggataatgggtaagggca

SEQ ID NO: 749420 - DNA, 541 bp, Homo sapiens
aaaggcaattccctcatactagttctggtgtcattctccccatctctcccttcactcctaccttggtcttttttctgcttcccaccttggctagtggtctctacccaaaatgcttgtttggcttaatggttagaattcagggaaaaagagatccctaatttgtaatctaaattaaggttatacatgtgggaaataaaagagagaccaggtagtaaatagaatttgaaggaaaaaaaamaaacaaactagtctttaattcctacaagattataatcattaatcatgcttttatatcatattatctcttaacatttaatttctatatgtaatgttcatgaggaaaagagaaaatagcttggcttattttcttaccaaattgttgttcttagtatcttctagacgttccagaactgatgtcagatttgggtcttcagaatccacaaaccatatcggtgaagaagatggataggattcctgtttaacacagagacacatgttaaacatttacatacagactaacccaaatatgcaattaaaccac

SEQ ID NO: 749421 - DNA, 600 bp, Homo sapiens
tatggtatacaaattatatcacaataaagttattttaaaaaaagggaatggttatacattattatacagccatgcagtaagttactataaagctgtaaaaagaattaggaagctcaggctgggcgcagtggctcatgcctataatcccagcactttggaaggccgaggcgagtggatcacctgaggtcagaagttcgagaccagcctgaccaaaatggagaaaccccgtctctactaaaaacacaaaaattagctgggcttgatggcacatgcctgtaatcccagctacttaggaggctgaggcaggaaaatcgcttgaacccggaaggtggaggttgcagtgagccgagattgggcctttgcactccaacctgggcaacaaaagtgaaactccatccccccccmccaaaaaaaaaaaaaagaatgaggaagctctttatgtactattatagatgcattctcagaatatattgttaaagagcaagtgcagaatggtatatataatatgctgttttttacttttaagaaataaaaatatatacttgcatttattgttactggcatgagaaagcactaaatgcataaaaataaactaacaaa

SEQ ID NO: 749422 - DNA, 629 bp, Homo sapiens
ctgcatattcagaaagataccaattccatttaaaagaatcaatccaaacacatacccacatttatacatataaataatatcagaagaaaatgattattaagaagaaaggggctaatagtgaaatagcaaggggtttttatcttacacatactttgttatatttttcagattttcacagtgaatagatacttcctctagaaaagaaaaagtacattgtgtagcwcccccaccaatgttttagggatgagaaaggaaggcatgagtaattgttctgaaactaactttaacaaggcctgacttgtcttcacccatctccccacagtgagtttggggaaagaagacggccatgcagagttgtaggccattcccctaactccattaacccatgtgctccagtggtcatggggccacgtgttatctcacataatccttgaactacgtggggccaggcaagttacaatagctttaagaagaggcttttcttccacattttatattttgatattgcatttttcaatcgctgcagagctctaaatcttcttccatgttatttttagtcattctcgcagggggaaaaaaagtcaatcagggcttctggcatgtcagctttttataaagggaatgcaaag

SEQ ID NO: 749423 - DNA, 612 bp, Homo sapiens
aaagaaagggataaattcactaccagtcagcaagccatccctagtacggatccccactgggacccagactcagatcatggggactggagtcacaaacatctgttgacctgtgttctagaaggactaaggagaattaggaaaaagcccatgaattattcaatgatgtccaccataactcagggaaaggaagaaaatcttactgccttgctccagcggctacgggaggccttaagaaaatatactcccctgtcacccgacacccttgagggttaattgatcctcaaagataagtttattatgcaatcagctgcagatatcaggagaaagctctaaaagtgagccctgggccctgaacaaaatctggaggcattattaaacctggcaacctcagtgttctataatagggaccgagaggaacaggacgaaaaggaaaagcaaggtargagaaaggccgcagccttagtcatggccctcagacaaacaaaccttgatggttcagagaggacagaaaatggagcagggcaataacccggtagggcttgttattagtgtggtttgcaaggacactttaaaaaagactgtccagtgagaaacaagcgccccctcacccat

SEQ ID NO: 749424 - DNA, 625 bp, Homo sapiens
tttttaaataaaattagctcataaagaacattgatgaaaactggcatctaatatgctgtgcattgaagtggttacttaatttaaaagctattctatactattttaaggagacccacctgcatagacttaagccccmccctgattaatgatgttaatgattaaggggcatgttttgctcttgtcagtatgggccataatgtttcaaaatggtaagaatgttaactacgtcgtatacttctgagcaatgtttctcaaaatgcatttcttttcatgttaacaggtattaggtaaacaagctctctagctaagtaattttgttagctatttaaagaaatttagtaagttttgttaccaaagtacatctggatctgctaaaaagcatttaaatcttctagaagcaggtaaaatagtagtccccaagattacttgaacgtagagccctttgatcataaatcctttctctactctgatgttttgtgggattcactttggaaaatgctgccataaaaactaagaacctcagggctgaaaagactttaaaagctgtttaatataatcctccaatttattgtttctgacaacacttgaccagttttgccttctgttgtttatacttcaaaataat

SEQ ID NO: 749425 - DNA, 595 bp, Homo sapiens
cctgacttcaaattatgctacagagctatggtaaccaaagcagcatggttctggcataaagacagacacatagattaattaaacaaaatggagatcccagaaacaaatccacatatatatagtgaactcattttcgacagaggtgctaagaacatacactgggaaaaagtttcttcaataaaggatgctgggaaaactggatatccatatgcagaagaatgaaactaracccctatctctcaccatatataaaaaatcaaaaaagaatagattaaagacttaagcctgtgacctcaatctataaaactactacaaaaacattggagaaaatccccaggacattggtctgcgcaaaatattcttgagtagtaccctacaaacacaggcaaccaaagcaaaaatggacaaataggatcacatcaagttaaagaacttctgcacagcaaaggaaacaatcaacaaagtgaggtgacagcccacagaatgggagaaaatatttgcaaatttacccttctgacaagggtttaataaccagaatgtataaggagctcagacaactctataagagaaaaaacaataatctgatcaaaaaatg

SEQ ID NO: 749426 - DNA, 719 bp, Homo sapiens
tgacaaggacagtcactttgctgactggtgcaaatgatgccctctaaaccttggtggggagggaatgtggtataaagaaccaaaaaacctggggcctggcactggctctggctttctcgggctatgcactagtgggcactggtgtcttcatcttaaaattgaggcagttggattaaatcacttaagtttcttctcctctccgagttaagaaatatatggctgggtgcagtggctcgcgcctgtaatcccagcactttgggaggccaaggagggtggatcacttgaggtcaagacttcgagaccagccctggccaacatggtgaaaccctgtctctactaaaaatacaaaaattagccaggcgtggtggcgcatgcctttaatcccagctactcaggaagctgaggtaggagagttgcttgaacccaggaagcagaggttgcagtgagccaagatcgcgccactgccctccatcctgggtgacagagkgagactcagtctcaaaaaaatcataaaaataaaaataagaaatataacatgctatatgagttcatcacagaacccaagtctctcaagaggcaaggggaccaagtcccagggccattcccagaagcaagtatgaaaattagaagtgccaagttatcagtcaccaatctttgcctcttctgagcaacaaaatccatatggccaaatggatatgtccaattcaggggatcctgca

SEQ ID NO: 749427 - DNA, 719 bp, Homo sapiens
tgacaaggacagtcactttgctgactggtgcaaatgatgccctctaaaccttggtggggagggaatgtggtataaagaaccaaaaaacctggggcctggcactggctctggctttctcgggctatgcactagtgggcactggtgtcttcatcttaaaattgaggcagttggattaaatcacttaagtttcttctcctctccgagttaagaaatatatggctgggtgcagtggctcgcgcctgtaatcccagcactttgggaggccaaggagggtggatcacttgaggtcaagacttcgagaccagccctggccaacatggtgaaaccctgtctctactaaaaatacaaaaattagccaggcgtggtggcgcatgcctttaatcccagctactcaggaagctgaggtaggagagttgcttgaacccaggaagcagaggttgcagtgagccaagatcgcgccactgccctccatcctgggtgacagagtgagactcagtctcaaaaaaakcataaaaataaaaataagaaatataacatgctatatgagttcatcacagaacccaagtctctcaagaggcaaggggaccaagtcccagggccattcccagaagcaagtatgaaaattagaagtgccaagttatcagtcaccaatctttgcctcttctgagcaacaaaatccatatggccaaatggatatgtccaattcaggggatcctgca

SEQ ID NO: 749428 - DNA, 565 bp, Homo sapiens
ctgaacactgaagcaccctcagggccaaggcaggcattctcctgctggatcgaagggcccctgggagacccaggatgcccatgaagaaggttcccatccctggggccctgctaaagcttcccagtgggggccacatgtctcccacacttctagggcagtgtttcccaaacttacctgaccatgaggggcacctgaggctcttgtcaaacggtcacagttctgagtccttattgcattggaatccccaggtgctggaggtgattcttatgaataggcaggatgggaaaatactgcctgatggccttgttcctcagtgcaagggtgagggaggggtcctagcagcgctagtayctcttggggactcgttagaaacgcattttagagtttgagaccagcctggccaacgtggtgaaactctgtctctactaaaaatacaaaaattaccagcatggtggtgctggcctgtagtcccagctacttgggagactgaggcaggagaattgcttgaacctgggaagcagaggctgcagtgagccaagattgtgccactgcactccagcctggg

SEQ ID NO: 749429 - DNA, 616 bp, Homo sapiens
ccaaggcctcagcccagagggactgtgctggtcccagaaacagcccacatagaaatggtttggacgattggctggccttgtaagggtggctggacgggggccagctggtaaaacatcgcggtggtgaggaaaggtgcctggagctaatgtgtatagataggagtatcattgtgccacsgggccaggcattccccacccagctgacctgattatggatggaggacaagatgctgctgctgccagcttccccagacccccagaccatgcagcacttcctggcctcagacagttcctcctctatgaagatttgtccaatcagagcagccacaggctgccccagcctctctgtattcacatcctggaccttcctggcctgacaccctcaattttatactgcatcttgtttgcttccataaatgtcatcctgtgtgtcagatcacatgtccccctttttttggtctcagaaaataagattgttatatttacattacttcattgagttttattttgtggaaggcagagggagagcgtaagtaatgagtttgttgtgtcttgctttccaacccattgtagatttcctattttttctttcctgttgtaaatgttaatcaatcaa

SEQ ID NO: 749430 - DNA, 573 bp, Homo sapiens
ttctgtgtgtccacaagcccaacaccatgtggaagccaccaaggcctggggcttgcaccctctgaagcaatgacctgagctgtaattggccccttttagccatggctgggacacagggcaccaagttccaagaccgcacaaagcagcaaggccctgggcctggcccatgaaaccatttttttcctcctaggcctccaggcctgtgatgggaggggctaccatgaagacctctgacatgtcctggggacgttttcctcattgtcttggtgattaacatttggcttctcattacttatgcaaatgtctgcagctggcttgaatttctcctcaraaaatgggtttttcttttctatcgcattgttaggctgcaaattttctgagcttttatggcctgcttcctcttgaacactttgctgcttagatttcttccaccacatgccctaaatcatctctctcaagttcaaagttctacacacctctagggcagaggcaaaatgcggccagtctctttgcatagcaagagtgacatttactccagttcccaagttcctcatctttatctgagaccacctc

SEQ ID NO: 749431 - DNA, 638 bp, Homo sapiens
agtataagtataaaaaggataaagtaataagtaacttttttcaaactggcaccactaatataaaagggcagggaaaaatgcatacccaagttttaacagcagttgtttctggggaggaaaagaggattcgaagtggggaaragaactgttatggtttaatctacatggttaaagtatgagtcctttaaaataagatgtattcctgtgacactcatatgttttaaaaaataaaaatatatttttcaatgttatttttggtacttcattttatatgaaatcctggatgctcacaactacaaatgtgtgtatatatatgtgcaaagatgaatgacatggcattacagacctagtgtacacggtatgagaccatggaaaagcactgttctaggaggctaaaggtcaggaccctgctcatgatataatgagatcatgcaggtatggtggcctggaacacagcagttctcctgctgtccgtgtaaaatgtgctacgtacttatcctctctcagcctcaggcttcctcattggtgcagtgcctgacatataataaatgctcaacaaatgttgaatgaatgactcctgaatcagaaaaatcttaatgcttaatatttattaagcaaactagaagtagagtccctta

SEQ ID NO: 749432 - DNA, 638 bp, Homo sapiens
agtataagtataaaaaggataaagtaataagtaacttttttcaaactggcaccactaatataaaagggcagggaaaaatgcatacccaagttttaacagcagttgtttctggggaggaaaagaggattcgaagtggggaaaagaactgttatggtttaatctacatggttaaagtatgagtcctttaaaataagatgtattcctrtgacactcatatgttttaaaaaataaaaatatatttttcaatgttatttttggtacttcattttatatgaaatcctggatgctcacaactacaaatgtgtgtatatatatgtgcaaagatgaatgacatggcattacagacctagtgtacacggtatgagaccatggaaaagcactgttctaggaggctaaaggtcaggaccctgctcatgatataatgagatcatgcaggtatggtggcctggaacacagcagttctcctgctgtccgtgtaaaatgtgctacgtacttatcctctctcagcctcaggcttcctcattggtgcagtgcctgacatataataaatgctcaacaaatgttgaatgaatgactcctgaatcagaaaaatcttaatgcttaatatttattaagcaaactagaagtagagtccctta

SEQ ID NO: 749433 - DNA, 623 bp, Homo sapiens
tgaggtcactgaactccactacaggggtagccgatatctctaagtggtagagttgggacacagcttcacagataattagttcagggctctcaaactgctaagtacattagaatcacctggagagtgttaaaatccccatgcccaaaaccgtcctccagaccagtgaagtcatcagtggttggaaagtttcccaggtgattccaaattgcagccaagtttgagaaccactgatctaggtcactccccttgtttctgcagatactgggacctaaagaagawgagagaattttgctcaagttcctagagctagtaagtgtctgagcggggacaaaccttttcttttctgactctcaattttgtcctttcctttctctgctttctcagttcactatttttttaatttgagacagagtttagcttttgtcgcccaggctggagtgcaatggcgtagtctcggctcactgcaacctccacctcccaggttcaaacgattctcctgcgtcagtctcccatgtagctgagattacaggcacctgccaccatgcgcagctgatttttgtatttttaatagatacagggtttcaccatgttggccaggctggtctcgaactcctgacctcagg

SEQ ID NO: 749434 - DNA, 485 bp, Homo sapiens
tcttgacctcatgatctgcccgcctcggcctcccaaagtgctggaattatagacgtgagccactgtgcccagcctacaataggtttttaatttcagtttctgacacttattaaaaatgaacttctatatcttcagatttataaaaaagatgcaaatacagctgatatactcacacgcagtttacctgatcactaacatcttacattattatagtttattgatctcattttgtttgtgcagatattgtttwcctgattttgtgtgttctttgtagctcactgaacatctttaagatgattactttgaattctgtcagacaactaatagatctccatcgtttctgtttttttcttttttcttttttttgacacatggtcttaatgtgtcacccaggctggagtgcagcggcataatcatggctcattgcagctcgacctgccaggctcaggttatccacctgcctcggtctcccaagtaagtagcgg

SEQ ID NO: 749435 - DNA, 619 bp, Homo sapiens
catattttaaattatttcagctctcgattattcatatttaaaatgctgtaataatacataatattgttattgtgaaaaatgaaataaataattatgcttaaggtatatagttcagtatcaggctcatggtacctgaccaatgaactatcagccagattctgtgtttttctcttgagccctgtttcttggtatttactctgtctggagttcttcttcattttttcctttctaaatattattatmatatcccattagaaattctgctataggaagcatactgatttctcttctttggtttcttaaaatacattgacagttaactctttagacgcaaatatattttttacataataaaatgtatttacttagattagatgtttactgaaagcaatcagcatgtcttccacatttctcagagccctgacacaatactggcactgagtagctcttcagtaaatgtctgctgaaaggaatacttttatcaatggacataagcactgacctgtagatagggtggtttaagtggattctgattaaccataccagtagaaacctttaatgtgtaatactctgtattctcattttatttttctaaagacttcccattagttggtgaagg

SEQ ID NO: 749436 - DNA, 556 bp, Homo sapiens
gcaaaacagacttaaacgcttcaaattttttcagagcaagtttcttttaaaaagccaaaaaaaaaaaaattggttgattggacatagttggtttatatatcaatgaacgaaatgtgtcagattttaatgagggaaagagaaaaatgatcagaaagaatgacagtgcagaaatacttcttacatgaattgcattgtctctgttccttaccagaaggttcctaacattaggatatacccagggaaatactacaytgtgaaaggtagatttttacaaggctccttttttttttctttgaaatgtgcttatctttagacacaatttttgtgatgccctgggtgtttttcctgtccccatgtcttctttctcagcatatgcttattccgtatgttcaatgccttatacaactttaaatacatactctgaaatttggaatgtttatacttttcagttgcaaaatactttatccttcaaattgctctcacatacaagtctacctgagaattcaaatgatggagtaaaatacatatacttttaattgaaaatgaatctgacttt

SEQ ID NO: 749437 - DNA, 648 bp, Homo sapiens
cacagtccagggtataagcatcaataataacgtcagttcacatatctgctgaggttgattctccagttgaaacaaaggtagggcaatgactatattctttaattgtcaagctttcaggcctaggaaaattcctaacaagaagtaggagcattatccttgtgggttccaaatggcaattatccttttctyaaccctaaattcagtctttttacagttatgtgactgtgtagctactctactcaagagaagctcacatttaaaaatcatttaatataaaatgaaacaaactaccatgattgagagtaagcaaaaacaataattaagatcctcaaaggcttaataatctaaaatgactatttataaatttttttgaagaaataaagatacactagaaaaacatgccgagaaaaaagatgataaaatagccagcagaattcaaaaagaatcaaggaaagcatctagaaatcaataatgaaatgttgaagctgaagaattaataggttgaataacatatgaggcacaggtaggaaataactaataaactagaagttacattcattaattcaataaatattcactgagcacctgctatgtgcatgttttagtcctttggaatatatcagtgaacaaatccgttagggaatttgc

SEQ ID NO: 749438 - DNA, 648 bp, Homo sapiens
cacagtccagggtataagcatcaataataacgtcagttcacatatctgctgaggttgattctccagttgaaacaaaggtagggcaatgactatattctttaattgtcaagctttcaggcctaggaaaattcctaacaagaagtaggagcattatccttgtgggttccaaatggcaattatccttttctcaaccctaaattcagtctttttacagttatgtgactgtgtagctactctactcaagagaagctcacatttaaaaatcatttaatataaaatgaaacaaactaccatgattgagagtaagcaaaaacaataattaagatcctcaaaggcttaataatctaaaatgactatttataaatttttttgaagaaataaagatacactakaaaaacatgccgagaaaaaagatgataaaatagccagcagaattcaaaaagaatcaaggaaagcatctagaaatcaataatgaaatgttgaagctgaagaattaataggttgaataacatatgaggcacaggtaggaaataactaataaactagaagttacattcattaattcaataaatattcactgagcacctgctatgtgcatgttttagtcctttggaatatatcagtgaacaaatccgttagggaatttgc

SEQ ID NO: 749439 - DNA, 613 bp, Homo sapiens
ttgttttcattcttttcaaaaggcagtttataatcagcaataggactctgatgggtcctattgaattcaggcctcataactttagacactctgtgattgaaatataggaaagaaacaaacttctaggactctcacagagagytgatttgttaaagattgctaatccttttgttttacagagtcaaagaaacatttcttttaaactatttacaactcttagcaagtgagtaaagtatactcctgggagcaaaatttggagcatattgctttctctccacctgatttctctagaatttagaaagtattatgagtattgtcaagttatgtcagtatagtaatttgcataaaagcaataagagtctgttttctttcataaaaggacacgatcagagaaactggttattttatgaaggctgtgactggaatggcatgctttctttaaggaatcagtgttgacttactgagtcaataaaagctcctcaggaagctgggcttataccttgtctacacatttcctgtacatggttcctgacctgtggtaagttaagaatgtcactttctgacaggcccaggaacccctgggacctagaaaggaggaaaattttcttggcac

SEQ ID NO: 749440 - DNA, 400 bp, Homo sapiens
caatgatagactggataaagaaaatgtggcacatatacaccatgggataatatgcagtcataaaaaaagaatgagttcatgtcctttgcagggacatggatgaagctggaaaccatcattctcagcaaactaacacaagaacagaaaaccaaacaccacatgttctcactcataagkgggagttgaacaatgagaacacatggacacagggagggaaacatcatacattggggcctgtcagggggtgacgggctaggggagggatagcattaggataaatatttaatgtagatgatgggttgatgggtgcagcaaacaaccatggcacgtgtatacctatataacaagcctgcacttcccacacatgtatcccagaatttaaagtacaatttaaaaaaaa

SEQ ID NO: 749441 - DNA, 635 bp, Homo sapiens
acacacaaacacactaagcatgatgcagaggattgtcaaatcccatgcagggaggacctgaaggaaggatcttcattcaggaggtttcatcccctctaggagtctttctccatttcttcccagggatgtccctagtctcctggttgtatgatgatgcccaagtatctccacctctcctgaatasttgtgctactcatcacctccaccagataatatggttttggtctcaacccccgagggttcaaactgccttcccatcaccatcagactctggggcggtggttattgcaatggaggagctatctctcaacatcttcagattggatattcatacctgcacaaaactcatgacaaggacatctttgcagaatttccaggctgtgggtacatagcccagcagtgtcccagctcttctgtgcctattcctaccaaggcaattacggcattgattgacagtgtccatatctatattgtctcctataggagactgcattccccagggcttagcccagtgcctggcaccttgtgggtacttcatatatgttttttaatttgcctgaatggaaggaagcaaagctgagagtccccacccttgccaggataattttactttctagtctactgggcctgttctt

SEQ ID NO: 749442 - DNA, 635 bp, Homo sapiens
acacacaaacacactaagcatgatgcagaggattgtcaaatcccatgcagggaggacctgaaggaaggatcttcattcaggaggtttcatcccctctaggagtctttctccatttcttcccagggatgtccctagtctcctggttgtatgatgatgcccaagtatctccacctctcctgaatacttgtgctactcatcacctccaccagataatatggttttggtctcaacccccgagggttcaaactgccttcccatcaccatcagactctggggcggtggttattgcaatggaggagctatctctcaacatcttcagattggatattcatacctgcacaaaactcatgacaaggacatctttgcagaayttccaggctgtgggtacatagcccagcagtgtcccagctcttctgtgcctattcctaccaaggcaattacggcattgattgacagtgtccatatctatattgtctcctataggagactgcattccccagggcttagcccagtgcctggcaccttgtgggtacttcatatatgttttttaatttgcctgaatggaaggaagcaaagctgagagtccccacccttgccaggataattttactttctagtctactgggcctgttctt

SEQ ID NO: 749443 - DNA, 635 bp, Homo sapiens
acacacaaacacactaagcatgatgcagaggattgtcaaatcccatgcagggaggacctgaaggaaggatcttcattcaggaggtttcatcccctctaggagtctttctccatttcttcccagggatgtccctagtctcctggttgtatgatgatgcccaagtatctccacctctcctgaatacttgtgctactcatcacctccaccagataatatggttttggtctcaacccccgagggttcaaactgccttcccatcaccatcagactctggggcggtggttattgcaatggaggagctatctctcaacatcttcagattggatattcatacctgcacaaaactcatgacaaggacatctttgcagaatttccaggctgtgggtacatagcccagcagtgycccagctcttctgtgcctattcctaccaaggcaattacggcattgattgacagtgtccatatctatattgtctcctataggagactgcattccccagggcttagcccagtgcctggcaccttgtgggtacttcatatatgttttttaatttgcctgaatggaaggaagcaaagctgagagtccccacccttgccaggataattttactttctagtctactgggcctgttctt

SEQ ID NO: 749444 - DNA, 550 bp, Homo sapiens
gtggaggaaccagaagcccagggatggttacatgaactgtccaagccaatgccactgggcaccagcagagaggggacccagagccaacctggctgactccataaccagatgaagactttcccctgaaggttatttctaatggtgagatcatttccttgcctttctcttgctccctccctccagctcatcgattgtgggtagcctasaaaacaaagtcaagattttggcttaatctcatcgaggtcaacttcctgaaaaaggtgggttgaaggcagtgcaacaggcaggaaccctgactggggcaactgtcagggatccatcaggacatgccccagggtagcttttgattatcatggaggacccttccccagctcttggtgtctgtatcttggcaaatcatcttccttgtccccatccctttgctgtcttggcagcagaagggatttcagttcgactttgggaagaacatccctgctctccctttgagaagaatcttggacaggttcctattctttcagggataccacagtgtggtcaggttgctacttct

SEQ ID NO: 749445 - DNA, 628 bp, Homo sapiens
tgttggggatgtgggggtgggattctgatacaggtgaccaccctggagaaaccctgccatagcgagaactattagtgtggccaccatcctgcaagaactcttcttgagctctagaataaaagacatttttggctggggaataaaaatctcgaacaacaacaagcatgttcttgctactgcctcatcttatttgggcttcagttctctcagctgtatttttttctactttctccagatcagggaatattgtccttgayaggaaacaagcaaagtgggaagattgctttgctcaaacctctctcaacatgataatgtccaccataaagagaggggctcgccccttgttcttcttgcttcaaaaattttcaatgtgcccatttttattgttgctggcactgccagctcactgtggaccacggtgcccctggtacccttcacacaggtctgtgtcatgtttatgtcttcctgggacatagacactggccccaccgctccataccctgcaagcccctttataatctgagctcaggacagggctccttgggtatcacagtgtttttctatgacaatacctttgttttctttatcagcttcatttgtgattatagcaccagaactcactgtttga

SEQ ID NO: 749446 - DNA, 618 bp, Homo sapiens
ttaaatcatcctgggtttagggtgggcataaaatccaacaactggtgtctttctaagaggaaagaaacagatacaagaagaagaaggcatgtgaagatggaagcagagattggagttatgctgccgcaaaccaaggaatgtctgggccaacagaagckggaagaggcaaggaagaattcgtccctggaaccctcagagggagcactgacctgctgacaccttgatttcagacttctggcctccagggataatacatttctgttgtcttaagtcaactattttgtggtactttattatggccagtcctaggaaactaatacaacatggaagttctttttgtatttcaacactatggacaacttcggctaaaagaataatttgcaaaagtccacgatccccagagaactaagcaaggagtgtgggatacagaggtgaataagattaagtgatacctgaggaacgtacagtttcctatgagaaatagaagaagcacataggcaattgcaaatcacagtgacaagcaaagtttgctaaatgagaggggacaacgaagctaagagatgagagaaaatattttttcagttttgagaatctgagaaaaaagttgactgtatttaa

SEQ ID NO: 749447 - DNA, 516 bp, Homo sapiens
aaccaaagctataattttgtctagtgggaaagttacactaaaattgcaatagaaccaaatctcccttctaataattatattcattagacagggtcatattttgacagtggcttacaaatactgcaaaataaaatatgaatatactttaataattaatattttaaagaataacaaaataagctctgaaattaattaatataattttatcagaaggaaaacaaatataaatgaattcttsctcgcttaccttatattctcatgaaattgttgagttaggtttatggaatgttaaccagttatgtcaatatgactctagctacaaattttaaaggcccttggtgtagttaaaatacatattgtgagatcagttctgcctcctggaatgcaagcatagtcttttggaaagtgttgaaataagtagttactgcactaacatagaatatgtccttcactatattttctacagttgggttgattagtactttaaaattgtatttctatatcaattataattag

SEQ ID NO: 749448 - DNA, 628 bp, Homo sapiens
attataatgtcagtgtgatttggcctcaagatcagaccgcaggaaacaaaatttctctctctgaaattctcctgtccttttatttggccaagataggactctaatctttttttggtttaaaagatccttattccagagcagtcctgccccatacatataggatgaaatcatagtaatagccatgtgcccttttgatgcaatcacacagctacatgtggacacctctatatgtgattggacaaaaaggctrcatggttgtcagtcacacctatttaagcctccataaaacccccaaaggacagggtttgaagaacttctggagagctgaacaagtggaggttcctggaggatgacttgccaaaggaggtttagggaacctaggtgccccttccctcatactttgtcctgtgcatcttttcacctgtatcttttgtaatatcttttaaaataaactggtaaacaaaagtaagagtttttctgggttctttgaactgcttcagaaaattaatgaaagccaaagatggagtcatggaaactttgacttgaagacggttggtcagaagttctggagtctaggactcgtaatagatctctagtggggggcatacatcaggactgaactctcaat

SEQ ID NO: 749449 - DNA, 595 bp, Homo sapiens
taaattaaaattcaacgtactcattttaattcctggcatttgcttacaaagaaaataatatgaacatgttataaatgtttaaaaaatgttatatcttgaagcaaataatatggagtttcctgaaatctgatgtacagcaaaatgtctatcaatcctacatcattacagcaacatttgtattgccccagcttctcctaggcatatattcaatggataaaattggaaataatagaagttaaagatttcttactagcatcatcagtgaagcatctatcatgtgtttaaaagcataagctcagatttttaaaatgagatagtatagttcattttaggcattttaaaacaatgaaaatgaaaagatgaaaaggcttttctgaaaatrgtattgagaaaaatgctaattccttgattagagtaaaaatctgggaatgatatgctgtggctcttgtatctgctttctgagtaataacacctttttcagaaatgtaatccatgtttgcagctgaatgcctttcttttttctgtttttcttttgtagatacttgatgcgtttgtgcaagcttaacaaatctaactacagcattggtggaggcta

SEQ ID NO: 749450 - DNA, 529 bp, Homo sapiens
gcatgtgttccaacaattacttaactgaattcttgagataaaactcacaaaagatgaaaaagatgaccttgatgtagatgctgttatgaacaaccacgaaacaattttctacctttatatgattcttacaactgaatcaaatctgaggagttatctgtcccagagcatgttcatgattaagttaactgcaaaatgtacacccaaatcaaataataatatatgagtgatagaattttaaaatactatctatctaaatatgcctataccttycaaagacagtgattttagtgtggcataatacatttatgatctagctaacttgtttaatgagataatttccggaatagttgattagggatgcaccactggcatttaaaaggctgcttatctttcccaaacatttaattacaatgacccagtggcatttccataaatacctacaagaacatcaactgtatgatgttctaaactatcaattcatatacctcctccttctcacattataatcaaagtttatggcaaccaggtt

SEQ ID NO: 749451 - DNA, 655 bp, Homo sapiens
cctagattcactcaagtaaacactcaattgactgtcattcttactagctagatgaaaggcaaaaggggcaagacttttccttgagaaaatgatttttatttctgtgtctacatattttcagcaaaatatctagaatataatcaaaaatcaagaaacaaagtaaaaaaatttgatccattgttaacaaaggaaaatgttaacagaggctaaatatgaactagatgttggagatagcaatggcaaaaatagaggttaaaaaaagtttaaaagaacctccagtatttccctaaatcatatgtaaattagctaaatatgtattatagataacttacagccaaaactataaaacgtatagaagagaacttgggtaaaaaaatttttgtcatcttatgttaggcaattatttcttagagaggayacaaaattaaaaactatataagaaaaataatgaaaattttatattctttaaaggttacttcaaagaaaatgagaaggctcttactggtggcttttcataaataaggacaaatatatatttgatacccaacttgtttatatatttatataaaaagaacagtcagaactcaataatataacaacaaacagcctaataaaaattaggcaaaatattttagcagacattataaagacatgt

SEQ ID NO: 749452 - DNA, 445 bp, Homo sapiens
cagatttgcttgagatttagcaaaatattctgaattaaaatacataagtcaaatcatttttactaactataaagtaatgaaatgcttggattttcagaataaatttagtctttataactcagcaccactggtccaactacttttctctccacttcatctatatttagtattctctaattttatatttcacatttattatctatttaagaaatacaataagtagagcatgttgagaggtctgcatacataataatatgtgctgtaaattcatttactaatgcakgtacaatttagaagtatgacttgattgtgtaagaattttaatttctccatactcctgatagacagagtacacaaagaaacaaataaacagattaagtgaatgcaccaaaagtcaatagcaggtgtcatttctgactggcaagattaaggtatttcttatatt

SEQ ID NO: 749453 - DNA, 530 bp, Homo sapiens
catgtgagatgggtctattgaagacagtatagcattggatctggctcctttatccaactttccactctgtgccttttaattggaatcacttaattgggaagacttgtttatctttttgctttatattgatatgtacagatttgagtctgtcattgtacttttagctagttattatgcagacttgatggtgtatcacttgctttatagtgtaagtgatctatatatttaagtgtgtttttgtggtggccagtagcagtctttcatttccatatttagcacttccttaaagacttcttgtaaggcaggtctggtggtaacwaattcagtcagcatttgtgtgtctaaaagggatcttactctcctttgcttgtaagcttagtttggctggatataaagttttgtttggaattccttttctttaagaatgctgaatataggccctccaatctcttctggcttatactgcttctgccaaaggttcatcattggcctgatggggttccttgtgttggtaaccaaccccttctctc

SEQ ID NO: 749454 - DNA, 530 bp, Homo sapiens
catgtgagatgggtctattgaagacagtatagcattggatctggctcctttatccaactttccactctgtgccttttaattggaatcacttaattgggaagacttgtttatctttttgctttatattgatatgtacagatttgagtctgtcattgtacttttagctagttattatgcagacttgatggtgtatcacttgctttatagtgtaagtgatctatatatttaagtgtgtttttgtggtggccagtagcagtctttcatttccatatttagcacttccttaaagacttcttgtaaggcaggtctggtggtaacaaattcagtcagcatttgtgtgtctaaaagggatcttactctcctttgcttgtaagcttagtttggctggwtataaagttttgtttggaattccttttctttaagaatgctgaatataggccctccaatctcttctggcttatactgcttctgccaaaggttcatcattggcctgatggggttccttgtgttggtaaccaaccccttctctc

SEQ ID NO: 749455 - DNA, 601 bp, Homo sapiens
tgttggccaggatggtctcgatctcttgacctcgtgatccgcccacctcggcctcccaaagtgctgggattacaggtgtgagccaccgcacccagccgtaattgtattttaaataaaatacttatctttaaaactcaacatgaggctgtcctcctgttggttctctgtacctgcacatgctggtgactcccgtgggctgacctctcccggcccctgtaaggtcccctgggactcattctcccaacccctcctccccgcaacaccataagctcctcttgggcaggaaattatcacattcttccagcacaggggtcagtgaggttcccacaagctaaagccggccagcacctgcctttggaggtcaagttctttggagactcccattcattcatggactgtccgtgactaatttcaggctacaaaggcagagtasagtcttgtgaaggctgcaacactaaaaatatttattatttggtcttttatactaagaatttgccggcctcttatctgacccacaggagagaattgactacattcaggttcataaagaaataaacatatagcatgaggaatgcggcagtaagtcaatacaaataggtta

SEQ ID NO: 749456 - DNA, 527 bp, Homo sapiens
tggggccctcaccctgaactcagcgtctacacccagagaactaatctactaacaatggtgggtgcagctctgttctacatagagaaactcaaagtcccttctgctgtcagactgggagcctctctctatcaaacaagaagcatccccagtgacctctgccaccatgatgcctctggtttatcatacsagagacctttaagacactcaggagttacatcttataataagtcctaagaatgatgtggttgtcaacacttattttcccccaattatccatccattcctctatctatctatctatctatctatctatctatctatctatcttttatctatccatccatttatccatccatctatgtatccatccatccatccatgcgaccatttatctatctatttacctgcctattcatccatccatccatccatccatccatccatccatccatccatccaccatcgatcctgtcattcatctgtctatctatccatccatctacccatccatacatacatacatcctc

SEQ ID NO: 749457 - DNA, 640 bp, Homo sapiens
cctcccggccaaagggaccccaaagaaaccttgaaaactgaattctggccgagtgctgtggctcacacctgtaatctcagcactttgggaggctgaggcatgcagatcacctgaggtcaagagttcaagtccagcctggccaacatggtgaaaccccatctctacaaaaatacaaaaattagctgggcatggtggagagtgcctgtaatcccaggtactcrggaggctgaggagggagaatcacttgaacctgggaggcagaggtggcagtgagccgagatggtgccactgcactccagcctaggcaacagagtgagacttcgtctcaaaaacaaaaaccaaccaaacaaacaaaaaagaaaactgaactctggccatgatgggatgggtggtggatacgcctcgttctgaccctccctcgctaaccacccaggcttggctttcttccctaagggcaaacagaacccagccctgccaaaatcctccacacctgatatcaaccacctgcctgatgcttcttcccctcttggagatatcaacaaaacaagcaaccaggttccttcctgatgggagaccaccgaccccagagtggttctggccagtttggggagggtgctcagggagggtttccatggcctct

SEQ ID NO: 749458 - DNA, 556 bp, Homo sapiens
tcttccaggatgaagcgtaaacacgtgaaaggcagatgtggggagctgggctgttgaagcccagcactcaggctgggatgagcttcgggttgtgttttgctctgcagatagccccagagctcactgctcaggttgcaggaacccagccmgtggcagaagtcggcagccacaccagtgctctgcttgccttccaggtgttgttctatttttagctcccagatgttagagcttctcctctcacctcagcccactctccgtttattgattccgatccctgggtggtcacttttgtctcttctcagttaggaaggggggtaagatccagagccacaggtgaactcgcctgtattgaagtctttgggccaggtctgtaatgatctgacttctcccagaaccccctcttctctggaagttccaactgtgcactgagcccattgtagggagcatttgaaccaaaacccagcgacactgctgacatttgactttcagcaaaccttgattgacggtgacacaccatgcttcgagaaggaatgagctgtccccccactgtggataa

SEQ ID NO: 749459 - DNA, 556 bp, Homo sapiens
tcttccaggatgaagcgtaaacacgtgaaaggcagatgtggggagctgggctgttgaagcccagcactcaggctgggatgagcttcgggttgtgttttgctctgcagatagccccagagctcactgctcaggttgcaggaacccagcccgtggcagaagtcggcagccacaccagtgctctgcttgccttccaggtgttgttctatttttagctcccagatgttagagcttctcctctcacctcagcccactctccgtttattgattccgatccctgggtggtcacttttgtctcttctcagttaggaaggggggtaagatccagagccacaggtgaactcgcctgtattgaagtctttgggccaggtctgtaatgatctgacttctcccagaaccccctcttctctggaagttccaackgtgcactgagcccattgtagggagcatttgaaccaaaacccagcgacactgctgacatttgactttcagcaaaccttgattgacggtgacacaccatgcttcgagaaggaatgagctgtccccccactgtggataa

SEQ ID NO: 749460 - DNA, 618 bp, Homo sapiens
tgaccatagagagggtcgagtctgaatacccagccgccaaggctgtaggacgctgctgtgcttgttcccggaaagcaagctgctcatccctgggtcacaaaacctgccttagaaatcctgattctgaatcttcctttgctggcctggctgcagagctccctgtgggctgccagcctggctgggcgctggactcggagctctgagctctctgcctgtgtttcttctcccttcctgtcttccactcctgtgttcccaccaggacaaatgtgatttttttwtttttttagacagagtttcactcttgttgcccaggctggagtgcaatggtgtgatctcagctcaccgaaacctctgcctcccgggttcaagcgattctgctgcctcagcctccctagtagcaggcatgtgccaccatgcccagctaattttgtatttttagtagaaacggggtttctccatgttggtcaggctggtctcaaactcccgaactcaggtgatctgcccgcctcggcctcccaaagtgctgggattacaggcgtgagccaccatgcccagccgacaagtgtgattttatttgtttaacacagatctgcttacaaacaaaaataagtgtgagtc

SEQ ID NO: 749461 - DNA, 618 bp, Homo sapiens
tgaccatagagagggtcgagtctgaatacccagccgccaaggctgtaggacgctgctgtgcttgttcccggaaagcaagctgctcatccctgggtcacaaaacctgccttagaaatcctgattctgaatcttcctttgctggcctggctgcagagctccctgtgggctgccagcctggctgggcgctggactcggagctctgagctctctgcctgtgtttcttctcccttcctgtcttccactcctgtgttcccaccaggacaaatgtgatttttttatttttttagacagagtttcactcttgttgcccaggcyggagtgcaatggtgtgatctcagctcaccgaaacctctgcctcccgggttcaagcgattctgctgcctcagcctccctagtagcaggcatgtgccaccatgcccagctaattttgtatttttagtagaaacggggtttctccatgttggtcaggctggtctcaaactcccgaactcaggtgatctgcccgcctcggcctcccaaagtgctgggattacaggcgtgagccaccatgcccagccgacaagtgtgattttatttgtttaacacagatctgcttacaaacaaaaataagtgtgagtc

SEQ ID NO: 749462 - DNA, 630 bp, Homo sapiens
cagctgtcattcacctcctaacttcaccataagagcccagatgagccatttttttctgcctgaagacatcctctgccccacgtttgtggcaaactcgctggagcttgaactactttgagtctcatcctcaatacttctttagtccccgagacataggtgaggctacagaggtggccggagaattgctgattccgtggcttcatgaccattgtctggctggtttgtcaaccaacagtttgaagccctatctggccaccgagattcagtgcctggrgcagaacccacagtacctcgatcctggggcagtgagggtgtgcactgggatggtgcagtgacatgcaacacatattacaaatcaacaagacctttaattctcccagtgaacacaggggcaagggctgcacacaggctattaataacccaaaaatgaacagaagaatcataaggacttgtaaaactgttaaggatgtaaagaaagcaaaggaaatcagtaaacaaattctagtagccgggatttccaaggatccagaagcagtttgaggcctttttggcagaaggaagtttccctgtcttctcctcgaaaaggtagaggaggtgatgatgctggccccgcatcctcctgagactcct

SEQ ID NO: 749463 - DNA, 630 bp, Homo sapiens
cagctgtcattcacctcctaacttcaccataagagcccagatgagccatttttttctgcctgaagacatcctctgccccacgtttgtggcaaactcgctggagcttgaactactttgagtctcatcctcaatacttctttagtccccgagacataggtgaggctacagaggtggccggagaattgctgattccgtggcttcatgaccattgtctggctggtttgtcaaccaacagtttgaagccctatctggccaccgagattcagtgcctggggcagaacccacagtacctcgatcctggggcagtgagggtgtgcactgggatggtgcagtgacatgcaacacatattacaaatcaacaagacctttaattctcccagtgaacacaggggcaagggctgyacacaggctattaataacccaaaaatgaacagaagaatcataaggacttgtaaaactgttaaggatgtaaagaaagcaaaggaaatcagtaaacaaattctagtagccgggatttccaaggatccagaagcagtttgaggcctttttggcagaaggaagtttccctgtcttctcctcgaaaaggtagaggaggtgatgatgctggccccgcatcctcctgagactcct

SEQ ID NO: 749464 - DNA, 630 bp, Homo sapiens
cagctgtcattcacctcctaacttcaccataagagcccagatgagccatttttttctgcctgaagacatcctctgccccacgtttgtggcaaactcgctggagcttgaactactttgagtctcatcctcaatacttctttagtccccgagacataggtgaggctacagaggtggccggagaattgctgattccgtggcttcatgaccattgtctggctggtttgtcaaccaacagtttgaagccctatctggccaccgagattcagtgcctggggcagaacccacagtacctcgatcctggggcagtgagggtgtgcactgggatggtgcagtgacatgcaacacatattacaaatcaacaagacctttaattctcccagtgaacacaggggcaagggctgcacacargctattaataacccaaaaatgaacagaagaatcataaggacttgtaaaactgttaaggatgtaaagaaagcaaaggaaatcagtaaacaaattctagtagccgggatttccaaggatccagaagcagtttgaggcctttttggcagaaggaagtttccctgtcttctcctcgaaaaggtagaggaggtgatgatgctggccccgcatcctcctgagactcct

SEQ ID NO: 749465 - DNA, 599 bp, Homo sapiens
agtttacaacatttttggtgaccacgaagtgaatggagacagcaggcttactgtctcctttgcctctggggttggagcacgggcctcaggaaacctgtgaccccaggcaccaccgggaggacttcagcccagaagggagatcagctctcccctgacccagtgcccctacccagcagcaccatggaacctaaagagagactacaggatgaattcaaaaacagcrtgcttcaggaactgcggtaaggttttggaggcctaaggcaggacccatcccttggacagaaggggagcctgatcacctcctggggtgtgctgaatagtttgacccacaggggctgggggtgatgagagtgactcaccaattcagatgaaactcacaccccaccgacacaggacacgagagtggctcactaagtcagctagtaatctggaggtggtgagagtggcgtgccaccccaactgggaactagaggtggcaagagtggctctccaccccaactgggaactggaggtggcaagagtggcttgccaccccaactgcaaaactagagggggcaagagtggctcaccaccccgattgcaaacatgagaactaaaag

SEQ ID NO: 749466 - DNA, 611 bp, Homo sapiens
ctcctcacttctcagatggggtggctgccgggcggaggggctcctcacttctcagatggggtggttgccaggcggagggtctcctcacttctcagacggggcagccgggcagagacgctcctcatctcacagacggggtcgcggccgggcagaggtgctcctcacatcccagatggggcggggggcagaggcactccccacatctcagacaatgggcggtggggcggagacgctcctcacttcctacatgggatggcrgccgggaagaggtgctcctcacttcctagatgggatggcgcctgggcagagatgctcctcactttccagactgggcagccaggcagaggggctcctcacatccagacggggtggtggccgggcagaggctgcaatctcggcacttgggaggccaaggcagcggctgggaggtggaggttgtagcgaaccgagatcacgcctctgcactccagcgtgggcacaattgagcactgagtgaacaagactccatctgcaatcccggcgcctcaggaggctgaggctggcggatcactcacggttaggagctggagaccagcccagccaacccagcgaaaccctgtctccaccaaaaa

SEQ ID NO: 749467 - DNA, 501 bp, Homo sapiens
gtgggggctccaatgccacatttcccttccaaactgccctagcagaggtcctcaatgagggctccacccctgcagcagacttctgcctggacatcaagtgtttccatacatcctttaaaatccaggcagagcttcccaaacctgaattcttgacgtctgtgtacctgcaggctcaactgttgaacctkccaaggctaggggcttgcaccctctgaagcaacagcctgagctgtaccatggatccttttagccatggctggagctggagaagctgggatgcagggaggcagggtactaagtcttgaggttgcacacagcagtggggccctgggcccagcccatgaaaccattttttccttctaggcctccagatctgtgatgggaggggctgctgtgaaggtctctgtcatgccctggagacattttctccattgtcttggctattaactcattactcaggcaaatttctgcagtcagcttgaattctgtgatggttaatac

SEQ ID NO: 749468 - DNA, 584 bp, Homo sapiens
ccgcatcatgcactaccacaaaatcaaccacctttttattgcccatgcaccatgggaatcaggagctaagagcctagtataaacaatggtttggaatcagtgaactcagtaggacttgggcaagggcaatggtgaacctctgccatgaagargcctccgcaatatctggacatggacaagactccctctaaaggtaactcctcctgaagataagcttgtagacctaaactatgaaacacatgaagaaatacaaaataaaaagggaaatttggacaaagaatttatgtctgggaaaccaaaaatatgagtattgttaaatagattttttaatgaatattttaactgtacaaaaagaaaagaaaatgtagaatctaatttttataagatacaaaataaataagaacagattgatttcaaaatgaaccaagtggaaacatccagaagtgaaacatgtagccaaaatagaaagaacaataaacaggttaaacaatagactcagataaaaaaataattcatgaatgggaatatggatctgaggaaatcactcagaacacagctcagatcagtaaagaaacggaaaatat

SEQ ID NO: 749469 - DNA, 602 bp, Homo sapiens
attttaaattagtgtgactttgaagtagagctcctgttgatcccactaaatctctactagaggagaatagccaccacctaattgctgaggtttacagtgttacacagcaaaaacaccatttgttagaatgacttgagaaaaatctgctcttgccatcaatgctcttttttggcagctcaatacttagatcccttgcatcagggctctaacctgccctgttgtagaggttccgtttactccatccagatggagaatcttgcttgtcaaaggaatctcaggtccacctagcttctctctcagcaatccatttataggtctagaaaagccaactatttcctcatctctgtgctgaagcaatrtagggtttttgaactctatattgcagacatgaaaccacattaaattgattctatagtgtttttttgttgaaggattttttttaaaattattctttgagttctgggatacatgtacagaatgtgcaggtttgttacatagcttacacgtgccatggttgtttgctgcacctgtcgacccatcatctacattaagtatttctcttaatgccatccctcctctagcccccaaccctctgataggcc

SEQ ID NO: 749470 - DNA, 602 bp, Homo sapiens
attttaaattagtgtgactttgaagtagagctcctgttgatcccactaaatctctactagaggagaatagccaccacctaattgctgaggtttacagtgttacacagcaaaaacaccatttgttagaatgacttgagaaaaatctgctcttgccatcaatgctcttttttggcagctcaatacttagatcccttgcatcagggctctaacctgccctgttgtagaggttccgtttactccatccagatggagaatcttgcttgtcaaaggaatctcaggtccacctagcttctctctcagcaatccatttataggtctagaaaagccaactatttcctcatctctgtgctgaagcaatgtagggtttttgaactctatattgcagacatgaaaccacattaaattgattctatagtgtttttttgttgaaggatttttttwaaaattattctttgagttctgggatacatgtacagaatgtgcaggtttgttacatagcttacacgtgccatggttgtttgctgcacctgtcgacccatcatctacattaagtatttctcttaatgccatccctcctctagcccccaaccctctgataggcc

SEQ ID NO: 749471 - DNA, 583 bp, Homo sapiens
gtcactcagctacaagtgaccaagccacagtttgagcccagtcagtccccagaaataaagctggaaagcattgctccacgcagcttcctcttagcaaaattaaagaggtactcaaccaataacgcttttttatctagtttaacatatgtcccagatgggtagaatcctgtcaattctaccatttgacagcattctccaatcctacttctcatccggctctctttggcttctgtacaagcgctgccccttcatcccctctctcggtatggcagcacccaccacatggagctgctctcgaggctccagatctcctcccctttttacctccatcccacacgtcacagcactctagaaaaaatggtctcttctatttttaaacttcactatcccaccactgcctaaatattgcaattaaccctcataccgggtcctccatgascttgtcccagttcacctttgtaatctcatttccaaaagctccttacccccagcccaaacttgcccctccagcaaacctggcccacttgccttcttggcatggctacataccctttcatggtgagaggtgacagcgtgctggcag

SEQ ID NO: 749472 - DNA, 590 bp, Homo sapiens
caatcagcaccctgtgtttagctcaaggtttgtgaatgcaccaatcgacactctgtatctagctgctctggtggggccttggagaacctgtgtgtagaaactctgtatctaactaatctgatggggaggtggagaacctttgtatctagctcagggattgtaaacgcaccaatcatcgccctgtcaaaacaggccacctggctctaccaatcagcaggatgtgggtggggccagataagagaataaaagcaggctgccccatccagcagtggcaacccgccggggtccccttccacgctgtggaagctttgttctttcactctttgcaataaatcttgctgctgctcactctttgggtccacactgcgtttatgagctgtaacactcaccrcgaaagtctgcagcttcacacctgaagccagcgagaccacgagcccacccggaagaaccaacaactccagacgcgccgccttaagagctgtaacactcaccgtgaaggtctgcagcttcactcctaagccagcaagaccacgaacccaccagaaggaagaaactccgaacacatccgaacatcagaaggaacaaactcc

SEQ ID NO: 749473 - DNA, 648 bp, Homo sapiens
caggatttctgccatctgtgtctttggccctgaatccgaggacatcagacaatctggaaggcccatccaattgagactgaaatgcaccaaagcctgctagataagccatcacaagttgtagaactgcttgaccacggaaaaatttccaaaagcttccccactctgttgtctgacccagtttctctttctcccttcagatagtgttgcatgtcagaagtgctctgacaaccagtggcccaatgtgcagaagggcgagtgcatccccaaaacccttgacttcttgttctatcacaagccccttgacacagcrttggctgtctgcacagccctgctctttctccttgccctggccatcttaggcatcttcgtctgacaccaccacactcccatcatccgagccaacaactgccagctcagctatctcctgctgtcctccttggccctcagcttcctctgccccttcatgttcattggccacccagaccccatcacttgtgctgtgcaccaggcagattttggggtcaccttcatggtctgcacatccactgtgctggccaagaccatcgtggtggtggcagccttccatgccacccaggcagacacccagcttagggggtgggcggggacagtcctcctcagcaccatcct

SEQ ID NO: 749474 - DNA, 615 bp, Homo sapiens
agagtccacttgcttaatcttagaccaaatttgtctgaagttaattcattattttagcactagaatgtaatgttattcagaacttcacagaagtaggatcatcccttcgtaggatggtattcaaggggcacaagtctgtttgctaagataatagaggcagaaaaaatgtatattktgtcaaaagcaagaataggacacaagtcttgtggtgcctggtccctgttccagaagcattgtccatgtttctgttctgaagcagaaaagctagtctcatcaccaacaaaagaaattcattagatagatgagagagtctgatgcaaagaatgcacctaggcatattaaaatgcaccttttcatcagaaggtgcatgcacgggtcagggaaacccagtgtgtctaagttcttgccaaatattgagaacttttttttctgttagtaatttaatctttatttagcaaatatttcacttacagttttaaatggagcattccattaaagaaaaaaaaaaaaagaggccatccttccaaagaaaagttccaggttttggctctctgtctcccttttttataataagcagaaatgccaacatataacagtattggtgttgaatacttt

SEQ ID NO: 749475 - DNA, 633 bp, Homo sapiens
gctcaaacaacgggcctacaagtcctatgtaaaaacacaaaaaaagagaagaaagggataaaaaggagtggccttattccaccaagaattccaaacaaatgggaaccaataatgaaacccaggtgcagccggcatggtggcccacgcctgtaatcccaacactttgggaggctgagcaggcggatcacctgaagtcargagttcaaggtcagcctggccaacatggcaaaaccctgtctctaccaaaaatacaaaaattagccgggcgtggtggtgggcacctgtaatcccaactacacaagaggctgaggcagaagaattgcttgaacccgggaggccgaggttgcagtgagcggagatcgcgccactgtactccagcctgggcaacaagagcgagaacctgcctcaaaaataaaataaaataaaatataaaataaaataaaacccaggtgctaaactgagaatagatagccagggaacccaacacaagagcatggagctcagactcagtgataaccttccgcataagcattgactcgacaaactgtgaacagtaaggcacaagggctttctgtggctgctgcacctggctgaaggctgggatccacggtgctgggcagtatagaccatatg

SEQ ID NO: 749476 - DNA, 633 bp, Homo sapiens
gctcaaacaacgggcctacaagtcctatgtaaaaacacaaaaaaagagaagaaagggataaaaaggagtggccttattccaccaagaattccaaacaaatgggaaccaataatgaaacccaggtgcagccggcatggtggcccacgcctgtaatcccaacactttgggaggctgagcaggcggatcacctgaagtcaagagttcaaggtcagcctggccaacatggcaaaaccctgtctctaccaaaaatacaaaaattagccgggygtggtggtgggcacctgtaatcccaactacacaagaggctgaggcagaagaattgcttgaacccgggaggccgaggttgcagtgagcggagatcgcgccactgtactccagcctgggcaacaagagcgagaacctgcctcaaaaataaaataaaataaaatataaaataaaataaaacccaggtgctaaactgagaatagatagccagggaacccaacacaagagcatggagctcagactcagtgataaccttccgcataagcattgactcgacaaactgtgaacagtaaggcacaagggctttctgtggctgctgcacctggctgaaggctgggatccacggtgctgggcagtatagaccatatg

SEQ ID NO: 749477 - DNA, 599 bp, Homo sapiens
aagccagtggccaattcccctagccaacagcaagatatatggtaagagtgcaagagaaatttaccccaaaagaaacagctattctggagagacaaagcaatttgcaacaattacagtggttaaaatcttatttcagtggtaatttctgaagcagagtagatccatttgtccataggtaagatagaatatgacagaygaaggccctccccaactgaagatgagcaaaaagccctaaactctctgagacttggaaaagagtgctttcgaggagtgctaaaacctgccagattttttaaataaacatgtagtacatggtttcaccctggccatttcactgaacctcaccaccaatctaggaggcaggtaatgtaaattccctgttaagggtctaaaaacagctcacttagttacttgcccaaggtcatgtgcttctagggattagaagcaacatacaaagcctggtgttcagtctccaaatccaggaccccacattcaacttacatgaagacaactaactgaaaatgatgaaaaggagtcatttaccagaactaaggaaaaaaaaacaactttgtatacctaaaatccaaacacaaggatcc

SEQ ID NO: 749478 - DNA, 632 bp, Homo sapiens
tcccctttataagaccatcaaatctcataagacttattcactatcacaagaaaagcatggaaaagacctgcccttatgattcagctacatcctactgggtccctctgatgacacgtgggaattgtgggagctataattcaagatgaaatttgggtggtgacacagccaaacaatattagtaaaagcctgggctggaatgcaggtctgcctggctccaaaactgaaattttaaaactattttatgatgcctccattgtatgtcaggtaccttttckgtgtgtcagagtatcatgatgtgccctttgtgcatcagatatttcagggtctggtttccccaagattgtacacctaattagggaaagagccaagtttcaacaaaaccttgctgtctctcaaattagagtattgtatgctggctccatcctcagggcacaccttgggtatacactctttgtggtctaaggttctccagggcacacactagcagagccctgggtagcatgggttaaaaaagaagccattaccacatccattcaccatgaatcctgttttttttgttttttttttttttttaccctgagtaactgagaacaaagctcacttcaccaaaatgttctgatgccaggggtccc

SEQ ID NO: 749479 - DNA, 632 bp, Homo sapiens
tcccctttataagaccatcaaatctcataagacttattcactatcacaagaaaagcatggaaaagacctgcccttatgattcagctacatcctactgggtccctctgatgacacgtgggaattgtgggagctataattcaagatgaaatttgggtggtgacacagccaaacaatattagtaaaagcctgggctggaatgcaggtctgcctggctccaaaactgaaattttaaaactattttatgatgcctccattgtatgtcaggtaccttttcggtgtgtcagagtatcatgatgtgccctttgtgcatcagatatttcagggtctggtttccccaagattgtacacctaattagggraagagccaagtttcaacaaaaccttgctgtctctcaaattagagtattgtatgctggctccatcctcagggcacaccttgggtatacactctttgtggtctaaggttctccagggcacacactagcagagccctgggtagcatgggttaaaaaagaagccattaccacatccattcaccatgaatcctgttttttttgttttttttttttttttaccctgagtaactgagaacaaagctcacttcaccaaaatgttctgatgccaggggtccc

SEQ ID NO: 749480 - DNA, 620 bp, Homo sapiens
aaaagcaataatgttaactagatttagtaggaacaaaaaatctgagtattaagagatcaagaatgtataaatcctgtaatccacagaaatcttggggaagaatattagatttaatgtggagtgggagtgggggcagcatctcagcaattttgtcagaactttaaagaacagaagcgatgccaactgacatttgagttgcatatggaatttgcagtgaccatttgcagaagcactaggaaaagtagatgtggccttctggggaaagcaccaagcaagcacctgagttagagccttwtccactttatctacattttaaaaatgttatccatccacccgttcaaccatctctctgttcacccatccattcatccacctacccacccaccctttcatcacttctatctctttctctcattggtctttagagcccaaactgataaagtgaaaaagtacaggaaatcctttcctattccttagactttccactgaaaaatgtgaaactttaaacctttttggactcttcttattttattggagtttcttgctagttacctgcactgccaacaggctcatcctaaccaaatgtgtatagcttcttacttcacagtttgtgacctaga

SEQ ID NO: 749481 - DNA, 620 bp, Homo sapiens
aaaagcaataatgttaactagatttagtaggaacaaaaaatctgagtattaagagatcaagaatgtataaatcctgtaatccacagaaatcttggggaagaatattagatttaatgtggagtgggagtgggggcagcatctcagcaattttgtcagaactttaaagaacagaagcgatgccaactgacatttgagttgcatatggaatttgcagtgaccatttgcagaagcactaggaaaagtagatgtggccttctggggaaagcaccaagcaagcacctgagttagagccttatccactttatctacattttaaaaatgttatccatccacccrttcaaccatctctctgttcacccatccattcatccacctacccacccaccctttcatcacttctatctctttctctcattggtctttagagcccaaactgataaagtgaaaaagtacaggaaatcctttcctattccttagactttccactgaaaaatgtgaaactttaaacctttttggactcttcttattttattggagtttcttgctagttacctgcactgccaacaggctcatcctaaccaaatgtgtatagcttcttacttcacagtttgtgacctaga

SEQ ID NO: 749482 - DNA, 620 bp, Homo sapiens
aaaagcaataatgttaactagatttagtaggaacaaaaaatctgagtattaagagatcaagaatgtataaatcctgtaatccacagaaatcttggggaagaatattagatttaatgtggagtgggagtgggggcagcatctcagcaattttgtcagaactttaaagaacagaagcgatgccaactgacatttgagttgcatatggaatttgcagtgaccatttgcagaagcactaggaaaagtagatgtggccttctggggaaagcaccaagcaagcacctgagttagagccttatccactttatctacattttaaaaatgttatccatccacccgttcaaccatctctctgttcacccatccattcatccacctacccacccaccctttcatcacttctatctctttctctcattgktctttagagcccaaactgataaagtgaaaaagtacaggaaatcctttcctattccttagactttccactgaaaaatgtgaaactttaaacctttttggactcttcttattttattggagtttcttgctagttacctgcactgccaacaggctcatcctaaccaaatgtgtatagcttcttacttcacagtttgtgacctaga

SEQ ID NO: 749483 - DNA, 616 bp, Homo sapiens
  misc_feature 464: n = A,T,C or G
actccttgctgatgtatggccttgagaaacatacataaccttggggaggattaattgagattatccttagtaagtgatcaacgaatgttgcctattaaaattattttaaaatttatttaaggcaacaacaattttaacttacaggacagagtgaattactcagtaataacagttaactaccataacttgtgctcatatagcaggagatttgtttagggcattgaaaatagtttattcccactttggaacctgggagataaatcttgctagatatgattctggataactctgggacacgaaatgactaaggattggggggaaaaacttaaagggaagaaggcaaagataagctctgccratactgcaatttgcctgaagatcctcgtggcttctaagtttaccactcaaaatgaattcttgctgcatttggcatgctcagcttattaatgacaaagttatttacntgggctgggttgaatagtggccttcctgacctctaattcagcccagtttttcagttaatcccaatcctttattcacaaggaaaacaaccagaaattcttttaaaaataggtgcatgagtaaagtatcttttttattagcactagaatatctt

SEQ ID NO: 749484 - DNA, 680 bp, Homo sapiens
cagctctcctcttttacccagcacaaatgcaatcctgattataaaactatttgtgtttctaaatacaaccaaaggaaatcttagagaaacataaattagaaacctcttttattaaggggaaacaacaaaaaaaggtgcttttttaaaaaaaaaaaaaaraaaagaaaagaaaaagaaaaacctagctgtaaaaccatgaagttaaagagctgggtctggagcagatgtgcataataactagttagttgctcccagcaggatcagaaacagctttgggggagcagaggaatatgggttggtgtgtttcagaagaggcaccagttaatactcttccaataaaaatgatgtgtcaacagtgttcagcctcaaccagtgctttctcacagaatctgcttggtaagttcagttcacaatgtgtttacctttcatggcaatgcacgatgcaattattgggtaggtcactgtcaagcaaaaacgagatataattacagagaaggcattaatgcccaaagagtacataaagcagtaagtagcttctgaggctggttcaatgcagaagtaaaactaacaggtttgctaacagctaaagacttttaattgcctcatattttctgcagctctgaccagcatccttcttacacgacaaaaaaaaaaagaaaaaaaaaaagaaaaaaaagtgt

SEQ ID NO: 749485 - DNA, 603 bp, Homo sapiens
ctacagacagcacgtgcagggcttgtggtgggcagtcctgctcagatgaaaactacacaggtttggagatcctgtcgtaaaatagcagaggacgcatttacattctttttttaattctgggggtgaaggataaatttggggattacgtagcctcactatcattcctcctccatatcctattgctgtgtaactttagttcatcaatgataagtccttaaaccaaatgttggtgggcttcagctaaacaggaggcatttgcttggctgtagaggaaagagaggaataacttctgctccttgaacagggtgcrtcagttagcgggaggaaacaagaacaagcggggagcatgacccaggatgggaggtgggtggtgctcccggacgatgctctcccaggtagttctggcgaatactggggccaggaggttttacgtgggcttggacagcaaactctgggagaaataatgaatcatcagttcagctaaattgttgatcaagactgaagtgcaggctcttccaagtgtaatggagggagtgacaaatctatgaaatattataatttaacaaaaagaagataagcactggtctatgaataacatcagca

SEQ ID NO: 749486 - DNA, 527 bp, Homo sapiens
tttgtgtttcctcaaaatgcattaagttgaagtcctaacttccacaatgatggtattagatgtggcctttaggaggtgataagatcatgacggcacaggcctcattaaagggattaatgcacttaaaatagaggcccaatggagcttgtttttcacttccaccatgtaaagacacagctagaaggtgccatctataaggcatagagcgaaccctcaccagacaccaaatctgctggagccttcatcttaaactttccagcttccagaattgtcagcaataaagttctattgtttgtgattcccaatatatggtattttgttataacagctcaaatacactaasaaagaaagcagaggaagtttggacttaaatctcacacatataaaaaaatttcattatgttttgtctttaatctcctaaactctgaaaagtctctttgaaaatcaggatttgctgacttttgtctagtaaccctctactctagctctcataattaacttttatttatttagtggctcttaggctt

SEQ ID NO: 749487 - DNA, 647 bp, Homo sapiens
  misc_feature 633: n = A,T,C or G
gaagaactggttgctggcccggcacggtggctcatgcctgtaatagcagcgctttggaaggctgagacgggtgcatcatgaggtcaggagtttgaaaccagcctggccaatatagtgaaatgccgtctctctaaaaatacaaaaatcagccgggcacggtggtgtgtgcctgtagcccccgctactcgggaggctgaggctggagaatcacttgaactggggaggcggaggttgcagtgagctgagatctcaccactgcacyccggcctgggcaacagagcgagactctgtctcaaaagaaaaaaaaaattggttgctgaaaagagcctggcaccttctcctctgtccctgtttctcactctcaccatgtaatctctgtgtacatatgccccattggcttttgtcatgagtggaagcattctgaggctccccccagatgcagatgcgagcatgcttcttgtacagcctggacaaccatgagccaaatataccacttttctttataagttacccagcttcaggtattattttatagtaacaaaaatagactaagacaagataactaatcactatcaatgttaactttgatcacgtggatgaggaagtagtgttggtcagctttctttattatanaattactttttgtt

SEQ ID NO: 749488 - DNA, 554 bp, Homo sapiens
cttgcttgtttactctgataaagccagcttcaatattgtaagtgtccttatggagaggcccacatgtcaagaaactgaggctgtcctctggccagcagattatgaggaaatgagacccttagtccaacaacttgcagagaactgaatactgccaacaaccccctgagtgagctgagaagtagatctacccccaggrgagccttaacataactgcagatgcagccaacacattgacgtcagcctagtgagatgctcagcgccagaggaaccagttgagtcatgccagatttttgacccacagaaactgacagataatacatgtgttaagacactaagccactaagtttcagggtaatttgttataaaccaatagataactaatatacctcccgacctttggcagttgacctcttccaaccccaacttcagatatccactagttaacagatccctctgtcattataaatttgttttcttttcaaaaatttcaaataatttagtatttttttctgaattgtccatcttgttgtatatattaggcatttgttcatgtt

SEQ ID NO: 749489 - DNA, 586 bp, Homo sapiens
caaacctgagatgtgtgctgggaagacggcccagcttgtgggggcagcgtgagctctgcacagaggctggaggctatgaattcccccacactgggaccccactggcatgcacctgtcaggctgcaaaggaggttttttttgtctgcatgcaatctgattggttggtgccatgccatattgggctttctatatacacatatatattatgttataaaatatatataatataaaatacatatatattttatattaaacaatctttatttggaaaatagtaccttacagtcctaatgctatctatcaaacatcaatgacagcaatttcagcaggaactaatgaacagtagctaaactaacaggggatccatcaaaagtgctytaaagggaggagcaccggctgacgttgtgccgagtctctgggcattcaggacttggttatgggaaaacagaatcaaactggcaggtgctctggacccaaaccctggcattgtgacccgcctccctcctgggagccctgaaggctcacagtccccctggcacttccaggcccctgtgggctgtgggtggagccctaggggccaaagtgc

SEQ ID NO: 749490 - DNA, 550 bp, Homo sapiens
ggccaggctggtcttgaactcctgggctcaagtgatccctctgcctcagcctcgcaaattgctgggattacagtcatgagccaccatgcctagccaaaaactcagtacttttagttgtcagttctctccaaattcatctatggatttaatgcaattctaatcataatttcagaaaaggtttttttaataaatcaaatagttaatttttaaatttatatgaagatgcagaggcctggaatagccatagcaatctttaaaaaaaaaaaaggccaaaattttacatgacctgagttcaagacttattataaaattatactaatcaagacagggtagtacwggtataagaactgacaaatagatcaatagaaaaagaaaaaatgagcccagaatagaaccatgcctgtaccatcatttgattttcaacaatgatgccaaagcacatcagtgaggaaaggaaagtctatccaataaattatcccagaatacttgatattcatatggaaaaaataataacaaacctcagatcctaccttatagtatacccagaaac

SEQ ID NO: 749491 - DNA, 502 bp, Homo sapiens
tgggcacatgtgggtgggttatggggacaagctgggagcaccatcagctatgaatggggaggtgacagttactcagtgtgtttctttgtgtctgggttgggggaggactggggcttgacctgcatgagatggggggaggctgggacttgacctgcatgggatgggggtgggggacctaggatttggcctgcataggtttgggaggtaagacaggcaycatgtcattccagggacttggaggttgttgtgcatagaagtggttaaagactgcatctctgtatttttggattccaagtcaggacacatggtctgatacaagtaagctcacagcagaaatggcacagaatatgtgaaaccaggagcatgccaggaaacccaagacacgtgatcactgagcctgttccatctcctgagaggagttggttatattcatttagaagtttgctgatgctttttctgggaacttgtttattttcctttcctcaaggtagacagaaagaag

SEQ ID NO: 749492 - DNA, 502 bp, Homo sapiens
tgggcacatgtgggtgggttatggggacaagctgggagcaccatcagctatgaatggggaggtgacagttactcagtgtgtttctttgtgtctgggttgggggaggactggggcttgacctgcatgagatggggggaggctgggacttgacctgcatgggatgggggtgggggacctaggatttggcctgcataggtttgggaggtaagacaggcaccatgtcattccagggacttggaggttgttgtgcatagaagtggttaaagactgcatctctgtatttttggattccaagtcaggacacatggtctgatacaagtaagctcacagcagaaatgrcacagaatatgtgaaaccaggagcatgccaggaaacccaagacacgtgatcactgagcctgttccatctcctgagaggagttggttatattcatttagaagtttgctgatgctttttctgggaacttgtttattttcctttcctcaaggtagacagaaagaag

SEQ ID NO: 749493 - DNA, 652 bp, Homo sapiens
tgctaatttgagatctttctaattttttgatatgggcatttagtgctataaatttccctcttaaaactatcttagccgtgccctggagattcttgtatgttgtatctttgttctcattatctatctaatactatcagtgtggtgttgaagtctcctactattattatgtgggaatctatatctcttcatagatcatgaaggactttctttatgaatctgggtgctcctgtgttgggtacatatatatttaggatagttaggtcttcttgtttaattgaactctttaccattatgtaacractttctttgtatttttttatctttgttggtttaaagtctggtttttttttttttgaattttttttcttttaggatgttgaatatagcccccagtgtcttctggcatatagagtttctgctgaaagttctgctgttagcctgatgggtacgccctttgtaggtaacctgccctttctctctagctgcctttaacactttttcttttattttgaccttggagaatatgaagattatgtgtcttgaggatgatcttgcatagtgtcttgcaggggttctctgtattatctgaatttgaatgttagtctttccagtgaactagaaaactcttgagaatgttctcatgaacgatatc

SEQ ID NO: 749494 - DNA, 393 bp, Homo sapiens
cctaggccccagatggatccgcagatattatctgggagccagagtctggagtcagaaaccttagaaatctacctggtactctattctactgcagctgagctggcacccaaaccacaagacaaagtccttcccattcttccctcccctttccccaggcagaggagtctgtctccatgtttatccccaccacagrcccatagggagtactgccagcctatcactgatatttacttcaggcccaagggctttttagtcagcttgtcatgaatgctgccaagcctgggactcacccttcagagcagtgggctcccttctggctgtccaagaaccaagggctggaattggggaccgcaagagtccatttactagtctagtccactgtggcctcactgg

SEQ ID NO: 749495 - DNA, 548 bp, Homo sapiens
aacaaatgaaactgtattcggtgccacacagtacaggaaaaactctgtttttctaggtgccatctttcactcagttatggaaacaatcttactatcaacccactcaaatttcctatctcggaatgtgaacagattaatgatcaggaacaatatctagtaaaggaaacattatgttmtaagttacttcatcttaaaaaacacatatatttgaataagtaaaattatagattaaaaagctttttcttaaatagaaatgtctttttatagcatcctctaccatgctatttcagccttgaactgaagagagtctcttagagaagtggatctttaacaacttgatttaactcacagctaagaatgatttacaactagtatatcaattattcatatacaaatatttttaggctacacggaatatgtgtacaatttgtcaaataagcagttcaatttccttataagataaatatgcttagcaaattattttctcataaagcaaaggtaaaattaagctgaacccttgctgacttatcaaaaatgtgaattaggag

SEQ ID NO: 749496 - DNA, 630 bp, Homo sapiens
gtttgttgagggtttttatcataaagaaatgttgagttttatcaaaagatttttcatcatctacagaaatgaccatatactttctattcttggttttgttaatgtgatgtatgtttattgatttgcatattttgaaacatccttgcatccstgggatgaatccacttcatcataatgaattatctttttaatggattgttgaatttggtctcatggtatttttttaaaatttttgcatctatgtttaccaaagatattgacctatagttcttttcttattgtcttcttgtctgatttttgtatgaggataatgctggccttgtaaatatgtttggaagtactctatcctgttcaatttttaaaaatagtttgagtagaattggtattagttctcctgtaaatgtttggtaaaacttggtagtaaaggcatcagatccgaggcttttctttgatggaagagtttttattacagcatcaatctcattaatcattattggttggatgaaatattatattttttcatggtttaatcctggtaggtaatatgtgtccaggaacatattcatttcttctagttttttcaacttattggtatatagttgttcataatagtctgtaatgatttgtatt

SEQ ID NO: 749497 - DNA, 630 bp, Homo sapiens
gtttgttgagggtttttatcataaagaaatgttgagttttatcaaaagatttttcatcatctacagaaatgaccatatactttctattcttggttttgttaatgtgatgtatgtttattgatttgcatattttgaaacatccttgcatccgtgggatgaatccacttcatcataatgaattatctttttaatggattgttgaatttggtctcatggtatttttttaaaatttttgcatctatgtttaccaaagatattsacctatagttcttttcttattgtcttcttgtctgatttttgtatgaggataatgctggccttgtaaatatgtttggaagtactctatcctgttcaatttttaaaaatagtttgagtagaattggtattagttctcctgtaaatgtttggtaaaacttggtagtaaaggcatcagatccgaggcttttctttgatggaagagtttttattacagcatcaatctcattaatcattattggttggatgaaatattatattttttcatggtttaatcctggtaggtaatatgtgtccaggaacatattcatttcttctagttttttcaacttattggtatatagttgttcataatagtctgtaatgatttgtatt

SEQ ID NO: 749498 - DNA, 630 bp, Homo sapiens
gtttgttgagggtttttatcataaagaaatgttgagttttatcaaaagatttttcatcatctacagaaatgaccatatactttctattcttggttttgttaatgtgatgtatgtttattgatttgcatattttgaaacatccttgcatccgtgggatgaatccacttcatcataatgaattatctttttaatggattgttgaatttggtctcatggtatttttttaaaatttttgcatctatgtttaccaaagatattgacctatagttcttttcttattgtcttcttgtctgatttttgtatgaggrtaatgctggccttgtaaatatgtttggaagtactctatcctgttcaatttttaaaaatagtttgagtagaattggtattagttctcctgtaaatgtttggtaaaacttggtagtaaaggcatcagatccgaggcttttctttgatggaagagtttttattacagcatcaatctcattaatcattattggttggatgaaatattatattttttcatggtttaatcctggtaggtaatatgtgtccaggaacatattcatttcttctagttttttcaacttattggtatatagttgttcataatagtctgtaatgatttgtatt

SEQ ID NO: 749499 - DNA, 608 bp, Homo sapiens
ctcatgacaattacaattttcattattgtaactagttttgtggtcttgtatttgtgattatcttctacttcccattctgtattccctttgccttcagcaagaacctctgctggttgtggcttttgactttgtggagtaaaatcttcattcctgaatctgggtatttgtagtcccaccaggattgggttgttgtagtgttccactaacattaatttacagggcatgataacactaagtgatgcactaagccatcacctatatttcagacatactcatccttacctccattgtagagtggcagtccagttttctcttagtagtctggatcactcaatccagccaatatatgtaactcccttactggcctgttgactcagagcatraggaccgcaagaggccatgtggcagtcttaacttctagttcagtggaatcattttttgtgtctcctgatagaagtacttctccctagagaactaaaacttctaggccagtggagcataaagtgataggacaaggaagcaaaatatttgctagtggattactagggctaacgattatggtacctcttccattttcacttcttgattccagaaccaatgaatccttg

SEQ ID NO: 749500 - DNA, 591 bp, Homo sapiens
ttgacttgcagtagtaagtaactgagagcataaaataaacctgactgtatgaagtcaatttaagtgatgagaacatttaactttggtgactaaagtcagaatatcttctcacttcacttaagggatcttccagaagatatctaaaagtctgtaataagcttagaagttcagataaatctaggcaggatactgcatttttgtggttttaaaaaagtccttaggacagactgaattatcataacttatggcatcaggaggaaactttaaaatatcaaggaatcactcagtcaccctcctgttttgttgaaggatcaaccccaaattctgggtatttgagtacatgtgaatcatggatttggtattcaactttttccctggatgctttggaatcgtgtcttccatgctccaytgggttcaatttaaaataggagaggctttctcttctgaaagatccattttaggtctttttcaagaatagtgaacacattttttaacaaaataagttgtaattttaaaaggaaagttttgcctattttattaagatggaaatttctttttaggctaatttgaaatccaactgaagctttttaa

SEQ ID NO: 749501 - DNA, 619 bp, Homo sapiens
tccatgctccattgggttcaatttaaaataggagaggctttctcttctgaaagatccattttaggtctttttcaagaatagtgaacacattttttaacaaaataagttgtaattttaaaaggaaagttttgcctattttattaagatggaaatttctttttaggctaatttgaaatccaactgaagctttttaaccaatattttaaatttgaaccmctagagttttttatgatgcaaatgattatgttgtctgaaaggtgtggttttattgaatgtctatttgagtatcatttaaaaagtatttgccttttactggcatcatttctcttggtttattattattatcaatgtttatctatttttcaattaatttaatacagtttctaatgtgaaagacatttttctggaacccgttttccccttaaacactaaagagacctcaagtgaaagcatattgcttagtaggaaggtagaaaatgttaatccctgcgattctttgagttttaatgacagggtcattttcagtaaaggaaatgctcaccaacacatagtcaccaactattaaaggaatcatgtgattggattttcccctgtatacatgtacccttggtcataatcc

SEQ ID NO: 749502 - DNA, 571 bp, Homo sapiens
gggtgcatgtatgtttacaattgttacatcttcttggcatattgatcccttcatcatcatataattattttcctctttttattatttttgacttaatakcttattatttttctgatataaatacaggtactcctgtagacttttggtttctttttacatgaaatattttttccatccttatactgtgtatgtgtctttaccagtaaagtaagtttgctgtaggcagcatataattggatttatatatttaatccattcaattcatctgtatattttaactggggaacttaaaccacttacattaaacattgttattgatggggaagacttactcttgtcaccttttaaattgtttcctgattgtttgcatatgttattattgcctcttctattatttaccttttttttttttgtactgatagggtttgattcctttctctttgtcatctgattagctgttttaccagtgagttttcttttctttttttttaatattaggtatcatccttttaccccacatatagaacttctttaagcatttctttagaagtcattctggtggttatgaatt

SEQ ID NO: 749503 - DNA, 571 bp, Homo sapiens
gggtgcatgtatgtttacaattgttacatcttcttggcatattgatcccttcatcatcatataattattttcctctttttattatttttgacttaatagcttattatttttctgatataaatacaggtactcctgtagacttttggtttctttttacatgaaatattttttccatccttatactgtgtatgtgtctttaccagtraagtaagtttgctgtaggcagcatataattggatttatatatttaatccattcaattcatctgtatattttaactggggaacttaaaccacttacattaaacattgttattgatggggaagacttactcttgtcaccttttaaattgtttcctgattgtttgcatatgttattattgcctcttctattatttaccttttttttttttgtactgatagggtttgattcctttctctttgtcatctgattagctgttttaccagtgagttttcttttctttttttttaatattaggtatcatccttttaccccacatatagaacttctttaagcatttctttagaagtcattctggtggttatgaatt

SEQ ID NO: 749504 - DNA, 571 bp, Homo sapiens
gggtgcatgtatgtttacaattgttacatcttcttggcatattgatcccttcatcatcatataattattttcctctttttattatttttgacttaatagcttattatttttctgatataaatacaggtactcctgtagacttttggtttctttttacatgaaatattttttccatccttatactgtgtatgtgtctttaccagtaaagtaagtttgctgtaggcagcatataattggatttatatatttaatccattcaattcatctgtatattttaactggggaacttaaaccacttacattaaacattgttattgatggggaagacttactcttgtcaccttttaaattgtttcctgattgtttgcatatgttattattgcctcttctattatttaccttttttttttttgtactgatagkgtttgattcctttctctttgtcatctgattagctgttttaccagtgagttttcttttctttttttttaatattaggtatcatccttttaccccacatatagaacttctttaagcatttctttagaagtcattctggtggttatgaatt

SEQ ID NO: 749505 - DNA, 628 bp, Homo sapiens
caacaggatgttggatttttttcaaatgccctttctgtgtcaattgagatgatgatgtggtttccttctttgttctgttaatgcagtgtgttacattgaatgattttcaaatgttgaatcagccttgcatctttcaaatattgaaccagtgtggcataaagtccacttgttttatggcccaaggtaaagtgttctctgtatgtctattaggtacagtcagtttatggtgttgttcaagtcttctattccctgttaatcttccatctaactgttccgttctctagttttcttgttagacttaatttttcaaacagttattttatgtaaaccatttttgcatcttgtgaatattatgatattagacataatgtcagattctatgcacatataattttatgttcacattaaatattaactaatatatttagccatttttctkttagaatttaagatcatcatagttttatttaaaattaaaactggtatttttgcgtttaagagcttctctgtatttggtgttgtttcataaggtagttgaattactggtaaaatagtatggcaattaaagcattcaccaccaaccttcatatacttcagcctgaaggtgggcttcacatggcccaatagc

SEQ ID NO: 749506 - DNA, 604 bp, Homo sapiens
atcagatgcccctccctgtgcattcccatagcgcctcgaagtcatctctatcaatcattcatttagtcttaaggaagtcttgtttgtatatgtgtatccctgacatgactgagacctcataagttctctaagtgccatatgaataaagaaatgaattggtgttcatcttaagtcatagtctctgcagatattgcttgatctaagggagtggcaccctttgttttgattttcctttgatctttggaagaccatgcattyctatttcagtgatgcttttaaaaagccatttttgtcattaatccagatttgttctcatttgattctagttgttgaaatggatgaaaacaacggacttttgcttttagaactgaatcctcctaacccttgggacttacagcccagatctcctgaagagttggcttttggagaagtacaggtaaggaaatattaaaaggataatattattaaaaacgtgaccaagatgtccatttaacatctatatctgtaaacatcctatattaccttgaatactgtttgagatgggtatttaggacatatggtaaaaagtcatatgataaaacaaattctttaaggaacccccaga

SEQ ID NO: 749507 - DNA, 634 bp, Homo sapiens
ttgatgatggcatcctatgtataggatccatctgtgtgaggctgtgatttttgttgtaaattacagaatcctctggctagtgtatgcaaaaggagaggtataaagggctactaatagctccaaaaaatcattgggagggttgaaggtacacaatctagactgaacctctcaaaagaaccggtctactaagggagctgttgccagcagggccccggaagcaccaggcctctgccatgatcaggaagcttctgggtccgtagctgccctgcccctgctggctattgccactatgcttgtcagaaggtcccctctccctgcacaaggccaacagctgacttttctcactcgctccttccaagactcacatcactgcatctgcttagcagtgcctaagtcacatgaggagctcgagctgcaagtgagtgtggagaatgagtttcccctactacagggcaggaagacgcacgagaagagggaatrgaattgggcaagccagtctgtagttctgcttcaccatcttgagatgaatctatggcattagatatagaaaagaagcatgggaaaattggaaagcactgtaagatataaacatgggaatttggcaatgttcatccaatgctatccaggagagatg

SEQ ID NO: 749508 - DNA, 502 bp, Homo sapiens
taaataaaatcaaacaacacattttatcttgtccatgttttacaggtgactaaaataatggttaatgaggatagcttttataatgggcaaaataggccatgacttggagtctctagcttgctgaagctgtgtgcctaactctcaaaaaatctgcataggatcctcaccttagaggtgaacagactaaagccctagggcagaatatgtctctacattccttgaaacaagtgtgaaraaaaaaaattaaagaactgccatcatgaattgtactaaagccatgatcaaaagtctctatactttgaaacacctaatcatattagaggattaaaaacacatcagtgaacgctaaccaattatttattcatttccatatcttttaattttgataacataaatactgtggttttttttctcaattataccgacaaaatctttctcctaccttcagtctgagaggttccttttgctgtaatatcttgttgttgtacttggcctatagtct

SEQ ID NO: 749509 - DNA, 613 bp, Homo sapiens
aaaacactcatgacccctggttacctatatctgatacttattggttcccacaatttgccaagtattagagaaggtcttctagaagagatagtcttaagctttctttatcatgttgatttcccacattatgagattatccttgcctccaactggcactgggcagtcatagcattaaaactcacactatgggttagttttggtgagtggaagggagtgggggaaagttatgctaactcaatcatgagtagtgataagcacctgcccatcatatcacctaaagtggtgctattactgttcatagcatctgctttctctaaactcctcttatgcatgggatcccattayacaaacttgccctacacattaatgacatccacattcaacactgtcttcatcagcttcacttctctatcttctcttagtagtggctcagtaattacttaacattttctgatatgttaacatccacaggaagggttcttcttgggcacttaggggattcatgaaaggacttctggtgggggatataatcctagggtgaccaactgtttcagttttcctgtcctggtattagaactgaaagtcctgcatcccaggaaacccctcagtctgg

SEQ ID NO: 749510 - DNA, 622 bp, Homo sapiens
aactgtatggaatttcctcaaaaaaagtgaaaatagaactcttgtatgatccagcaatcctacttctgggtatacacatacaaaggagttgaaatcagtatgccaaagagttatctgcactcccatgtttattacagcastattcacattagccaacatataaaagtaacataagtgtccatcaggggatgaatagataaagataatttggtatatatatacaatggaatactacttattgtttaaaagtaaggaaatcttgccatttgtaacaaaatggatgaacctggaggacattatgttaagtgaaataagccaggtgcagaaagacaagcaccacatgatctcacatgtggagtgtaaaagagttaaaatagaaacagagagtaaaatggtggttactagagaccgaccataagttgggaattggggagatgttggtcaaaatacagaaaatttcagttagacacgaggagtaacttcaggagatctattacatgtcatgatgactgcagctagtaacgatgtgttgtatacttgaaaattgctaagataatagattttaagtgctctcaccacaaaataagaataataagtatgtgaggtaatgcatgtgttaaat

SEQ ID NO: 749511 - DNA, 594 bp, Homo sapiens
tttggttatctagggcataattagtagttcacaatgaaaaaaatattactatcactgcataattagtaagtgcctactatgtaaatcacggtttgcttttctgtccatcaccaatttaagatgattttaattccaagaaatagaaaattcaattcaaacttatttaaacaataaagagaatatgttgactcatataattaaactttctaggtacagtttgctgaaggctctggcatagtttgcttaaaattctctaagcttgtgatctcctgtatcagcttcctcttcarattggcttctcccactttagcaaatggtttcagcaattacaagtctcaaattaacagaccgtgttgtggagaacaagttttgcatggtatgaaccttgattggccttaatttcctagccacggggataccatgtgtctcagtcagttcaggctgctacaataaattacagcagactgggtgacataaacaataaacatttatttttcacatttctgaagtctgggaagtcaaagataaggtaccagcagatccagtgtctggtgaactagtctctgctttgaaagtagctatcttcttgtatcc

SEQ ID NO: 749512 - DNA, 613 bp, Homo sapiens
gaaccacttgccctgagttggaaaagactggtagagcaggttttcagaagaagagtaggtgggagtgatagaggagacagaaaaatactggccctctggagtaggggctggaatattagtgggtgtggaggcaccggctatttcttttgctgtcctgtcagcataggcatttccttttgcaataagatcagtaggtttctggtgtcgtttacaatgaatgactccagcattggctggcaggagagcagccttaaggaggatctttattagggaggcattgataatggaagagccttatgtgataaggaagcctttttcggcccagatggcagcatggttatggaggatgtggaaagcatatttggagtcagtacaaatattaatgtgcattcctttagcaaaagagagcacataagttaragcaatcagttcggcttgttgaaaagtggtggagggaagaagtgcagcagcttctataacagaggtgtgggacacgacagcatatccagctttagctggtgaaaattgattgggtttagaagaactgccatcgataaaccaagtgtggtctgggtttggaattggaagaatagaaatataaggaaagggggaa

SEQ ID NO: 749513 - DNA, 576 bp, Homo sapiens
gtcatttacgtgtgtttagtagcatatacccagcaagagaaaggcaggctgccgttgcctttgtatagagtctgggtaggttttgatttcactcagagtcaagaacaaagcaacctctgacttttcctcaaactcagcccgtatggaatgacttttaatgacttcacgaactgctagccttcagatgactggagygttttttgcttcttaagtttttccttctatgacgttttatgattataccttatggtgcagttctatttttgttctcatgtgtttctgagtgcttaaagtctagaggaaaaattttttaactcatttggctcccatgaaatgtgcttttcagtttggggataacgtggagagaagctttaagtactgtgccaataccaaacatggcattccctattaatgagccaattccatcccctgagtctgaataatttagagaagacgtgatgtcattgtctccttagagataaatggaaaggagtctgggtgtagaatttttgagtggtctttataataatagtaattaaaaaacattacctcatatatttaaactttgtgtgcaca

SEQ ID NO: 749514 - DNA, 502 bp, Homo sapiens
aggcacagcttgggctggggaatgaggacaatatacacatggtagctgagaatatggtctgaaatcagcgatctgtatacaaatactgatcctgccagttactggcgtggctgggtgatgatggaaaaattgttgaacctgtcttytcatctgtaaaataggtttaatgaccctttaatatggttgtgagcattaaatgaaatgatatataatgacatatagtgcccaaaagataccacttgataaatagattttatgataatatatatggtattgtctaccagctgatgagtatgagataagttgttaacattttcctttctaaactacttggctatatgaaacctgacaagtccaacttgttttattttgtattgtgtagtatctgtcagtgttgcttggccatcgctagttaaaaaaaaaatctgtagcttttagggtatctgggtgattatttcatgccaaagtactacaagattttgtttgtctgatctgagatttc

SEQ ID NO: 749515 - DNA, 633 bp, Homo sapiens
ggagtggcaaagttattcaagacaggttaataagcttttaaaacaacaacaacaacaacaaataagtgtcccccctgctgtacaattttccaacacaatggataatttggaaagtgccacattctgtcagtacaaagaggagaagtggagatgatctttgagggaagaattggtcttgtgttttgagactacttttgttttcaaagctagatttaggttctggtttcagaaaaatccaatgaaatcttgaaaaaaaaaacaactctcattatatcttcaaaattgatttacaacatgacatatatggaaaaggaaaaaaagctcataaaattgaatgttggwtccttgaaatctatatatctgataatgtggtggttagacatgtcaaaaatgaaatttcccgttcatcttgacaaaattaaatttaaatgtctttttcggttttctatgtttaaaattttgaaaaatggattgaagatagcaaatgtctgtatcttcttttttttctggaacttgaaataatttcatgtgagtggcctaattataatatgctacagtctgtatcatctcctaaagcagagaaagactcattgagacttttttcatgttaaacatgaaagaattttaatgctg

SEQ ID NO: 749516 - DNA, 526 bp, Homo sapiens
ctcaattgcttctttgttcttccaaacttcatattcttgatgaggtgtagattgatatgactcaagggaagccaaagcaaagatatttgttttatgtatctgaactctagtgaaagccaaataggtaggcttttaaggtagactgagaggccagattttcagacatcactcaagcagaactcrtgctgggctccctctcatttcgatgagttgtccaaaccaaacacagccagtcaattccagttttttccaacagtttgcatagtttccaactgcggaaagggagagacaattttcgtgattccatgtcagatgtcaggcctgctgaccttcaaggaaagctgagcttgacaatggtgaacattgcccagagtacacaaagttaaaatatttgttcctttgccagaaatacagatggatgtaaaaataggaacattttaaaggtttaaatttaaacagtgttctttaaagaacacattattttgaaacttttttttattccggagctatcatatattttaattta

SEQ ID NO: 749517 - DNA, 612 bp, Homo sapiens
gggtctgtttttttctgccttcctccttttcttctttcttccttattcttcttgggtttcattaacttcatttctagtcattgattattttcacctgagttcttcctgtctactcagggtttttctttactttctttttttttttttttttctatccttccacttaagccasattctaacttgacactttcaaatatttttcagaaggtagaaatttggcattgcttatttgattggactaggtgccaggtgaaatacaggatgcccagttaaatttgaatttcagataaagaataattatttagtataaatatgttgcaaacattgtcccaactattgcatgggacatgtttatatttttaaagtatttgttattttactgaaattcaaatttaactgggcttcctgtagttttatttgctaaatctcgtaaccctggtttaagtgtctctctccctctccccaccccagattatatttagggtggggaaatgatcagggactggaatctagaagtgttggatttgttatttaacttccctgagccttgattttcacatttgaaaaatgagggtgtagatctagatgttctctccattcatttccaactct

SEQ ID NO: 749518 - DNA, 619 bp, Homo sapiens
gctactgagtcagatgaaatcttgtgtgttggcatacttaagaggagaaaatgcaaaaagagagcctcggatctgcacagaggtttcctttgacctcttggctgggagtaagctgtgcatgcacagtgcaaaataacatgatgcctagcagagagtggcttctggaatgagagccacagagatgcagagatcatgcagtgctctaatatgtagtagcttcagtcatgccagagtggaaatatactactgggcaacttagacattcaatgtagacccaagagaagtgatgctttgggaataaggaacatgctagggcaaaggagacaaatccaatgtaagtctcctttwacaaagcataaaccaagtcagataagatcaacaggatgttcgagtcatttaattgttgtcaaaacaaaactcaacacctttcaaagaaagactacctatttcagatatcctacaacaaaatattcataatgttttgcatacagaaaaaaataggtatgcaaatgaaaaccttaaaaaggtgactgacaaccaagagaaaaacacaggcaatagaaacagaccatgaaatgaccacaatgttggaattagcgacaatatgtgaaatctttta

SEQ ID NO: 749519 - DNA, 590 bp, Homo sapiens
accaaatagaaaggtttataagtgagaacatgcaatatttggttttctgttcctgcattaatttgcttaggatgatggctccagctgcatccatattgcaaaggacatgattttgttcttttttatggctgtgtagtattccatggtgtatatgtactatattttctttatccaatccaccattgatgggtacctaggtggattatgtctttgctattgttaatagtgttgcaataaacatgagtgcatgtgtttttcggaagaatgatttattttcctttgggtatatacccagtaatggaattgctaggtcaaatgatagttctattttgagttctttgagaaatttccaaactgttttgcacaggggctgaactaatgttacattcccatctgcagtgtrtgagtattcccttttctccacagcctcaccaatatctgttattttatctaatcccaaagctagcagaagaaaaaactaaaatcagagcagtactaaaggaaattgccactccaaaaccatacaaaggatcaacaagatgaaaagtttcttttttgaaaggagaaacaagaacaatagataattagct

SEQ ID NO: 749520 - DNA, 554 bp, Homo sapiens
ctggtttgggtaggtgtaccagtcaggataggcgtggttatactgtggtaatgagcagccccaaatctcagtggcttaagacagcaaaagagcagtagctcactcctgtaatctcagcactttggtaggctgaggtgggaggattgcttgcacacaggaattcaagatcagtatgggcaacagaccccaaaacctcagctctacaaaaaaaaaaaaaaaaaaaaaaaaaaaaagyagctgggcgtggtggctcacgcctgtaatctcagaactttgggaggccaaggtgggcagatcacctgaggtcaggagttcgagaccagcctggccaacatggtgaaaccccatctctaccaaaaatacaaaaattagctgggcatggtggcacctgcctgtaatcccaggtactggggaggctgaggcatgagaatcgcttgaacctgggaggcagaggttgcagtgagctgataccacgccactgcactccatcctgggagacagagagagagattctatatcaaaaaataaataagtaaaataaataaaaaataaat

SEQ ID NO: 749521 - DNA, 485 bp, Homo sapiens
atcacggtggccgtggaatctgcagcagcatcaggagcatcgagagggattgctcactgtgctggctctatcacttctctgctgtgtggccttggcaagtcattccacctctctgtgcctcatttcagaggttacaaatggagaccctctgatttctatttgacctattcagtgttttttttttttttaaagaactgaattaaacataaacttttaaaatccgaacatctcaaataaagatgcagatttctggcttcttcaraaaaccaagcatctggtcactcctggctcaggttcctgcaggacaacagctgggtgttggctgcccaccctggctcagacaggtcccgcttggaaacccgggagctcatgagcagaatgggcgcaactctcattcctgtgcctgctgtccctagaaggcagccgagctgggtatcaccacatatacctacagtacagcactcattctgttggtaggaactgta

SEQ ID NO: 749522 - DNA, 606 bp, Homo sapiens
agaagttgctgttttgtagagctgagctatcaatagggtagccactaaccacatgtggatatttaaatttgaattaattaacattaagtaaaatggtaacaattcagttccacagcacactagctgcattttaagtgctcagtagccacgtgtagccagtggctactgtattggaagctcaggttatgacgcatttccatatcatagatggttctgcaggacagtgctstcatacagggtgtcagggacgtccttgataatagcatgacatgtgagcagagacctgaaggaagcaaaggaggaagacaggcaagttccaggcagagggaacttcaagtgcaaatcccacggaagggagtgtgctctgtgtctttgaggggcttccaggcaatgggagtggtgcaaggtgaggtcagtgaagtcggcgaggcccaggtcttagaggacttcttccatgtggtaaaggctttggccatttcacagagtgggaagagaaggcttgggggtttctgggggaggagttgcatgatctgtttgtagaagttcatagaagttcactttggctaccatgtggagaatagcctgggaggggccacagcagcagcg

SEQ ID NO: 749523 - DNA, 606 bp, Homo sapiens
agaagttgctgttttgtagagctgagctatcaatagggtagccactaaccacatgtggatatttaaatttgaattaattaacattaagtaaaatggtaacaattcagttccacagcacactagctgcattttaagtgctcagtagccacgtgtagccagtggctactgtattggaagctcaggttatgacgcatttccatatcatagatggttctgcaggacagtgctctcatacagggtgtcagggacgtccttgataatagcatgacatgtgagcagagacctgaaggaagcaaaggaggaagacaggcaagttccaggcagagggaacttcaagtgcaaatcccacggaagggagtgtgctctgtgtctttgaggggcttccaggcaatgggagtggtgcaaggtgaggtcagtgaagtcggcgaggcccaggtcttagaggacttcwtccatgtggtaaaggctttggccatttcacagagtgggaagagaaggcttgggggtttctgggggaggagttgcatgatctgtttgtagaagttcatagaagttcactttggctaccatgtggagaatagcctgggaggggccacagcagcagcg

SEQ ID NO: 749524 - DNA, 546 bp, Homo sapiens
ctggggattacaactgaaaaaacagaacttaagtttagccaatctgaaatcaccaactaacctccaactagagacttcccactagattgtacctaaacaaggcaaaaggcctatctgtaaccaatcaagcaatttctttactttgctttcatgtgcactctacagaagcccgctgctcatgctgctgaagcagagttctctgaaccttttccaagtggagttctgcctgattcaygctcaaataaactttgttaaattaattttgtctaaattttttaaacaacatatataggactagaatgaaatgtccatcacctagcatagcaccaagctcatttcagggattttagaacggctttaaaaaaaaagaataaataaataaaagctttattgaagtataattgatatacaaagacctgcacatatttaatgagtgatatttattgcaatttgatgagtttggatatacgcaaaaaccatcagtacaattaaggtaatggacatgcccattaccttccagttttgttatgttggcagtaagaacat

SEQ ID NO: 749525 - DNA, 655 bp, Homo sapiens
gagttctaggtgaattgtgagtccatccttcttagatttcctatcgactgtgaacagtttttttgcttgttcttatgaaaaaatgcaaacagaacccattaagtgggtttaggggaaaaaagaattttttgaagaatattagtgcttcacgtctccaagatggctggagagtcacactgggaggctctatggagaaggattacatccataccatacaatgggaatgmaccagtacagactccatcgatgctatgaggacagagaccccagctcacattctgggctcaggatgtcagaaattccacttccagccatcactgccatctctagccaaaaaatagtttctacccagcatcggctctctcatcttgctcacttttcagtgatactctcactcattgtggttggtatggctgaggtggagcattacaaaggagaatgggaaagtgagtttcttgtttccaccttggggatgtgaaaggtttcttagatgagggaagggtgtttaaaaacttctgagcagtgggaaaactcccaatgtctacaatggctctttaatgctggatattattatattaaaggaaatcagggaaagtataactgctgcttggatctggctattagatgtcgactgtagaccagggcatctcaacct

SEQ ID NO: 749526 - DNA, 645 bp, Homo sapiens
gctcattaacccaattagtggatggagggctgtccaacagtctttgagatcttgggctggtttctctagctcactggtttcagtttcttcttcaaaaatcaagctggagatgaagacagaaggatggaatgatctctgaagtctcttccagctttttcaagattccaggttgcatattctccaagattggaaaggttctggctcattaaatttgacaaatataaggcatagtcttggcttyactcaactaattggtacttttttccctcaaactcttgctcctgagttgattaaacataattgaaactcatacaataaaaaatgtgggtgtggtaatgggaatgtattgaagctaaattatctagactttctgattgcactaattaaaaagcatgaaaggtttcttcaactggaagatcagttccttgaagttagaaatgatgtatttttccacgcctgtagtcccagctactcgggaggctgaggcaggagaatggcgtgaaaccagtgggcagagcctgtagtgagccgagatcgcaccactgcactccagcctgggtgaaagcgagactccgtctcaaaaaaaaaaaaaagaaattttgtatttttccttatttatatggctgataagaccctgagcatagt

SEQ ID NO: 749527 - DNA, 548 bp, Homo sapiens
attcaacatgatagagactctccactgctggctaagacagagggagccatgtggcaacaaatagagtgtattttagtggccaagaatggcagcttcagatggcagccagcaaggaaatgggagcctctgtcctacagcaacaaggaastgagttctgccaacaaactaaatgagctggggagaggatccctcgttccagatgagatgagcttgagtttggtaaacattatgatttcgagcttgtgagtccctaaacacagagcctagctaggccatgctcagactgctgactcatgtaaactgtaaactaacaaataggtgtaattttaaactgctaactttgtgtgagtctgtcttagagcaataaaacacaagtacagaataattgcctacatggagtttctgggtagttaggagcatgagagaatctctctggggctttctggcacctggaaggccttccctatggactggcagaatacttcctgttcgagcaagtctctccaaagcaatggggatcatgaaaaactgaactcattgacaatccc

SEQ ID NO: 749528 - DNA, 606 bp, Homo sapiens
caacgcttgtacaattttgtacctaagattctctgtcaggtatctgagcattaaaatttatttatttatttatttttttatttatttatttatttttttttttgagacggagtctcgctctgtcgcccaggctggagtgcagtggcgggatctcggctcaytgcaagctccgcctcccgggttcacgccattctcctgcctcagcctcccaagtagctgggactacaggcgcccgccactacgcccggctaattttttttgtatttttagtagagacggggtttcaccgttttagccgggatggtctcgatctcctgacctcgtgatccgcccgcctcggcctcccaaagtgctgggattacaggcgtgagccaccatgcctggctggctgattgctacattctttagcaaactaggtctcagtttcaaggatctcaaagtaaacccgagcaagatacactaggggaaatgcaacattggcttgaaccctgatgaagaatctattaaaaagggagaaaaattttaatagttctttctccattaacaggagaaggtaacatctgtatcttcctgacccgccttactttcggttcagaatcaacaaaa

SEQ ID NO: 749529 - DNA, 625 bp, Homo sapiens
tcatcatccatttccccattttccctctccatccacaagcatatactcaatattcagtctttttttttttttttttgagacagggtctcactctgtcgcccaggctggagtacagtggcatgatcagagttcactgcagcctccatcttccaggtttgggtgatcctcccatctcagcctcctgagtatctgagactacaggtgtgcaccaccacatcctgctgattttttttttaacttttaggagagatgaggtcttgctatgttgcccaggctggtctcaaactcctaaactcaagcaatccccttgccttggcctcccaaagtgctgagattacaagtrtgagccactgcgtctattcagtcttcattgcctgcatgcctgtgcgcatgcagttccctctgtcctttcttaccttctctgatggaaaacacaatcacctgtcaggacagttcagcttttcagtaaaacagcttccaacaactttagggaaattgtcacttcctcttctgtgcttttataagtctttgttcataaccctattataatacctatcacattatattataattatgtgttaaatttcaaggcattgattatgtctcaattatccagtgattaata

SEQ ID NO: 749530 - DNA, 621 bp, Homo sapiens
atatataccacattttcaaaatacaatccaccattgatgggcacctaggttgttttcatttctttgctattgcgagtagtgctgcagtaaatatatgagtgaaagtgtctttttggtagaacagtttatttttcctttgggtatatatccagtaatgggattgctgggtcatgtggttgttctgtttttagttctttgagaaatctccaaattgcttttcacagtggctgaactaatttacattcccacaaacagtgtataagcattcccttttctccacagcctcaccaacatccgttatttttttaattttggtaatagctattctgattggtgtgagttggtatctcattatggttttgtttcgcatttctctgatgattagtggtgttgagcatttttcmtgtttgttgtatgtcttttgagaagtgtctgttcatgttctttgtccactttttaatgttttttttcttgttgatttgtttaagttctttatagatgctggatattaaacttttgtcagatgcatagtttgcaaaaactttcttccactgtataagtagtctgtttaatctgttgatagtttcttttgctgtgctgaagctctttagtttaattagg

SEQ ID NO: 749531 - DNA, 611 bp, Homo sapiens
aacagataaataaaatatggtatatatacgtgatggaatactatgcagccataaaaagatttgaaattctgatatatgctacaatgtgggtaaacataaaaaaatattgtgctaagtaaaagaaaccaaacacagaagacatcatattrcatgattccatttagatgaatggaccagaaaaggcaagtcaatagagacataaagtagatcaccttgacattccgatttttgaaaaattgtcacagtgaaaaagtagacaaaacatgaacatggtatcacaaaactggtttttttctttttgttttttgcctaggtctgggagtgggaacagggattggtagcaaatgagtatatgggctctttgaaagtgatagaaatgttctaaaattgaattgtggcaatggttgcccaactctgtaaatttattaaaggtcactgaattgtgaagttaaaaaatggatccattgtatgatatgtacattatacctcaagaaagctatcagagaaaaaaatttaggctgatcattcaacttaagcaagacaggggaaggggaaaaagaagactgggctggaagtttctcatgttcatagaacttacacgagcccctttt

SEQ ID NO: 749532 - DNA, 675 bp, Homo sapiens
cagtgggacaagatgtggaggtggaggacagtgatattggtgatcctgattctaatgtgtgggtgtctctgttaacttttaacaaaaaaacgtttaaaaatttaagaaaaaattaaaaatagaaaaaagtttacagaataaggatatgaagaatggaagtatttgtctgcagctgtacaatgtgtgttttaagctgtggtattacaaaagagtcaaaaagttttttaaaacttaagtttataaagttaaaaagttaagctaaggttaatttattattgaagagataatttttttaaatgtttgtgttttttttttgagatggagtcytcgctctgtctccaggctggagtgcagtggtgcgctctcggctcactgcaacctccgcgggttcaagagattcttttgcctcagcctcccgagtagctgggactacaggcgtgccaccatgcccagctaatttttgtatttttagtagagatggggtttcaccatgttggctaggatagtctcaatctcttgacctcgtgatctgcccacctcggcctcccaaagtgctgggattacaggcatgagccactgcacccagtctttaaaaataaatttagtgtcgcctaagtgtacagtgtttaccaagcctacagtgatgtatagttatgtcctaggccttcacagtca

SEQ ID NO: 749533 - DNA, 584 bp, Homo sapiens
gggttcaagagattcttttgcctcagcctcccgagtagctgggactacaggcgtgccaccatgcccagctaatttttgtatttttagtagagatggggtttcaccatgttggctaggatagtctcaatctcttgacctcgtgatctgcccacctcggcctcccaaagtgctgggattacaggcatgagccactgcacccagtctttaaaaataaatttagtgtcgcctaagtgtacagtgtttaccaagcctacagtgatgtatagttatgtcctaggccttcacagtcactcaccaacagcaactctcagtcctgcaaactccattcgtagtaagtgctctgtacaggtatatcatatttttatcttaatwtcttaattttactgtaccttttctatgtttaggtatgcttagatacacatttgcttaccattgtgttacaattgcctacagtattcagcacagtaacatgctaaaccagtttgtaacctaggagccataggccataccatatagcctaggagtgtagtagcctataccatgtaggtttgtgaagtacactccatgaagtccgcacaactaca

SEQ ID NO: 749534 - DNA, 630 bp, Homo sapiens
ggaactgttgctaaaggatgagagatgacatctttcttctaagctctaagatgaagttccaggagattcatagaaaacaaaggatcacaacacaaattacaatagcccctcatttctctctttcctcccaggcccctgatgtcaccaatccagaaataagggcacataggccctaggatgccttcaacaagaccaaattaaggagcaaatgatctcttctacctggtccagaatgtctacctaataatggcatcaaccaccagccacagtgtatgccagtactcaaatgctggtatcaagctagctgcgtataaattaccgggggagttgtggggcagggaacttacatctttaatggatatttcagaaaattctaatttactcagtcctaatggaagcccagaaatccatatttttaaaaatctcccaggtgattctgatgaatggctaagtttgcaaaatccaccaatacatttyctttatataaaaatataagtgaaatttccatgaatttatttttttttttgtttccattccaccactcctagtttctgtagcttactacatctgtttctacatatacagctacaagagacaactcccttccctcactggtgagagatacagccc

SEQ ID NO: 749535 - DNA, 513 bp, Homo sapiens
gctctgaagtggagaagcagaatggtgaggagttcaaaagctgaggagcttctagctcgcctgtgaataagaagcggtgtcgctggtgcctctatatgtgaagacccaagaaaggtggtaggcagggttaattcacagtgtcaaagaagccaccaaccattagtacctagaagttaaaaagtccaaatatttttggtaaaaatttgtgggtacagaaaaggcagttgccactgcctttataaaagtttagctaaggctccttttagaatagtcccaatagccatttctstctttgacatgtggctggcaagtccttcactacatgtttctacttagaccagttacagtgcctgagattccaccattagatggtgtttctgtggagtaccttgaggataaggattagttaacaactagtttagagggattagttaacaactagctgatggcaagaagggtagtctgagtttgagggtggctaggaagtcaaaagaaagtgaactgtactgaagt

SEQ ID NO: 749536 - DNA, 531 bp, Homo sapiens
  misc_feature 515: n = A,T,C or G
ctaaatatccatatttgcataatatcccttctctttgtgcttccctacaagtgctgtgaggaagattctgttcccaagctctgtctcttaaacttctcctgaacctcttggggtttctagtctccctactatctacctttcttatttcccaaaatatgttaaagcattctatcacctctatcaccataagcctgcagaatcctccttggaaactcctgacaattcatttcgagccccattcattctgacttcttctacatttaatctgatttctaggacaggaacgaaggtaaggcaagataggcactcrccttgagtactcgggtataaaatttaagaggacatcaaaatctcagtagcctagattaatatttcaatgccatatattttaacgttttttaaaattaaacttttattttgagataattatttcatatgcagttgcaagaaaggatagagaaacatttccccaccactatcctttacccagtttcccccagtggtatgatcctggnaaaccaaagtatcaca

SEQ ID NO: 749537 - DNA, 552 bp, Homo sapiens
agctgacaaggcagacttagagaaaagagtagcattatgtgaaacaataaattgagagctgcttggaaagcttttttaaaagccatagaaatgccttcctaatatttttaatgccaaaatttggaagatgaagaagatamcaaaaaggaaaatatttttatttaaattatatatatacacatttttaattaatatcgtgtatgatgtggctttttaaaaattaatttgcctgaaaagttttctttcgccatatgttttatttacaatataatttctctctctactcagtgattttttttctctctctgtccatctacaacagagaaaaaaggacatgtattttaatatttacctgaatctttgattttggacccatttcagatacgtttatgaatattttatttatttttactttgcaactttggagagtgtggaatttaaatattctttttgtcattgcctatattaggaaaccaaaattttcaggggtaaaggacaagccagctggaggtaaccctggggttttaaagtattttcttgtcattaaagcca

SEQ ID NO: 749538 - DNA, 589 bp, Homo sapiens
cattgagccaagatcgggcgacagagcaagactctgtctcaaaaaaaaaaaaaaaaaaaaaaggaaaaggaaaagaaagtttcatttgttttaaaattaaaactcctcagtacacattcagcatttacttacctgtccccctttttattcactatttttgaagcattagtatttttttcacaatggatttttaagcttcttaaataagagaaccaaggctggctgcaggtgcccacactctgcatggtaatgtcctccatctttctgagaatgaaatgggtcttcaagacatttgcctcttgggagtattctaatatctgttctcacatataaggctctcaggaaatacgagccaaatcacagtggacaaatatatcacccatyattgctctgagatgccatatatgtagttacttagtttagatactaaagtgagtacttcaactttagtgctccagaaggcaaaatgacttaattactgctatgcttatctctatctatgtatacaatccaaaatcacctctttttcttcttctcccatctttttttatcttacattgtagttttcagtactgctgctggacaacaa

SEQ ID NO: 749539 - DNA, 551 bp, Homo sapiens
aatcagcaataaagatcatgaaattagcattttaaaggggttaaaaatgtaaactattaaggaaattatgaacattcatatttttaaatgccatgatattttctgaaatacttctgttggaggtttcttgtttgactaataattaaggggctacccaaagaaatataacattttgggaaataagtgttatattaattatgttaatctaaattaataatatrctgtttttattttctaaacaggaatcagtatttacattgaaaactatcttccccatatattttggcattgaattaatcagaggatatactcagaagttgccttcttatcatattattaaactacagtatttttacaaaatacatttcccctggatactatttctgatcattcttccaactaaaacagtagaaatcagtgtaggactattaaggtgatttaaaatctaatgtagtttttaaaattcctcaacatttaattcttataaaacatgttctagcagaagtgtctaatgcaaagtgaaatgtttattttattccttctatttaatt

SEQ ID NO: 749540 - DNA, 559 bp, Homo sapiens
tttttaattggattattttctattgagttgttaaggtttcttatatagtccagacattaacctcttgtcagatctatagtttgcacatattttctcccattctatagattttctcttcatgttgttgattgtttcttttgttgggcagaagctttttagattgaagaaataccatttgtctgtttttgattttgttsctggacttttgagtacttgtttgaaaaatctttcccagaccaatgccatagcgcatttcctttatgttttcttccagtaattttatagtttcaggttttacattgaagtctttaattcattttgagtcgattttttataatgttattgataggagtctagaatcattcctctgcatgtgaatatccagtttgtccaacatcatccaagtttgcaaggagaaaataaaatagtctctgtcctcagatgacatgctcatacatatgactccaccaaaataagttaaaattaataaatgaattcagtaaagtggcaagataaaaaatcaacatacaaaaattagtagtgtttttatatgccaata

SEQ ID NO: 749541 - DNA, 619 bp, Homo sapiens
actgcactccagtctgggtgacagaataaaaccctttctccaacaaaaccccaaaaacttcagttgaataatagctatcactgataaaattttagtaatgccattggtaagcctaaaaagtatatataaataataattattttaattaaatggcttgctaacatcttacactaatacatgttaagataattcccataataggataaatcwattctgcaggagtgaaaaatactggaatcaaggcctttttaaagagttaacatttccagcctctactacagataaacagcaacattataaaataaaatatgcaaagtagtactgtttgaaagatggacaagacattgaccttccacttgtaatgatattcatgttgttttatgttgtcacttaacctaataagaggaatattgaatagatggcattattttcattttctgataataagactgaaatatagaaaataaatgattatctcattgatataacaattcattcaacaaataggcattgagtgcttaccattttccaggcgctcttcaaagagcttggttcttgacaaagaacaccacagacccatccactacccattcagaatttatatagaatatgtgcccat

SEQ ID NO: 749542 - DNA, 613 bp, Homo sapiens
aattccacatagctatccaagttcagaatgcaaaaccaggtctcatatcagcagtttggtgtccctgcattagctaacactgggaaatattgggtaatattagggaaatattgaaaaatccaaatacccatccatttaccatagcacttaactacaagcttgggccagtatcttcccatctcctattagctgcacccccaattaatagctttcttatttatgtctccagtcacatgtcaaagatcgctataccaatccctcagttcaaatcataaaccttacttcattcctccaactaacgaagaacaatttagaattttatgtgagccaaattcccagtcacataatgttgactgcttcaaaaccccaggacccagtaggccgagggctttrgcaaggctcatcttactttttctgtttgtcttctgtgacatatcttgcttatcactttttataacttatctatcaatgccatggttttggaatttggataggggaagttgctcaaggtatgaccaaaagtagtataatctttaaaaacagatccagaattaactctttttcatatttaagaaatgttgattcataaggtattcatatttttccaatttat

SEQ ID NO: 749543 - DNA, 471 bp, Homo sapiens
acaatgtagtttattacaagaccaactactgaaagcattccctatgtgctattgtggcttgaatctctgggcatcagatactatttcaggtttttgaggaagcaattgatacagaaaggacttactccttgagattaatgcagtaagaactgaagaatgaatagacatttcataatagaacaaaaacacaacaaatataagccacctagcatatctgagacaaaatttcagaataagatatattctcatctgcccccccccccaaaaaaaatgaactaacgacccatttccagctccatgattctatttgagtagtttaatatccagtgatattascacaattatttctttcatgtcaacaagtactaagtttaaaactaagcactgaagaggacaattatcaaacttacagaaagtgctacaaatttctatgaataaagtcaaagatgctataatctttttaaaactcat

SEQ ID NO: 749544 - DNA, 620 bp, Homo sapiens
agttaattttgtgattaattataaagtactttaaaaacagcaatgggtgggatggcgtctgtggttggcaatagacatgctgtggataatttattattaaaggcctttaaaattttaaaaacccaattaaaaaaaacttataattgaagagtagggaattcttctttaaaaagcagcaatamgattaagccacattatgcaacctctgggcaaatgctgatctcataataataaagtatttgcctattttttgtgtgagttaaataccattgaaaccgctgaacttgataacacctcaggctatcatcatgttaggtttctatatataataaagagtgggagacatataggggggaaaccgcagaaatgagaaaacaatttagaatggttttttaaaaaattgtttttgtttttttcctgagaccattaacctgtcaatggcactatcatatgaattagtttattcctaactagatgatgttcttaggactaattgtcactcatttctaagcctgcccaattttacacccacattagatagtacagtcaaaggcgcttagatcatatgaaatacacttcccaaagaaatatatcctccagcttttgcacacgggctttct

SEQ ID NO: 749545 - DNA, 572 bp, Homo sapiens
gcagatgggtgacttagatgaatagatgggaggtaggtttgccctaagcagtttgcagcttgagctttccttagtgattttgggggcctaagatattttcctttcacatatctgtctcatgtgtccgtgtgaagagaccaccaaacaggctttgtgtgagcaacgtggctgtttatttcacctgggtgcaggcaggctgaatycgaaaagagagtcagcaaagagcagtgggattatcattggttcttacaggtttggggataggcagtggagttaggagcaatgttttgcgggcagggatggatctcacaaagtacattctcaagggtggggagaatagaaaagaaccttcttaagggtaggggagatgacaaagtacattgaccagttagggtggggcagaaacaaatcacaatggtggaatgtgatcagttaaggctattttcacatcttttgtggctcttcagttgcttcaggccatctggatgtatacgtgcaggtcacaggggatatgatggcttagcttgggctcaaaggcctgacaatatctaaggtaatggatttaggcagct

SEQ ID NO: 749546 - DNA, 481 bp, Homo sapiens
tataaaaataacatattaaaaaatattcaccagttctatttacagaagacttagtcttaaacttagttaaatcatgcctcagattcagcttcctctaatatgtgtaagtatgctctttgtccagatgcttgaataacaaacatgaaaagttcgtatatactttgtttyttttccagctctacctagctcttgttcagctcaaatgtgattaccatctttttttttttttgtcataaaccaaatcaggctaggtttatgtgaaattttggagtttatttgccttgttaatacaataatatagtttaaagagtttttcatagctgaagaaagtttatgttgctcgttgaaaaaaacatgtcttcaaagacaatgtcacctcccggccattgcagcgatggtggttatattggtatgaaaacttgcgtgtgcttgaaatattcttatcattgactaagaacagtgatgtatttccacaatggga

SEQ ID NO: 749547 - DNA, 539 bp, Homo sapiens
tatttctcattgactttgttttaatgcttaattctatttttcgcaataacgttcacagatgattttatttttctcgcatagattacaaacccttttatggccagaagtaccctagtttttttgtatttcctgcatttggctgcatccaacaccaagtatcaagtataacatcaagaaatcccttaccctctgattgttaatagcactccactgtggaagctgggtgagatacatacagaggaatcattgacatattccacacatgagatggggctgacctcmcctcccaagactatggctttgtggattcatatatttatccaaagtgaatatttgagatgtctttctaacaggacaagataattcctttatgatatttatttcgtaagaataaatatatgaaatgtgtcaatgcacgtagcctgcaatggtgaaaatgcaatacttcccaggcttgtatttttcagtcattgcacagtgcatttactgtcgtctaattaggcattctaaaaacctgaagtccccttgtgtttaccctg

SEQ ID NO: 749548 - DNA, 555 bp, Homo sapiens
atatgacttgaaatataggagtgctatgaacctttacaaacagagaaaaagcgtatatgtgagtgactaaatgcatatatacagggaggaagtgcatttccatatttattaagtattttaattttgtataatactggtaacaacttactggggggaatttaaatgtatgtccttcactctttgaaattttagcagtggattggagaaaaataaataaataaagcagaatatagacagaaattcattaagcagagatagaaacttaatatacttagtttttatacagtgaggcagtgctcaccatgtatcttatgaagrgaggtcatctttggttgaaactgactgagaagtcctatcagaaaagtaaggactcatttgaagtttgtggctgataaatgtttctctactgaataggaaaacagaattctgggaaggaagaacaagggagttgaaaattggaaactgaaataaaagtaggctgtctaaatagtagtcatgattaactgaaatgacagatcgattgtagatttaagaattaatactaagtgaacagca

SEQ ID NO: 749549 - DNA, 491 bp, Homo sapiens; identical to SEQ ID NO: 742367

SEQ ID NO: 749550 - DNA, 637 bp, Homo sapiens
ctatctatctatctatctgtctatcaatagatagatctttaatcttgtttccaaaacctaatgtgtattaaatagtaacactataaacacacacatacacatatatacacatatgtgtgtgtgtgtgtgtatatatatatagagagagagagagasagagttgaaataatgacagtatccccctctatattttagggatgcttacttttccataagcaatcttgaagtgtttgtatagtactgttaaacataatattcagaagaagataaagtcagaaccgtcatacaaatgtaaaatctaaacacattaaactttatggcttttcttatatgagggaacaaggaagatgttatcaccagttcaggaaaagtaattatatatacatacacacacacacacacacacacacacacacacacatacacacccaaaggaaaagaattacaaatgagtacaaaactgtttttttttaaatacagaagcagagaaaatcaatggacactctttgaaaaagatagagtttgcctatctatgtgttccttacaattaataaataggtgtgaaatgcaggcatacctcattttattgtgctttactttattgcacttcacagatattgtgttttttacaaattga

SEQ ID NO: 749551 - DNA, 637 bp, Homo sapiens
ctatctatctatctatctgtctatcaatagatagatctttaatcttgtttccaaaacctaatgtgtattaaatagtaacactataaacacacacatacacatatatacacatatgtgtgtgtgtgtgtgtatatatatatagagagagagagagacagagttgaaataatgacagtatccccctctatattttagggatgcttacttttccatragcaatcttgaagtgtttgtatagtactgttaaacataatattcagaagaagataaagtcagaaccgtcatacaaatgtaaaatctaaacacattaaactttatggcttttcttatatgagggaacaaggaagatgttatcaccagttcaggaaaagtaattatatatacatacacacacacacacacacacacacacacacacacatacacacccaaaggaaaagaattacaaatgagtacaaaactgtttttttttaaatacagaagcagagaaaatcaatggacactctttgaaaaagatagagtttgcctatctatgtgttccttacaattaataaataggtgtgaaatgcaggcatacctcattttattgtgctttactttattgcacttcacagatattgtgttttttacaaattga

SEQ ID NO: 749552 - DNA, 637 bp, Homo sapiens
ctatctatctatctatctgtctatcaatagatagatctttaatcttgtttccaaaacctaatgtgtattaaatagtaacactataaacacacacatacacatatatacacatatgtgtgtgtgtgtgtgtatatatatatagagagagagagagacagagttgaaataatgacagtatccccctctatattttagggatgcttacttttccataagcaatcttgaagtgtttgtatagtactgttaaacataatattcagaagaagataaagtcagaaccgtcatacaaatgtaaaatctaaacacattaaactttatggcttttyttatatgagggaacaaggaagatgttatcaccagttcaggaaaagtaattatatatacatacacacacacacacacacacacacacacacacacatacacacccaaaggaaaagaattacaaatgagtacaaaactgtttttttttaaatacagaagcagagaaaatcaatggacactctttgaaaaagatagagtttgcctatctatgtgttccttacaattaataaataggtgtgaaatgcaggcatacctcattttattgtgctttactttattgcacttcacagatattgtgttttttacaaattga

SEQ ID NO: 749553 - DNA, 574 bp, Homo sapiens
acacaaaccagggaattgtttgtttgtatattaccatgaataacaattcatttttattcttactcttgctcagtgttaatttaatacatacagatttgttgatgttaaaaaattctagtagttttgtgtttctaatctacccaatctayggcatttcaagttgtaagattcttgaaaaaaggtaattttagtgtctcctttttgggcttcatatttaatgatcaacaagctttatatcagacagtgatagaatcactaagaaaaagctaatttattaaaaattattagttaatacatgttttaatcataaagtgtttatatacaatgcacacttttggtgatttaagtttggattgctttatctcacatttaaactccaaccatagtaagcatacatttataattatagctggaatggaccctagattcatttttaaaacagtcatctctcgatatatgaggaaaccatattctatggattgaatgagcttctgggcagggaatttgggatttaactaggaagataatttgtaatgtaactagaatttgtgacattactagcgaatttgtgaca

SEQ ID NO: 749554 - DNA, 516 bp, Homo sapiens
tgctgaaaaagcaccacagcaagaaacaactaacacatccaatcgtcaaaaagaagaaaatgaccacgctaactcctttacaacagacaatccagtcagccttcctgaacaacttgtctccagagatccaggtctggctcaacstctgcctcctcctgatgacactgatccttctaccctctgttgccccacagactgttaaaaactatacacattgggcctatattccttttcctcctcttattcgagccatgacatagatggacgctcctatcgaggtctatgttaatgatagtatttggatgcctggttctgtagatgatcgttgtcctgcccaaccttcagaagaaggaatccctttcaatatcactttaggttttaggtgtccacctttgtgcctgggacccactaatggatgtctctcattagatattcaaacttgggcggtcacactaccatctggtcactctgtccctcctttgggacacttggtatcagggctctcattaaaacctc

SEQ ID NO: 749555 - DNA, 516 bp, Homo sapiens
tgctgaaaaagcaccacagcaagaaacaactaacacatccaatcgtcaaaaagaagaaaatgaccacgctaactcctttacaacagacaatccagtcagccttcctgaacaacttgtctccagagatccaggtctggctcaacctctgcmtcctcctgatgacactgatccttctaccctctgttgccccacagactgttaaaaactatacacattgggcctatattccttttcctcctcttattcgagccatgacatagatggacgctcctatcgaggtctatgttaatgatagtatttggatgcctggttctgtagatgatcgttgtcctgcccaaccttcagaagaaggaatccctttcaatatcactttaggttttaggtgtccacctttgtgcctgggacccactaatggatgtctctcattagatattcaaacttgggcggtcacactaccatctggtcactctgtccctcctttgggacacttggtatcagggctctcattaaaacctc

SEQ ID NO: 749556 - DNA, 516 bp, Homo sapiens
tgctgaaaaagcaccacagcaagaaacaactaacacatccaatcgtcaaaaagaagaaaatgaccacgctaactcctttacaacagacaatccagtcagccttcctgaacaacttgtctccagagatccaggtctggctcaacctctgcctcctcctgatgacactgatccttctaccctctgttgccccacagactgttaaaaactatacacattgggcctatattccttttcctcctcttattcgagccatgacatagatggacgctcctatcgaggtctatgttaatgatagtatttggatgcctggttctgtagatgatcgttgtcctgcccaaccttcagaagaaggaatccctttcaatatcactttaggttttaggtrtccacctttgtgcctgggacccactaatggatgtctctcattagatattcaaacttgggcggtcacactaccatctggtcactctgtccctcctttgggacacttggtatcagggctctcattaaaacctc

SEQ ID NO: 749557 - DNA, 516 bp, Homo sapiens
tgctgaaaaagcaccacagcaagaaacaactaacacatccaatcgtcaaaaagaagaaaatgaccacgctaactcctttacaacagacaatccagtcagccttcctgaacaacttgtctccagagatccaggtctggctcaacctctgcctcctcctgatgacactgatccttctaccctctgttgccccacagactgttaaaaactatacacattgggcctatattccttttcctcctcttattcgagccatgacatagatggacgctcctatcgaggtctatgttaatgatagtatttggatgcctggttctgtagatgatcgttgtcctgcccaaccttcagaagaaggaatccctttcaatatcactttaggttttaggtgtccacctttgtgcctgggacccactaatggatgtctctcattagatattcaaacttgggyggtcacactaccatctggtcactctgtccctcctttgggacacttggtatcagggctctcattaaaacctc

SEQ ID NO: 749558 - DNA, 597 bp, Homo sapiens
aatagggaatcagtaaactgtcatttacaaggaagtgaagataatttaagtttagacataagcaagctaaaagaacagatttttgaggcctcacaagcacacttaactgctttacctggtgctgaagttttaggtggtatctctgagggattatctaatctcaaccccattcaataggtaaaatctttgggaggatccactatcgttaattttgttttgtatataatttgtgctattggtttattgttcatgtgtaaaattggaaaaaatattcttcmatccaattgtgatcagcaccaagctatgattgctatggttcatttaaatcagagaaaagggggagatgtagggagaccccctgaaactattgctatggaataaaagatgaaatgctcctgattattgtaaataaaaaattgcatgcaggattgtgtaaagacaatgccaggttggactgccagaatgagccaacagcatgtgatgtgcttccccctgcagagagcctatgaatggacgtgcagtcagggaggtttcacatcatcaagattcctatcccagaaaagcagatgttcatagctctaggaatggaatgcgacc

SEQ ID NO: 749559 - DNA, 613 bp, Homo sapiens
atatattatatatatatatttagagtgctagaaagaaaagtagatggggcagaggcaatactgggttagataatggttaaaaattttccaggactgatgaaaaacagcaattcatagatttagaattgtgattcccaagtaggataaacaaaaacaagtcccaccaaactatatacagttttggcatacaaataataaatcttaaaagcagctagagtaaaaaagcttaccttcaaaagaacaatagttacactgacaaatgactgctcaagaacatcagtgctggccaggtgcagtggtgcacacctgctgaggctggaggctctcttgagcccaggaatttgaggctgcagcattcagtgatcgcacctgtgaagagccatggtgcaccagcctgggcaacatagcaataatccaactattaaaaaaataaataaagaacattatggaagycagaaaacaggagaatgttatctgcaatgcagtgctaacccatactccaaaacctataaaacataactttaaaatgagcataaaattaataatttttttttcaggcaaaccaacatgaaaagagcttaccaaaatgagtcctgattagaaagaaattcta

SEQ ID NO: 749560 - DNA, 633 bp, Homo sapiens
ggggtagttatcataggagtggcatcctgataaaagggtaagttcagcccccattccctctctatctcatgtgtttacttgccacgggatgcctttttccatgaggtgaccctcttcagatgccagtgccatgctctaggacatcccagcctctggaactgtgagccaaatggacttctgttctttataaattatycagtctgtggtattctgttatagctgtagaaaacagactaagacacttaccctcaggcttattatgcaaattagaggcaatatacaaagcacctggcatggagtagatactccataaatgttgaatatatttgactgcataattaggatctgaaaagattaggcagcctcaagagaggaatcaaatctaataaaataacatgtagtagttttatcttataattttgaatttggttcaaaacaaaaaataataaaacaaaataaattgcgaaagtccagggaagagaagctaaaggaataagctctttctacaaacctgtctgccctggactctgacaggttcactctctgtattggactctgtaaaccttttagccaaaataaaccctgtgagaattgattttagtcaaaagcaaactctccttcgtcaatcatgag

SEQ ID NO: 749561 - DNA, 694 bp, Homo sapiens
gttgataaaaggggttacgaatctatagcaattggccagacgtgggattttccaggtttcagaatttcctagttagctgagggttacttgaatatcctcctcctgacgggggggcgcaaatacatagagtttttattaaaaatcagtctatttgcttatttaaaaatacaaatatgtgtgtatttttattacttgaaaaacagaaattctagaatagtaaatttttattcctattttgttcatctggcttcatctggtgatcagcaccttcatccttcattttcaattattcattttggaaacggcagtggagttagttttatttttgaagtttacagtgaacctgaactcaagaatcaaccaggagcatctggttggtgcagattgtaagcctgatagtatccttctgtgaggatgaccacttaggtgctcagaaatgtgttacttgataaggcaaaaagttcagttcctgctgagttaagaattagagaacagcgcagcttgcgtcattgagaagcctcgacctccatraggttcctagctggcgtttcagccttaaacaatggcaacagacacagcagagcattaactatttgtatgcctcgagtataatgtaagtgaaaggaacactatagcaagatgatttttcaggactaaatttctactaattaattctggaaagtaaaattgcatt

SEQ ID NO: 749562 - DNA, 521 bp, Homo sapiens
tcaaagtgactgagtgagtcagagtcttatgacgcttaagctgctccctgagagccaagtcaggcactcagaaaccgggttagctcttcgaggatcagataggcccacttagaaaattatctccgtgcctggagtggtacctacattgcatcacaggggagccaagtggctgcaactttatatatatatataaaatctcaggccagattctcgggaagcataagaaaacttaagcagtttttggaagctgttgtaactttctcaagttattaaagtatcctttcatrtctgaaatggcaacatacccatggttgtttctaatgtcttgaaagagttattgcaatttaaaaaggcacaggtttttttttttcaggaaaggtgtttaaactcatcacacatttttaatgatcttctttgtttaagagatgatttcactctagtgcacccattttaagatgtctataattatgttaaatagggaatggtaaaaatagtttaaaaatatatgatggagttttttc

SEQ ID NO: 749563 - DNA, 600 bp, Homo sapiens
aggctgtttacagtgatttttttttaatgtaagtataaggagcatagtctaaaacagtgatggatagtatagcatagtaaatatataaagcaatgtcatagtcacttattattatcaagtgttacctgctgtgtacagttgcactgctccgctttcacatggctggcagcacagtaggtttatttacaccagcatcaccaggaacacatgcgcaatgcattgtgctatgatcaatggctactatgtcattaggtgataggaggtttttaactacattataatcttatgggaccattgtatacatgatccatcattgattgaaatgtccttacgtggtacaggattttgtgtgtgtgtgtrtatatatatatatatatatgaaattatatgccataagcaaatgaagtgttttccttgtaggaatgaaagactgttcaatatttcaaaatcaatgtcatttattaaattaacaggataaagaagaaaaatcacatgtttatatcagtcgatgcacaaaaagcatttgacaaattcaacacccctattagtttcctaaggaaactaaccaccacaaatgtactgtttgaaaacaatacaaat

SEQ ID NO: 749564 - DNA, 622 bp, Homo sapiens
agtctctcaaagctctggaggccacaagtccaaaatcaaggtgtcagcaaagccatgctccctgccagatctcccggggagagaaaccattcccagccttttacagcttacagtgtctcctatgctcctcagctaacagtggcaccgctggaactcctacctctgtcttcatatcacatgtttctcttggtgtctgttttctcctctatgtgtttcatacaaaggcattygtattttggatgtggggacaccaacataatccaggatgatctaatctcaggatgtttaactacattccatctgcaaagacccattttccaaataaaatcacagtcaccacgtctggggacaagggagtggacatgtcgttatcgggggccaccatcaagcctgctgtaacgtctgttcatgacaacgtctcagcaaggcaggaggaaatgggtcgtcctcagtttgtgataaagagcacttacaaaacaacaaaacaaaacaaaaaaacacttagaattaaccttactgatgaaagactggatgttaccccctaagagtaagaacccaccaaggatatccactcttcccattcagtatagtgctggaagctcaagtccattcaaaattgcaa

SEQ ID NO: 749565 - DNA, 597 bp, Homo sapiens
cttaagtgaataaataacatttattttggaggatccggagattgataaaagtcttgcaaaatcactcagtgagtaacacaccaaaaggaacagttcactttttactaatgcctttgtctgcctcccctgaatgaatttcagagttgcaaacaaatatgaaacaaatggggaaaaatgtgttttaaaagctaatagatctatctccgtatttagtaaacatagattgcaatatccaagaatccaactgctttcttatatgagaggctggtattctttagttctgaagattcccaatatgacgcaccatacacaggcacaggcttttatttccagcarctctcctataggctaagattgatctgcaaaagttctagtcaggatagagctagacactggaattctgattgagttgcctcatctccctagatgtgttaacaaccagaagcccaatatatcttcataatgcttagaattatgttgccttcattttctaattaaaggcctgattatatttatgacagttagagaatttaatatgtgcatgtttacttagctgaaaaattaaattcataagctcacctactattcactacagct

SEQ ID NO: 749566 - DNA, 560 bp, Homo sapiens
tatgaatcaaggaatgttggaaacttgctgatttttttaaaaatgtaaatttgttagtctgttagtcctttatggttttttcaatgcagctgggacactgaagttgaaaaaacattcagtgtttaaaatcctaccacttggctgcttggtagatactgacttctgacttcctctgagacagtgagaaaacagcttggcgggaaaaatgaagatagcaaaagcttacaggatgccactgaggaaagaaaagagcaacacctcagactatcataaactgactgttgtagagcattctaaagaatcaacggagatagattgcctacaatcccatgtctttcaggaagattgccaagtacagaatttctactttgcccamgtcattattctagtaattttcctccacaacttgaaatctagtgagatagttaataatacttattctgaaagcagctttcaaaaacgccaatattcccccaaagtttcaatgttcaccaaactgattttttttagtttgcaaagataaattatgactgatttaaaacataaagtagtttgagctt

SEQ ID NO: 749567 - DNA, 621 bp, Homo sapiens
tgaatagctacagtaaagtactatatacagaaaatatttatttaaaatactaatttcaataatcatgaaagcaattaagaattcatatctctttctataactataatcttcaatgaggctataaaataactttttcctttgcctcaattcttctcggattccacattccacatgcaaagcatgtttaatagaaattagattgacaatcataactgtgtttcttgagatgggttctgacagtaagaaatacgtaatgttttattagctgaggttgctgtaccatgagacacagtcctttccaaaagktcttgtttgctgtgtggcaaactttggtagatatacaaagtaaactttctgaggatgctatattacacgaggaaaactttcaaaaataaatttcagatttgcttaagttccgcctcagaatatatgtattttttactgtttccacatttcactgagaaactattatgtcaaatattccacataatctttacattctcaatatatcataatgcataccaaaatagtcttgcacacagtacatcaatcatgaatattttcattacttggcttaaataataaatggctcatgcaatgtatttttgtttgcaaactttt

SEQ ID NO: 749568 - DNA, 621 bp, Homo sapiens
cctgttgttagactatggaaacttaacatcaatttgattttctgggtcatggaccatactctgcgttttatgtcatactttttatttttccctagatttgaacattagacaaggaaaaagataatgaatattcatggaatcattttacgtattgccaattatatgcaaacacattcaacagatacttgtacttaatctacaccaattacatagtgcatgatttagtattgaagcatacctaataaaaataagaagaaaaacagacatctgtttcttttaaaatatatatatttccctgtctgtggttttgaagtttttcagggtcacagataaaggacaggtttattcctatgtgtgggtgtgcagtgtgttcttgtactgargtctgagttcttttccaattctctgcataattcagttttcttctcctagcactagttacctattgttggccaagaaggtctagagaaggtaaacaatatagcttttatataagtgaacattttactgatttttttaagtaaagttctcagcttaatttagcctctggggtatgaaatggaagctgagtgagacacagagataacctggtagaagctgctcaaggaatgatgtggcttc

SEQ ID NO: 749569 - DNA, 633 bp, Homo sapiens
aaccgattcttagtaatgaatgaactgggcaccaagacagtagaggtggtgggaagggggacaggaagcagggaatgagacatactgagacaccaggcggggcagccaatggagtgctggcatcaccccttcccctcgacaggctgcacagctcagggctccaagaaagatgccttccttctgtttgaggagagaaggaagagtgggggggactctcttgcatcytggataccagctcagccacagcaagacagggcaccgctcagagtcatgaggtcccctgttcagggccctaactcccagacatttctacacacaccctgggccagaagacaggagctgacagcattcatcacctaactgaggagcccttgggccctgaataaccagtagcgatatccaagtactacattgagggcctcagttgagcctctgagacttgctggcttcagtgagattcagcacattaccagctgtggtggctatggggcaaaactcctacttgagaaaagctgagggaaagagtaaagagaactttgtcttacagcttaggtaccagcacaaacacagcagggtagagcaccagttgattcttgggtgtccctaattctaagacctgactcttaaatggca

SEQ ID NO: 749570 - DNA, 634 bp, Homo sapiens
aaattttaaatgctaaaagatttaatgaatcttgcatagagacatattattacacaaacattaaactttttttctcagaagtataaattcattttacatattagggcaagaactgcaagtttaaaaaattccaatccaagatctttaaggtaaaacacactataaatatctgggtaaaaaagcaagtgaagagcatttaaagatgtttcttaaatgaaactatttcttcataagtcattaccattttctcctaaattctcaatatgatttgcattcaaattgagaatcatgaccttatgaaccacgtcactaatggaagcacaccacatacctcaaaagtataaggagcagaaaggggaaaggaaattactttaaaacttcaagtagatctgagtctgcctatcctctgaaaggaacaggtacaggacagatactgacatagaaatcctggaagtaggaaaggaggttggctgcatgagccttaaargaggcaaaacaaattctaatgaagaactaaacttattttaatcttagaagccaatactgcttcatgaaaaaatttttcacaaatttaggaagtaaattttattcacttcctgaattttcttcaataaacatgttttcatttataaaa

SEQ ID NO: 749571 - DNA, 657 bp, Homo sapiens
tatgttaaaggtttacatctcctcaaaatgaactttatgactgatacaaatatattattatgtaaaatcaatgaactctagaaaaccactataaaaaactaagtcatgttgccatgaatttctaaggctcaacttacaaggtgatggagctgttcttctaagctcttcttcctctgaaggaaaaggaaaaaacaggagaaaaacattctaagtgactcagcttctttgagacagcgtatcagttgttcatattacataatcaacaagatrtaagtggagaaacctgcaataaggttaagtccccaccacctacagtagttgttgggggtgcctgcacagaaaagcctaagagaggggtagtatatgttgtcaggagacaaaaactgagttcaactaatgtttcagaaagcccttgaaagctatgtatgttaaaaaaaatacccactggccagatgcagtgggtcacgcctgtaaccccagcattttaggaggccaaggcggatggatgacaagatcaggagatcgagaccatcctggctaacacggtgaaaccccgtctctactaaaaatacaaaaaaattagctgggcgtggtggcgggcacctgtagtcccagctactcgggaggctgaggcaggagaatgacgtgaacccggga

SEQ ID NO: 749572 - DNA, 615 bp, Homo sapiens
gaaatcccagaatgcaaagaaaaatggaaagacagaatacttaaataactaactaaataaataaccaatttcatgaaagacatgaatctacaaatccaagatgttcaacaaactccaaggaagatacactcaaaaagacccctatcgatacacaatgcaatcagaatgtaggaagccaaagacgaaaatctcaaaaaccacaagtaacttgtcacatataagagatcctcgataagattatcagcgaatttctcatccaaaacgttagaggccagaaggcaatgagctgatatattcaaggggctaaaagaaaaatcttgcaataagaattctaaattcagcaaaactgtccttcaaaaattagggttgaaattaagacattcgcagaaaaaagctgaaggagtttgtgacacttacacctgccccataaaaattgctaaaaracagtttcccagtgtgcttctagccactaaatgggagaaggggacacaagatggtagcaaccacaaactctagttccagcctcccgctgctcaatgacctggttagcactggggcagccagggctgaaatgacctggcctcagctagcctgagccgaaaagagtagcttttt

SEQ ID NO: 749573 - DNA, 614 bp, Homo sapiens
cacacaacataccaagttgcaatttgtgacagtagtaataaaaatggagagatggagtcattaggagcagagtttttacatggcattgaagttaagctggtataaattgaaattagattgttatacctttaggaagttaaatgtaatctccatgttaaatacagaagaaaattraaaggaaatcgaactgtttcactacaaaaacaacaacaacaacaacaacaacaaacaaacacaaaccaccaaaacaactaaacatacaaaaaaggcagtaatggaagaaatgaggcagaaaaacactacaagacatagagaaaagaaaaggcaaaataacacaagtttgtccctctttatgagtaattattttaaatgtaaatggtttaactctccaatcaaaagaaaaagacagaattggtatttttttaaaacttgatccaattgtctataagaggtttgctttatatccaaagacacaaaaaggtttaatgtgaaaggacagaaaaagatattccacgcaaatagcaagcaaaagctagctgggttggctatactaacatcaaataagatacaatttaaattttaaaaaggttaccagaaaaaaacaaatggaatta

SEQ ID NO: 749574 - DNA, 614 bp, Homo sapiens
tagttttttgtatttttggtacagacagggtttcagcatgttgctcaggctagtctcgaacttctgagctcaagctatcagaagttagctccttggcctccccaaagtgctgggattaataggcgtgtgccaccacacccagcctcaatggcattccttacaaaaatagaaaaaacagccctaaaattcatacagaaccacaaaaggccccaaatagcaaaaaacaatcttgagtaagaataragttggaagtatcacactttttaattccaaaatacattacatgactacagtaatcaaaacaatatgagccaggtgcagtggctcacacatgtaatctcaacaatctgggaggctgaggaaggaggactgcttgaggccaggagtttgagatctgcctgggcaatacagcaagacccagtctctacaaaacaatttaaaaaaattaaaagttagctgggcatggtggcatgctcttgtagtcctagctattttgaaaggctgaggcaggaagatcacctcagtgcaggaagtcgaggctgcaatgagctgtgactgaaccactgcactccaacctggacaacagagcaagaccctgtccattaaaaatacat

SEQ ID NO: 749575 - DNA, 592 bp, Homo sapiens
tttgtgatattgatcagaatatccaggggtgtagagaatgatatgactcccaatatcgcatgaggtgtacaccactttgtgatattgttcagaatattcagaaggggagagaatgatattatccaaatatcccaggggatatagaaccccctgtgatattgttcggaatatccagtggagagagaatgatagtactcccaatatcgcagaaggtgtacaccttcctgtgatattgwtcggaatatccaggcggagagagaatattactcccaacatcccggaggggaaaggatgatattactcccaatatctcaggaagtgtgcgcccacctgtggtattgtttgtaatatcattggggaaaagatgatgttacttccaatatcgcagggggtgtacacccctgtgatactgtttgtaatatccaggaaaggagagttcgatattactcctaatatcctagaatgtgtacacttccttgtgatattgttcataatatccagggggaagaggattatattactcccaatatcacaggtgtacacccccctgtgatatttttcataatatccagggggagagaggatgacatta

SEQ ID NO: 749576 - DNA, 592 bp, Homo sapiens
tttgtgatattgatcagaatatccaggggtgtagagaatgatatgactcccaatatcgcatgaggtgtacaccactttgtgatattgttcagaatattcagaaggggagagaatgatattatccaaatatcccaggggatatagaaccccctgtgatattgttcggaatatccagtggagagagaatgatagtactcccaatatcgcagaaggtgtacaccttcctgtgatattgttcggaatatccaggcggagagagaatattactcccaacatcccggaggggaraggatgatattactcccaatatctcaggaagtgtgcgcccacctgtggtattgtttgtaatatcattggggaaaagatgatgttacttccaatatcgcagggggtgtacacccctgtgatactgtttgtaatatccaggaaaggagagttcgatattactcctaatatcctagaatgtgtacacttccttgtgatattgttcataatatccagggggaagaggattatattactcccaatatcacaggtgtacacccccctgtgatatttttcataatatccagggggagagaggatgacatta

SEQ ID NO: 749577 - DNA, 615 bp, Homo sapiens
tgtaagccaagccctcataataaacaaatatgtaaatacctcttattggctctgtttctctggaaaactctaattaatacacaaggccatccacaatgttagtttgctggtctgcttattgcatatatacctgttttatagatgggcccatgatactatcttatcttgaaggcattatgctttaggaacatctaactcttttttaatcttttaatggctttattaattttctgacattaatttggtttcatgggaattttttgtcactggtagaagaatatttagatcactaaatatgtattttccagaaactttctatctagagatttcatttttaaccaagtaatttgcaagattaatacatccgtttctttaggatacatwtgtctctcaaagcctgattattccagatagatgacaatagaaaggtcttcagtacaaaggctgaaaaaaagagttagattccaggtatgctcacagggaggacctatttcccatgttctctctgaaacatagaatttcaatcaatcaatcttcctctttcctccttcttccctacccctcatcttttcacttcttctcacctcatggcaatggtactacatttcagaatgt

SEQ ID NO: 749578 - DNA, 615 bp, Homo sapiens
tgtaagccaagccctcataataaacaaatatgtaaatacctcttattggctctgtttctctggaaaactctaattaatacacaaggccatccacaatgttagtttgctggtctgcttattgcatatatacctgttttatagatgggcccatgatactatcttatcttgaaggcattatgctttaggaacatctaactcttttttaatcttttaatggctttattaattttctgacattaatttggtttcatgggaattttttgtcactggtagaagaatatttagatcactaaatatgtattttccagaaactttctatctagagatttcatttttaaccaagtaatttgcaagattaatacatccgtttctttaggatacatatgtctctcaaagcctgattattccagatagatgacaatagaaaggtcttcagtacaaaggctgaaaaaaagagttagattccaggtatgctcacakggaggacctatttcccatgttctctctgaaacatagaatttcaatcaatcaatcttcctctttcctccttcttccctacccctcatcttttcacttcttctcacctcatggcaatggtactacatttcagaatgt

SEQ ID NO: 749579 - DNA, 575 bp, Homo sapiens
cggatcacgaggtcaggagttcaagaccagcctggccaatatggtgaaaccctgtctctactaaaaaacaaaaatacaaaaattagctggccgtggtggcgtgcgcctgtagtcccagctactcaggaggctgaggcaggagagtcgcttgaacctgggaggtggaggttgcagtgagccgagactgcaccactgcactccagcctgggcaacagagtgagactctgtctcaaaaaaaaaaaaaatttcatgtaatgtgcccaggatgtgggaggtattatactaacatactttgaatagtgagycgtgcagtgagcatgatgaagaaacaggaaaaaaatctgccacaacagatcaaaacatcacaggaagcttcttgaagagattcaataaataatctactggtgcaggttttttacagatttgctttgtggcttgttttggaagcagatgcttgtaaaattgtatttataatctctttgtatatctatattttgttatatattgcaatatttactgaaattctgttgattttcaaatttctgtgagaatgtaattcctaccaactccagttt

SEQ ID NO: 749580 - DNA, 539 bp, Homo sapiens
cttacaaagcttttgcccagaacctttctgagttaaaatggaatccactttctgtggcttctcccaaattcttcattggaataattttaaatctataagaggttcatctgaatgtcacatgccacaatacatggaagtgctaaaacttatgtgcctaaaaagaaaaagagaaaaatacatttttctgttagtaatttctaatttaattgtattgtggtcagaaytgtatgaactgtgtctttggttttatggcccaaaatatggtctatcttagttaatgttctgtttgacttaataaaaatatttattctgctattgttgggtggagtgttctgtaaatatcagttaggtcaagttggctgatgctgttcaagttttatatctatattgttttttagggcttgtataacaaagcaccacaaacagtatcttaaactgatactagggttttggcagggccatttcctttgaagatactagggaaggatctgtttcaggcttctctcctagcttttggtaattccttctcttttggtgtc

SEQ ID NO: 749581 - DNA, 614 bp, Homo sapiens
gcgtggtgcagcatggcatgacgtggtgcaggggtgtggcatggcgtgccacagcgtgcctccttctcttgggaatgtaaataataaatacttctttcaatggcattgccttctctaggacattccctcacaaattaaaatccccccagtacaaatgaggcatatacctacccagcaactctgttactagagaaataagtgcatttgcctgccaaaagcacaaactatgatgttcagaccaactttattcatagcagccccaaacctaaaacaacccaaatgtccattaataactaaatggaggctgggcatggtggcttatgcctgtaatcccagcactttgggaggccgaggcgggcggatcacttgaggtcaggagttcgagacctgcctggccaacatggtgaaaccctgtctctactaaaaatacaaaaattagctgggcatggtggcgagcacctgtaatcscagctgcttgggaggctgaggcaggagaatcgcttgaacccaggaggcggaggttgcagtgtgccaagatggtgccactgcactccagcctggatgacaaagtgagatactgtctcaaaaaaaaaaaaaaaaactgaatggataca

SEQ ID NO: 749582 - DNA, 635 bp, Homo sapiens
gaaagcatgtgttacttgaccgggggcacttagtagatgggctcagagatgctagatgtcctgcattggacaagacacttttgcaaatcctccacagttttgtaatgttccattgacattaataagttaagatgaaaaacctattcacaattatctatatatatctatagctttttctcaagctaactaacttttctctggtatgattcttaccctttatttggctaataatcattcacaacgtgatttgtaccttaacatttggtacagctttgaggggcatagaaagaagtttcygtcaatagaaatccagcttatgttttagacaagatgctgcttaggaattctgaaagactaggcagctgggccatcattcaggcagctgatatggtgcatttcttccaagaacatggagttctaggctgatccgctgttttcccgttagacaggtctcaagagggatgacccagctcagtggttctctgtagggacagtccttatcccaggcagcattttgaaaattgctggaaacacttcttgtcacatgattggaggcacttagtaggtgggctcagagacactaggctgccgcagtggacaagagatttctgcaaatttctcatgactttgtaatg

SEQ ID NO: 749583 - DNA, 635 bp, Homo sapiens
gaaagcatgtgttacttgaccgggggcacttagtagatgggctcagagatgctagatgtcctgcattggacaagacacttttgcaaatcctccacagttttgtaatgttccattgacattaataagttaagatgaaaaacctattcacaattatctatatatatctatagctttttctcaagctaactaacttttctctggtatgattcttaccctttatttggctaataatcattcacaacgtgatttgtaccttaacatttggtacagctttgaggggcatagaaagaagtttctgtcaatagaaatccagcttatgttttagacaagatgctgcttaggaattctgaaagactaggcagctgggccatcattcaggcagctgatatggtgcatttcttccaagaacrtggagttctaggctgatccgctgttttcccgttagacaggtctcaagagggatgacccagctcagtggttctctgtagggacagtccttatcccaggcagcattttgaaaattgctggaaacacttcttgtcacatgattggaggcacttagtaggtgggctcagagacactaggctgccgcagtggacaagagatttctgcaaatttctcatgactttgtaatg

SEQ ID NO: 749584 - DNA, 569 bp, Homo sapiens
tagttggcatctttcctgttaggaacaattaaattcaaattccactatttggattatatattggaaatacactagttacagtgaaatttatattgaatctgttgcatgcttaacctatgcctaaattgaatggacactttaatgaaacagactcaatattaaccaagtctgtgatgtacagagaatcactgttattatactacatcaaatgctatactaaagccctctgaaactaaractagagtctagctgtgtcatccaaactggagtgcagtggcccaatctcggctcactgcaacctctgcctcacggggttcaagtgattctcctgcctcagcctcccaagtagctgagactacaggcacctgccaccacgtctgtctaatttttgtatatttttagtagagacggggtttcactatgttgaccaggctggtctcaaactcctgacctcaagtaagatgcccgcctcggcctcccaaagtgctgggattacaggcgtgagccatcgcacccagcccttcttttttcttaattacttttttctacatgttatacttattaaggca

SEQ ID NO: 749585 - DNA, 617 bp, Homo sapiens
cttgcttaactcaaaatggcagaattttcttcagctgttttaaaagcacccagccttgacctgagatggagaggtagacattccaattccaagagggtggttgcttgctaaaagtggcagagcctcagcaattgtgaaattgctttttcacctgtacttggtgtcaytacaaatgattccatgtgtggagactcagattcactcagaaccattctacctcctttacaaagcactccaaatatgggaaaaggaagaaaaaaagggagaaaactactcatggctcttgctgagaaacgtgatggccaactgttgtaggaaaagtataaattttggagtcagacaggtttggatgagaaacacaatggaccacattcacacttccatggctttagtaattcacttaaatttgccaagcctctgtttcctcatctgtaaaatggtgatacaggttgagcatgctcattggagcatttcaaatttcagatttttggattagagatgctcaaccggtaagtataatgcaagtattccaaaatatggaaaaatctgagctctgaaacatttctggtcccaagtatttcataagacatactcagcctgtaataatacctactctt

SEQ ID NO: 749586 - DNA, 545 bp, Homo sapiens
taaataatgaataaacattagtagttattcataggttatataatagaaattactattgaatattattgttcctagagggtagaattattgtcttcaaaattctatatctagtaacccagtagcctagatgcttttcttttgtttgagctgtagaaacctgagattgattgctgcctttcctttcagggctttcagcagtgattgattgaacttcacaagagtctaattaattcaccatgttcccctaaacttctcataagcttaagaagctggtctccctcctggtgttgcaggagtgggaaaataacattagaaagaatggctaaagttggaagaatatgtgacctggtgccatgtgatgtcagcccackcttttccagcatgacgctcggatttttgatagtagaaattttcctgcattaagaaaattcatgacatagtgctttgacttttctagcttgcagcaaattttccttggttgaatataatcttgaaggtgtgcaataaaaagaaaaaacagtcatgatgttagaggtcagtcctgt

SEQ ID NO: 749587 - DNA, 597 bp, Homo sapiens
ttgtccaaattgctttatttcatatctgattatcttactctcctcccactgctgtgtctcttgttctgcaagagacatactctaagatgatttcatttttctcttctcactagtcttttgagatacttttaaccaatacatattagcaaggatacagaaaacagtatacaatggaagaaataatgtcataaaacactattagaatctgttcagagcttttttttttcataggactcaaagccgagttctgttattttctcccagccaacgtcctggaagccattttgcaacactatagcaggaayggtaatcagaggcctaatgtgatcttacagattaaaaaaaagactaatgggtaactgggacccatgaagaagtacagcaactcacaatcttctctcagatcttctccatagaaacaagagttcagggtggtcctactccatttgttcatttattcattaagcatcacatggccatctatcatgtatgtagcagattctctgccaaagaaacagagataagtaagacttggaagaacaaaactgaacagagaggttggagaagaatggcctccagtaataaatttataaatga

SEQ ID NO: 749588 - DNA, 500 bp, Homo sapiens
aggattgatttgttctagaaccccttaataataaatatcagaacagcaattcaaactaatctcaagctggttccaatgtctatgttcttcgctgccttccaaattcaagaccctgttttcttcaatgcaattctcccacttactgagcattttctatacctctaccctcatgcctgtaatcagaaatgagttgaatatcgttgcgcaacaaaatgcatcctattccagccaagtagctcagtctcccaagattcctcataascaaattaaccagtatttggaatggaagtcagacaacaaaccccagtgcactggattaaaaattacaacctcgctgggctggtgtggctggaaaaataatatgagacacacagataataaacagcagattttggacagaaaagcatggcattaaataattgaagccagtgaaagtggaatgtggggccaagtccacacagctatttatgaaactgagaaatggaatattgatgttttgt

SEQ ID NO: 749589 - DNA, 537 bp, Homo sapiens
tagcaaatttcaaatatacaatgtattattatcaatgacagtacccatgctaagcattagatttctagaatttattcatcttataattgaatgtttataccctttgatcagcatctccccatgtccccttttcccccagaccctggtaaccactcttccactctctgctcctttgatgttagcttttyaaaattctgcatataagtgagattatgcagtatttttctttctgtgtctgaattattttatctatttttgtgaaaaaatgccattgtaattctgatagagattgccttaaacctgtagcttgctctctgtagtgtggacattttgattatattaattattcgaaaccacgaatatgggatatcactccatttatttttgtcttgttcaatttctctcatcagtgttttacagtattcagtatacagatcttttacctccttaaatttattcctaagtattttgtttttgatagtattgtaagtggggttgtttttaatttttttcaatagtgaattgttagtataaaga

SEQ ID NO: 749590 - DNA, 636 bp, Homo sapiens
atcctttattttagtcatctcattatttggcttccacagaatccagtggatctcaatgaaggcttaaatggcttccaaataatgagatgtccaaaagaaggagatgtattggagggtcatcagaggttcatgaaaattctgcaagtttgcagaactgatctgtggcttgaggaggctctaaggcaggagtgtccaatcttttggcttccctgggcaacattggaagaagaagaattgtcctgggctacacataaaaaaaactaacactaatgatagatgatgagctaaaaaaaaaaaaaatcagaaatttttatgttttaagaaagtttatgaatttgtgttgggccacattcaaagctgtcctgggccacatgtgcctgcaggccgtgggttggacaagcttgctctaaggcaattccagagagccaggactcagggtgcctyattgtaaggcagggacagtctgtcacagaacctttcctggactgagtcaccatcaatcattccttctgctttttttgtcacttactcaagctttaaactggacaggaagtccaaatgcctgagtttaagtaacataactgttcagcctagtccaactttctaattgattcttttggttataaggactctatt

SEQ ID NO: 749591 - DNA, 502 bp, Homo sapiens
atgaaaatgtttggatttctggctctagtctgttttcataaattctggttacaagtcattccccaagtcattcctttattcttataaaaaattcccattcttgccataagctagcctgagttgatttttgttacttgtcatcactgacacttaagtgatacataaactgaacaatctttaccagagttgtcatgtacagttgtacactgcataacactggggagtgccagtcatatcactgattgcattatataaccacatgcagtcctgacttgtatggtcattgagtttttgagcaatatatttcctgagtgcttaattcatcaaatattgattgagtacctaytctacttaataaattctattctagagattgtactagttataggatgcaaagattaaaaataaaaacaggccctactctccacatggtcacagtctaggaaagcagaccaacaaaaaaacaatcacaacataatgtgatatagacgacaaagaagca

SEQ ID NO: 749592 - DNA, 552 bp, Homo sapiens
gttctctctctctatatgtgtgtgtgtgttcactcttctagcttcagaagagtgaagctagaaaaggttctgctcccctttctagtccctatttctgctctgagcaggttgattgatagagggagagaattgaccatggtgaggtgccttctaattagcagcaatgactgtggctgccaakgccagctctgctaatgccccaaggctgctgctctgcagtgtgggcagggcctcttagggctgtgactttgggggcagcagggagtgggggagttggggaagggatggggaagcggcacctgcccctgctgaacttgatcctgttgtctttatgagaacaagacttccaactgatccaggtgagaattttgccagcttgcagacaatgacaaccaggcctccaatcagagccaacctgggccattttcaatgtcactgccaacttgacctactattatgaaaattgctccaattacgtgcatacacattgcatgtgaaatgacaactaagtgcttgcctaagaggcaatttttgtaaatgaagcctggggtt

SEQ ID NO: 749593 - DNA, 637 bp, Homo sapiens
ataaagaacagaggcatgtttattcatgctttttattgcatttaaaatgcaaggtatattttcatagctccccagagaaatgctcttccattgactgaaaattgttgatgtgttggtttataaacttgaaaagtaagggaaccactcagaaaattgcagatataatttaaacagtcattaaactggacactcasagggaactggcttaaaaaaaaagaattcggtatataaaatttcccttctctcctagtgaatttgttccacagagtctttggtcttgcagttgtttatgttcttatctgtcttctgtaatatttatagctttctgaagatatgatttcatcaaacttgctattcacttcttcccagtttctcattaagaaagcttagctggtaacccacctgtgtagtctctatttttatagtcctttgtaggtttccaagaagatgtttttaacatgtgtgtgtaggaaagcaggggcatgggagatgcctagaacactgtccacggggctgctattgcacaactctcctcctcctacacacacacacacacacacagagaaaagtgtgcgtgggcatgaggacatgtatagatatccatatgtatttttagaaagttaggaaaagaagtaca

SEQ ID NO: 749594 - DNA, 593 bp, Homo sapiens
tcttgctttctcagacacctcccttctgctcaactgtttctgatctctctggagttggagccttgggagggagaagaggttaaaagaacaggtaagttttctcttgataggtattgcagtaaatcaacttcaagagctctgggcctggcaggtatctaaagttgtcttgcctctcatgacactctcatggcttgtcagaggccctgctggaaaactaacagcatttcccacgaccctgactcggtattgccttcctgttggtcacccccctttcaatgcctcggttttctgacagtctactccacatgggttctctctgttggatttccactgcgatccttctggatttaggtcagttctctctcccaccggtgcctatatggtccataaaaagcactcctgcytcttttgttctgacaaatcccaggagtataggccagtgtcaattcagcagcagctttccttaacttctcaactgaagcagctggtctgccaagccctcctgccttcgaggtttcatgggcaggagtccagcaccagccttctgggtcctcctaactgcagggaataatgtcaagctgcctaagtggtgt

SEQ ID NO: 749595 - DNA, 545 bp, Homo sapiens
aaggaaaatcatctggttgcactgactgactcatttcaggatatactaacatctctaaaaagccaatgagagacttggggaagaaagacatctctataagcctgccagtaccctctaatccagaagcacatagcaagacatcctttaagccagcccacctatccacccattcctctcactcacccttcatctgttcctctggcagagtgttgggaatgccctctttggccaaaagtatcttcacagttacctgggaaaaacaggtgattgataggggtacagaaatgtgagagatgaaagcaaaggaaaattatctgccctcagttttgctggtacaatgcaaaaccttctttcagagaagaccagcaggcttggcatgagagggagacatccaagcccttarcaacaggtgcagatatacaggcagcggaaggaggggatgggcacgttcaagatggcttcaagattattaaaaaaatatcgtgtcccctgtcttgctggccctctccagcccacacgtaggcatctcctttctcagtgaaaga

SEQ ID NO: 749596 - DNA, 643 bp, Homo sapiens
agcaataaatgctgaaaaattattaaattttaaattaataaggccataggaaaggtatctgcccagtggggatttccagcacagtctcagacaaggcctgcctcactgttccagcaagttttcagcagactcagtgaccttttcctaagaccctctgcaatccatggggtgcttggtagaaatttgtacctccatgcttgtcaaactacagccattcagtgaatataatggatggtacaataaaataaattatttaaatagtagtaatagaacaaaaagcactgtatgtttttggggatacaatatcattgctggaataagcaattccttgagcagtaactaatgctaatgggaagrcactatggctgcatgtcattctcggagttactctgattctgaggttcaaagctactattgtacaatctgggacttttactggtctgcaagtcttagtcttcagggtacctacactcagaaatcaagtaacctccttttgtctctgttagaactttctcatgcaagcttagtatgtttcatttcatgagtaattgactcgagaatatgattgtgacttgctatagtccttcttgtcacctgggcagaagcctgcaaagggataatatcctaatggattcacccttat

SEQ ID NO: 749597 - DNA, 526 bp, Homo sapiens
tctgaggctttgttcatcttttttcattcttttatccttctgtgcctcatactggatcatgtatgttgacctatcttcaaatttgttggttattttgcctgctcaaatctgtggtagaatccctctcatgaattttttaagttattgtacttttaaactcaagaatttctatttggttcttgttataatttcttgttttaaattgatattctctatttggtaagacatcattttactttcctttagttctttagtcattacttcctttggttctttgaacatatttaaaagtttctgattgtcttgtcaactccttcatttaacagttggaatctcagaaacccayaaaagttggacaactctcccatagccacactgatagtcagtggaaactcagtaaaacccagggactcaaaatttctgcattatctgtgagacccatcaaacgtcccttcttcttcaactgcatttctcagtaaataatgtaatgcagcaactctggaaatcagatcctcctttctcccca

SEQ ID NO: 749598 - DNA, 593 bp, Homo sapiens
tcattaactgcatgggacaatctaaagcactattcataatttcatacttcataatgttgaaaccaaagggaagatctaaaatttctctcaaacaatttttagttacaaaacacacagtaagtatcttgcttaatagacaactatctacctaaacaaaatggccaaaactaagaatgctaggcagcaccaatggacaccgcctagcccrtgactgcaggaggtgaatttaatacagtgattcacagtcacattccccaatgaatagccacatggatatctgtcacctatttgatgattactactctatgttacacatcttataatttcaacctatatgtggacatttacatacagtattaaacatttatgctatccaaatctactatctgaattggagcttaaagagaggcattacggtttcatatagcatctaaatctaagtaaaaagatgtcatattgtaaagatgagagatcacaacctttggtttcatgaaaaataaaagataagagctatacgcatggagataattagtgatatttagagcaattcttttcaagaatgtttaaatatgcaaactgtgcagtgaaagcaa

SEQ ID NO: 749599 - DNA, 632 bp, Homo sapiens
caatgtggaatcatattatacataattgcctgcatcttacctgtaacagttctcatttctacttgcaatgcacaggaatactcttttgcctaaggtataatggctcttcatatttttttgtcaaaccaatgcacactttctcattgttactttaatttgcatttctctgacttgtttgtaattttgagctactttttatatgtctgtcagcatttggattttactcttctgggagttgcctgttcatatctttggcacctttgttattgggcctgttccttgttagttgtaaggagactttgtgcattatgggtattgtcctttttgtgagagctaatgaataagcagggcacatgcgaaccgcaataaaatgatgactacattgtggaattyttactcttcattaggaattcctcacgaatcccgtgacaccagtatcttggcatactgaccacatgatgtggccatggtcatttttacactaaattctcagtagagcttaaataaaaactatacaaaaataaatattatggcattttcccttctctactcaatagatcctcttgtataatagcacctaggaaaatgtacacactttaatttcaagaggaatgcctattcctcagttcaca

SEQ ID NO: 749600 - DNA, 632 bp, Homo sapiens
caatgtggaatcatattatacataattgcctgcatcttacctgtaacagttctcatttctacttgcaatgcacaggaatactcttttgcctaaggtataatggctcttcatatttttttgtcaaaccaatgcacactttctcattgttactttaatttgcatttctctgacttgtttgtaattttgagctactttttatatgtctgtcagcatttggattttactcttctgggagttgcctgttcatatctttggcacctttgttattgggcctgttccttgttagttgtaaggagactttgtgcattatgggtattgtcctttttgtgagagctaatgaataagcagggcacatgcgaaccgcaataaaatgatgactacattgtggaattcttactyttcattaggaattcctcacgaatcccgtgacaccagtatcttggcatactgaccacatgatgtggccatggtcatttttacactaaattctcagtagagcttaaataaaaactatacaaaaataaatattatggcattttcccttctctactcaatagatcctcttgtataatagcacctaggaaaatgtacacactttaatttcaagaggaatgcctattcctcagttcaca

SEQ ID NO: 749601 - DNA, 632 bp, Homo sapiens
caatgtggaatcatattatacataattgcctgcatcttacctgtaacagttctcatttctacttgcaatgcacaggaatactcttttgcctaaggtataatggctcttcatatttttttgtcaaaccaatgcacactttctcattgttactttaatttgcatttctctgacttgtttgtaattttgagctactttttatatgtctgtcagcatttggattttactcttctgggagttgcctgttcatatctttggcacctttgttattgggcctgttccttgttagttgtaaggagactttgtgcattatgggtattgtcctttttgtgagagctaatgaataagcagggcacatgcgaaccgcaataaaatgatgactacattgtggaattcttactcttcattaggaattcctcacgaatcccgtgacaccagtatcttggcatactgaccacatgatgtggccatggtcatttttacactaaattytcagtagagcttaaataaaaactatacaaaaataaatattatggcattttcccttctctactcaatagatcctcttgtataatagcacctaggaaaatgtacacactttaatttcaagaggaatgcctattcctcagttcaca

SEQ ID NO: 749602 - DNA, 578 bp, Homo sapiens
tcacaaggcttaactctaatctaggatcctgaaaaaatgtataagaagccttaaagcagactatgtacttttagggacacaaaattgcatactggcttgtgtggtattttaaagaaaggcaaggctgactttaggtaagagttctaggagatgctataggttctcctttttggacagtagcactaacccaaaggccaataccagtgatgtagtttactttggcaaatgtgctttatggaagaatttatggtatagtggaaggagcactggagtaaaactctggagacttctatatctctgccactatcattatgaccttggaaaaatcccttaattttctgggccttagttacctcatctcttaagttgaactaggtgaccaattaggacctgacagttctttttagytctttttttctttcttttttttttttttttttttttttgagacagggtcaagctgtgtcacccagcctggagtatagcaacaacatcatctctcactgcagcctcaaactcttgagctaaagtgatcctcctgccttggcctcctgagtagctgagactacaggcatgtg

SEQ ID NO: 749603 - DNA, 591 bp, Homo sapiens
cctttccaaaaggttgtggctccacgcgggacacgtagttcggctagaaaagcatggacctagattttggcctcctcttgcctcctcagccaattatacaagacataattgagcaaccattacatggcagtcctaggatgcattcatagtacctagaacagtgccaacgtgtagcagacatgaataaatatttgtagaatgatggaatagtttagagtgaagaagagtgattatgagatgagaaagtaagcagaaaccaggtcaagtaagacttctaaggagtttgatcttttttttttttttcctaaatagcagtcaactgacaagtcccatggatactttccattaaatcataatctgtattttcaaaaagcagtgcaagtaattytgcagtagagttagtggtccaactttctttttttttttttttttttttttttttttgagacggagtcttgctctgtcgcccaggctggagtgcagtggcgcaatcttggctcactgcaagctccgcctgccgggttcataccattctcctgcctcagcctcccgagtagctgggactacagacacccgccaccatgtctggct

SEQ ID NO: 749604 - DNA, 607 bp, Homo sapiens
ttattctgtttaggaacttgctgtatgaattagtagagaccatcacatttttcatcaattcctgctctcaccacaccccgctcttgcccctgctaaaaaactaccagccttctctcatgttatgatttaggggcccctgttcactgaggggctaacagctggaattgtggcactacattagccttttttgagcttttatttctctttcatgctggattttttttttttttttttggcaccacaccccatttgagaatttactttctctctgaraagtttttgtcagtagttttttgttttattgccttttctgtgataggttaaggatacagcttggtaaagaaggaacctgcaggggtttattgatggagttcctgtcccaccatgccctaggcctagtacatacatgcttctgatgaatcactgctgttagtatttagtatctcctgatcctcatagtccatattatgcaaagcatagaatctgcccaagggacttaatagctgaatcactcacttgatctgttgtctttcactctttcttccctttgttggtggctacaggcaagtatatgagagatataaaactgtaagcaagacaaaatctg

SEQ ID NO: 749605 - DNA, 607 bp, Homo sapiens
ttattctgtttaggaacttgctgtatgaattagtagagaccatcacatttttcatcaattcctgctctcaccacaccccgctcttgcccctgctaaaaaactaccagccttctctcatgttatgatttaggggcccctgttcactgaggggctaacagctggaattgtggcactacattagccttttttgagcttttatttctctttcatgctggattttttttttttttttttggcaccacaccccatttgagaatttactttctctctgagaagtttttgtcagtagttttttgttttattgccttttctgtgataggttaaggatacagcttggtaaagaargaacctgcaggggtttattgatggagttcctgtcccaccatgccctaggcctagtacatacatgcttctgatgaatcactgctgttagtatttagtatctcctgatcctcatagtccatattatgcaaagcatagaatctgcccaagggacttaatagctgaatcactcacttgatctgttgtctttcactctttcttccctttgttggtggctacaggcaagtatatgagagatataaaactgtaagcaagacaaaatctg

SEQ ID NO: 749606 - DNA, 618 bp, Homo sapiens
ataagactaaggaaagtggttttctttcaagtactataattaattcctggggtgaaagggaaaaacaagacaaggggaaaaaaagaggaagcaaaagaaccataggtttagtcatatgctacaaaggaaaaaaaaagaatatttaaccttccatcaataaaaacttgaagccaaggataaaaagaacaggaaattcacaaaaactgttaagagccaggcagccactccctcgataccaaaccaagtaatttaatattcggcatttctttaatgcccataaattccagaaactgactcccaggtccagctagttttatatggtggtaataacttttaaaattgtgtgttattttttaaattccatgtgtccatccccaattcyctgacacagccacaaagaaaacatggtaactaaactagagtcgacttggcctacccagctacatgaaattccatgagtttagtctgtttcccatcctcctctttaccccacctcttggcctaaaccgccaagatcacagtatttcaagagtcaaaattcaaataagaacaaacatgtttgcatgaggctgccaaacactcctagatgaaatcctcttcccttccaaagaattttac

SEQ ID NO: 749607 - DNA, 595 bp, Homo sapiens
atatcctgcagagtgttttccaacttggttccattctctccgtcactttcaggtacaccaattagatgtagatttggtcttttcacatagttccatatttcttggagactttgtttctttttattcttttttctctaaacttctcttcatgtttcatttcattcattttgtcttccatcactgataccctttcttccagttgatcgcttcggttactgaggcttgtgcgtttgtcatgtagttcttgtgccatgrttttcagctccatcaggtcctttaaggacttgtctgcattggttattctagttatccatttgtctaattttttttccaagtttttaacttctttgcgattggtttaaacttcctcctttagctcggagtagtttgatcttctgaagccttcctctctcaactcgtcaaagtcattctctgtccagctttgttccattgctggtgaggagctgcattcctttggaggaggagaggcgctctgatttttagagtttccagtttttctgctctgtttttttcccatcttagtggttttatctacctttggtctttgatgatggtgacgtacagatgggttttt

SEQ ID NO: 749608 - DNA, 609 bp, Homo sapiens
agtgttctatttctctacatcctctccagtatctgttgtttcctgactaataaaaatgattttttatacaagaatcaaaaatatctcaaacaaaatgaaaagacacaaacaacagattacaataccaagacgacagggatgttaaaattatctagcaaagatttaaaaggagtcatcaaaagaatcctttaatgartacaaacactcaggttaaaaaaaaaaaggaaaaagaaaaccccattaaaaaattagaaactatcaataaagaaatagaagccagcactttgggaggccgagatgggcggatcacgaggtcaggagatcgagaccatcctggctaacatggggaaaccccgtctctactaaaaatacaaaaaattagccaggcatggtggcgggcgcctgtagtcccagctacttgggaggctgaggcaggagaatcgctggaacccgggaggcagagcatgcagttagccgagatcacgccactgcactccagcctgggtgacagagtgagactccatctcaaaaaaaaaaagaaatagaagctataaagatgaacctagtagaagatttagagctgaaacaataaacaaaataaaaaactca

SEQ ID NO: 749609 - DNA, 659 bp, Homo sapiens
acctgtaatcccagcactctgagaggccaaggcaggtggatcacttgaggacaggagtttcagaccaccctggccaacatgttgaaacccggtctctactaaaaaaacaaaaattagctgggcgtggtgatgcacgcctgtaatcccagctactggagargctgaggcaggagaatcacttgaatccaggaggcggaggttgcagcgagctgagattgcgccactgcactccagcctcggaaacagagtgagactcctttgccaaaaaataaaaaataaaataaaataaagaaacaggggattacagctgaaacaatagcaaggcttatactgtacttaaggtggagtttctaggaaaactcaggacaattagggagataaaaaggacattaaaggaaattttagcctctgaaaccacagcaacagcaaagagtaaacacagccttactcctagccaagtaaacataaaccctaacacctaaaatctgtgtttctcaattgcttttacccagggcatcatgtctcactgtcaacaaaaatgtatgctaagaaacaaacaacaacaactgaacacccacagtctggagaaacaaagcaagcatctgaagcagtctcagattttgtgattctcagaccaggaatttaaaataactctaaag

SEQ ID NO: 749610 - DNA, 580 bp, Homo sapiens
ctgtttcgtaaagtacagtaattctgaattacctggagggcttgttaaatcacacatcagtgggtccacctccagactttctaattcaataagtctgaggtggaaaccaagaatttgcattcttaataagtttccagataatgctgatgctgctgatttgggcactacactttgagaactaatgtcatagtatttactgctacactccagaacagtggttttattcttaagcaaatatcaaaaagccctagaaggctttcaaagacacattgctgggtatgtctccagagttcctgatttactaggcttatacaatgacaaccactgctctagaaggttctgaatattagctgcacattagcatcacttggggagcttaaatttttttaaattaatctacaattaaacctatttattgtaatctccatgttttttataggcmccagtttagagcaattaaatcaaaatctgtttgtaaatattctcaggtgattccagtacatagccatgattgagatgcctttcaaaagcaagtctttgagatttacaaaatctcagaaagcaatgagtaaagctgaag

SEQ ID NO: 749611 - DNA, 614 bp, Homo sapiens
agcacagacatagtcattctaggaatcatttcatccaaaagaggaagccacttataaagcaagtttaaacaacaacaataccattacacaccaacccaactggtgcaaatgaaaacatcttacatggcaagcgttggtaagaatgtggaagaacaggcacactcatgtgccactggtgggtgtgtaaattactacacccattttaggatactttggttcaacttgctgatagagaagatgctcatagcttctgacccagcaacgccattgctaggtataacccctgtaggtacccgcaaacacatataccagggtgggtgtacacatgggttcacagcagtcttgttttcyagccctcagacagaaatcatctaaactaagattgacagtacaatgaataatttttattaatcaatttatataatgggatactatatagaaacaaaagccagtgaatgagaactgcatattgaatctggcaatgataacattgaatgaaagaggcacaacatatatttaaacacacacacaaaatcttccaacatgattctacatacaaagttcaaaaactggaaaaattaaattatattgttaaggatacatacataggaggt

SEQ ID NO: 749612 - DNA, 525 bp, Homo sapiens
gaggtttttttttttcttcaactatgaatcaactaactaaaatcaagaacacttgaattctaacagacaacacttttaggactggtttgtgccagattcactagttttacctttcacttgttcattggctttcattacgaaaaatctaggaagtggggcatagccttcttgctacaaagacacagtagagagaatcatatttgaatgtggaaatttcataactaaacagaaccatcctaaaaatctaggtttagcttttagttaagtggttctgtcatagacgaagtttatgtaaccggcagaaccaactgttctttggagctcagtgctgactttccacatcgtaacccaaagggaatgccacaggagatctttatgaagycggcaaacagtctcacagaacgagactcaggactgacgcagtcagaggagacttggtcatgagctgctgctgtttttgtaaaccaatgccctgggatccttgatcccataataaggaaaaggctagcccattttgacctttat

SEQ ID NO: 749613 - DNA, 601 bp, Homo sapiens
ttcattctcatgcttgttatgctctctcctacttttgacaacactgactgtaatgtttgcttagatgtgatccttgcttggtttccaaatactgtattacaatgacatcctaatgaccttttccccagttaaatcttcccactcattccatcctgaaggccacccagtgagaaccatattcactaaatcattttttcccactaggtccactccacaacagatttcttctaaatccctccactgctaaaagcttagactccccaggttgtttcttttcagcagtgatttccaatctcactggatattgtayacagtcatttttattcagctgtctaacttgccaatgaattccctttctctgcaactctggccagtaagcctgtagaaacccatgcctcaaagaactggtgggccatgaagtgtcttaagacgaattgagtcttccctactcctgggatgttacttaagcagcagtcaccatcccacataatttaaaaacagcacaatgtatgtaattacttcctctcagactggggagactctatggaactaaactttcctctctccaagttcattattaagtctttccattttctgtaat

SEQ ID NO: 749614 - DNA, 614 bp, Homo sapiens
agagcctgcttatatttccttgttatctaatgacactttatttgtttttgcctttctaacaatatagcatgttcctgaaggccaaggatgtctgattttctgatgtgccctaataccttgcttgcttttttttgggggggggggctctgaaatcatgcttagttttttaaaaaaaataatagaattgctttgttcatgtcccttgggttacttggaaagcctgcctcacaagctctgctttctttattcatgtagatttgacccctttacttatttccctttaaaaagaaagaaaaaggaaaagaaaaaatttgggggaccacagtcaggtcttattgatacataactttatatcagatgcaaacgtcaggctagtattatatcagtgcttcacttcaagaatgccttatacactaatgtgagtacagccaaacagaatactccagcttaatctcaamgttaaaagcaagatggggaagttgtgcaagagggcactagctctcagttcagagatcatcttccctgggaagccttccctgattaactgcacattggttacccctgtgtttatagatggtcttcagtctgtattttgttatttgtatgatgatgct

SEQ ID NO: 749615 - DNA, 602 bp, Homo sapiens
taaaaaagaaagtgcttgtgaaaccctttagacttttcaaaatactttcaatgttctaattcttgagcagaagagagaaatagagagaggactatataccaaagatttccatctcatccagcaaggagaaagattttcaaactgaaaagggggkaaaataaatatggttaggaggagacacaggccaaaggcatagttacaatatcatatctgctttaaatagtttcaggttccactttgtgacagattttatcccaggctactgagaaaagtcacaagtttgcaaatggaacttagaattcaaaaatattaggaagtgtgctaaagtctaagcaataggcaaatgttttctagacttttcaaaaagggtgtgggggcaggggaagattctggaaatccaagttcagtaagcttgactgagttcagtgaaatcatttcatgtttataatgaagcaggtattttgtgaacagaaaaaaagataattgtttaagaagccagcacgtgctcattgagaacaaatgatgcaaaaccaaccttactttcttaaaaaaacagaaacaaaactggaccagtcaattggggaaatgctataggtaatgta

SEQ ID NO: 749616 - DNA, 602 bp, Homo sapiens
taaaaaagaaagtgcttgtgaaaccctttagacttttcaaaatactttcaatgttctaattcttgagcagaagagagaaatagagagaggactatataccaaagatttccatctcatccagcaaggagaaagattttcaaactgaaaagggggtaaaataaatatggttaggaggagacacaggccaaargcatagttacaatatcatatctgctttaaatagtttcaggttccactttgtgacagattttatcccaggctactgagaaaagtcacaagtttgcaaatggaacttagaattcaaaaatattaggaagtgtgctaaagtctaagcaataggcaaatgttttctagacttttcaaaaagggtgtgggggcaggggaagattctggaaatccaagttcagtaagcttgactgagttcagtgaaatcatttcatgtttataatgaagcaggtattttgtgaacagaaaaaaagataattgtttaagaagccagcacgtgctcattgagaacaaatgatgcaaaaccaaccttactttcttaaaaaaacagaaacaaaactggaccagtcaattggggaaatgctataggtaatgta

SEQ ID NO: 749617 - DNA, 600 bp, Homo sapiens
aaacatccagtttctcactattaaatatgatattagctgcaggttctttgcagatgttcttaatgaagttgatgtttccctctatttctaatttgctgagagttttatcataaatgggtgttggattttgtcaactgctttttttttatcarttgatatcatcatatgactttttttctttcgcttattgatgccttggattacattggtttttcaaatgttgaaccagtcttgcatacctgggataaattctacttggttatggtgtataattctttttatacattgttggattctatttgttaatattttattgaggattcagattgatctacttaagccacagccatgaacaaatcactctcttgttctaaagtatcaatggtttccaaatgcaatcaaataaaatccagattttttagtcattcaaagccctccatagcctggtttcaatgtacctttcagtgcttcccttccactacattctgtgaagtacctttatttctctaaactttttctatagtttctcactttcctgtgtttgaatacccctattcccttcatctgctactaggtataactttcaatttttttctaccc

SEQ ID NO: 749618 - DNA, 576 bp, Homo sapiens
gggtctcaccacgttgcccaggctggaatgtagtggttattcacaggtgcggtcccactactcatcagtataggagttttgaccttccccatttccaacctgggccacctcaccccttcttaggcaaactaatggtcccccatcttctgggaggttaccgtatcaatgccattcttagtgcagacaccgagtcggcataatacagcccagaactgctgggctcaagtgatcctcctacctcagcctccctagtagctaggactacaggtactatgcccggctctctgtttcatttkaaattgttgctattactgtgcctcagaagttcattaatcttttctggttcaatttataacttgccaatatttccatctagtttttttttttgtttcagacattatagtttttacttctatcagttcaacttaggtcttccatttctctacttattatgctcaatctttcctctagccttttgaatatgtaggatatagttacaataattgttttaacctttgtcttctaatcttattatctctgtcatttcttggttggtttcaattgactgacctttct

SEQ ID NO: 749619 - DNA, 612 bp, Homo sapiens
actaaaggggtttacaaccacctggatccaaagcaggatttggttgtgaaaaagaaaagaaaaggaacaactcaaggaagtgagggggaaatagtacagttgatctttaaacaacacagatgttggggacacagacctcctgcacagtgggaaatctgcatataacttttgactccccaaaaactgaactactaatagcctactattgactggagggcttaccaataacagaaacagtcaattaacacatattttgtgtgttatatatatattagatactgtattcttacaataaagtaagtgagagaaaggaaaatataacattttcagaaaatcggaaaatcatacatttggaaaatcaaaaggaagagaaaatatatttactgtctattaagtgaaagtgaatcatcataaaggtctttattttcattgtcttcacgtcgastaggctgaagaagaggagaaagaagagtgctggtcttgctgtctcaggggtgacagaggcagaagaaaattcatgtataagtagacctgcgcagttcaaccccatgttattcaagggtcaactataataacagcaatcctcattagttgagcacttaatgccaggca

SEQ ID NO: 749620 - DNA, 624 bp, Homo sapiens
agtgcaatcaaattagaactcaggattaagaaactgactcaaaaccacacaactacatggaaactgaacaacctgctcctgaatgactactgggtacataatgaaattaaggcagaaataaagatgttatttgaaaccaatgagaacaaagacacaacgtacagaatctctgggacacatttaaagtagtgtgtagagggaaatttayaatgctaaatgcacacaagagaaagcaggaaaaatctaaaattgacaccctaacatcacaattaaaagaactagagaagcaagagcaaacaaattcaaaagccagcagaaggcaagaaataatgaagattagagcaaaactgaaggagataaagacacaaaaaagtcttcaaaaaatcaatgaatccaggagctggttttttgaaaagatcaacaaaatagaccactagcaagactaataaagaagaaaagagagaagaatcaaatagacgcaataaaaaatgataaaggggctatcatcactgatcccacagaaatacaaactaccatcagagaatactacaaacacctctacacaaataaactagaaagtctagaagaaatggataaattcctggacacatacaccctcccaag

SEQ ID NO: 749621 - DNA, 641 bp, Homo sapiens
atttcaaatacacaatacactattgctaattgtagtcaccattagatctccagaacttattctgcatatctggaactttgtacccttagaccaacctgttcccatatcccccatcctccagcccctggcaaccaccattctactctctgctcctaagcatctgactttttttatattccacatattagtgagatgtgtgcagtatgtgttcaaggagattttaaattatttttgcaaaggaatttcctrtgcaatatgctatttgattgccaaaacaagactgtgaattcagtgcaggacaatgtgaatcactctactctatagatgagaactgaggctcatacagtcctctagttagcagcaagacaaaggtcaaaaggcaagcctcttaggctctgttatctgaactaacagagaactgtattccaactattggtaacttcattcagataatttcaccctctgtaagaaataacactgaacacttattgagcacttaccttataagcatagtagttcatgtaatcctcgccacaaactgagaagtcaatctatgtgggttccttccatttcacagataaggggaaattggagctcagagatttaagccacctgccagaggtcacatggcccataaaagg

SEQ ID NO: 749622 - DNA, 570 bp, Homo sapiens
aatttctgattagtagatagtggttgtaaaattcctctacaaaaaataaacaaaagaaatgtaaaaccaggcccagatgaagaccccagagctatcaaagtacttttacttgcacaacaatattttgtcaaatgatagaatcaaaataatccaaaataataacaaaaatacttcaaataatgacttcacaatttaaatttactctgctaaaatttttcttgatatttatcagaaattcaaagtgttataaacttttttttccctgaagacaactttggcacmtcttcatcccttggtgaaatgagagagtggtcctttgacttcatttgctagctcatgttgtgctctgacaatgtaaatgtcaggcctactctgttctttggaccatagggaaaaacaaaatacaacattattgtcgctcttagtggtttggcaaaagtcagcagacagatagtatggtcacactaatatgtatgtcagtttatctctttggtaatgatcttttttcaattaaaacagaatatcagtttgtgcctatcaatagaataattatcactttttatctacata

SEQ ID NO: 749623 - DNA, 618 bp, Homo sapiens
gtggctcatccctgtaatcccatcattttgagagacccaggcaggaaaattgcttgagttcaaaattagcatgggcaacaaagtgaggacccacctcaacaaaattaaaaaaaaaaactatcctggcacaaaggggtgcacttgtagtcctagctactcaggaggctgagactgaaggattgtttgagcccaggagtttgaggcrgcagcgaggtatgatcataccactgccttctaacctgggtgacagagtgtgaccctgtctcaaaaagaaaaaaaaaagctatatgcacataaatgcactgctcaatgagttgaattagctttttaaaaccaattactgtaggtacggtatgtagttttggaaaagaatgtacataaaacttaaaaactgcacatccattggctatcaaaagaatcttaatgacaaatactgaaatatattatttgttctggggataattcatacctgctatgatttattaacttatctgatttttacacataaataattacatacttgaaaaccactaatatctttatagtactctattttgtttgtttgttttgggaggtataggtcaagagcttcactttgacttgataccaacactaagg

SEQ ID NO: 749624 - DNA, 560 bp, Homo sapiens
ctaacccctttatttttaaatgacaggattctgggtatagaattctttgtcagaagttgttttcttttttctttcatcttttggaatatatcattcaattctcttctggcctgcaagctttctgctgaaaaatccagtgacagtcttttcaagatcccgttttatacattaagtagctttcgtctgatagctttcasagtccagattgctcatcattacattatggaatctctgatagctttcaatattctccctttaacttttagcaatttatttataatgtgtcttaatgtaggttgttttatattcaaactgttatatgttcactgagctttataaatctgtgtttctaacttcttacccaggcaagggaaattttctgaactactatttacaacaaatgaatctaacaggtattatagaacagttcatctaacagcagtgaaatacatattcttctcaagtatgcacggaacattctcttctatagatcacatgttagtctacaagtcaattcttaacaaatttaagaagaatgaatttatattgaatatcatctg

SEQ ID NO: 749625 - DNA, 623 bp, Homo sapiens
cttttacagctctttatagcggtgtgaaaatggaataatacagcaagagataggggtctactttcacttttctgtatacggatacccaggtttccaggcaacatttattgaaaagactgtcctttcctcattgtatgttcctggcaccttggtcgaaaatagttcactgtagatgtatgaaattgtttctggattctctattctgttccattgctttatgtctctgcactatgttgtgtgggatactatagctgtgtagtataatttgaagtcaagtaatatgattccaccagttttattctttctgttcatgacagctttggatattctgggtcttctgaggttccacrtaattttggggattgttttttctatttctgtgaagaataacattggtattttgattgggattgcactgaatctatagattaccttgggcagtatggacattttaataatactgattcttcacatctatgagcagagaatatctctctatttttgtatatcttcttcagtttcattaatcaatgttttatagttttaattgtaaaggtgtttcacttctctggttaagtttactcctaagtattttatgccatttgtacctattgtaaatgagg

SEQ ID NO: 749626 - DNA, 589 bp, Homo sapiens
ttatctatctcaaagtctgctgattctctcttctacaaactctaatctactgttaagccctctagtgaagtttttgttttaattatattacatttcaacttcagaatttccatttgattctttcaaacaagttgcatctctttattaatattctgtattttatgaggcatttccattataccatcctgtaattttttaaagcgtgttttttcttagttctttaaatataattataatagtttctttgatatgtttatttactaattccaccttcagaggaagtttctactgcctgatgtgtgtgtatgtgtgtgtgygtgttagattcttcctgttcctttgaatgctttataattgtctttctttaaaacttgatattttgctaatagattgtagtgactctcgttattcatcccctgcaggtggtagctgttgtctacttggccattttgtttatttgtttagttacttgactgaactaattctcaaagtctatttccttaactatgtttagcctctcatatctctgctagattttttttccccttgtttttcccccctttctccttgtttttactttttttgctct

SEQ ID NO: 749627 - DNA, 644 bp, Homo sapiens
acagctctgatcattagaaaaccatttttcttcttaagctcaaacctatatctctctaatttccatccttgagtcccagttttggatctacatagaataaatttaatgcctcttttatgtcttcatttcttccactaaataagagagttgccgtagactgattttcctgaggctaaacagtctcagatcattaacctttacatgcttttttgataattgtcttttcactcttatagagtcttccacttttaaaaatttatttcttaaataayaactgaacacaagacctgtattttctctggcaaggggaaaacatagttgaattactactttagctgatctgtagattctactgctgttaaaattgcttttacttgtctttttttttcctcttggtgatagaggaaaaagttgagtttgcatccagttgaaatcccaggcttttatccatgatttgctgttggactctttttctttgtctgcttttatgcaattgactcttagtttttgtgtaaagctattcatttctacatataaaacaaaatctcatcaattgcagctcattttctagatagtgtaatatctctaaatcttcatgtttaaagttatataatttttgctgactcccagatttgtggatgtga

SEQ ID NO: 749628 - DNA, 563 bp, Homo sapiens
atttaaattatttctttgaactataagttttatttttatgtgttactctgtaatcagatttgtcaaccatgaatcagccttattttctattaataatggtaaattgacaacatgtagtcatctctactcacaagatagaccctgccaaaatgatactaaaggacctaaaccagtattaacataaaagacaatgaaaactggagtaaatttgagatataaatatatttgagatgtcaaaaacccaaaggaggagtactaaytgacatgttactaactgcctacgatggggaaataattgtaatatttgactgcattagtactgtagaatctccagactcacataggtacacagaatgtgggacataaaatagaagaattagttaaaaatatgtatacactgctgttaaacagtaaacctatttcctatacctgcacattatttagtagtcaaccctctcacaaagacttatcattgtaaaatttcagaataaaggataaggaacatcctaaaagttccacaggaaaaaacagaaagtgataggagccagaaagtaaacaatatt

SEQ ID NO: 749629 - DNA, 563 bp, Homo sapiens
atttaaattatttctttgaactataagttttatttttatgtgttactctgtaatcagatttgtcaaccatgaatcagccttattttctattaataatggtaaattgacaacatgtagtcatctctactcacaagatagaccctgccaaaatgatactaaaggacctaaaccagtattaacataaaagacaatgaaaactggagtaaatttgagatataaatatatttgagatgtcaaaaacccaaaggaggagtactaactgacatgttactaactgcctacgayggggaaataattgtaatatttgactgcattagtactgtagaatctccagactcacataggtacacagaatgtgggacataaaatagaagaattagttaaaaatatgtatacactgctgttaaacagtaaacctatttcctatacctgcacattatttagtagtcaaccctctcacaaagacttatcattgtaaaatttcagaataaaggataaggaacatcctaaaagttccacaggaaaaaacagaaagtgataggagccagaaagtaaacaatatt

SEQ ID NO: 749630 - DNA, 674 bp, Homo sapiens
tacttttccccaactcctttcatgagattgtttcatatatttttaatacacttggatggctttgtcagtcggcattttatgctgcgattccctgacctctaaagtaattatttttagggctcactttttgtattataaagttgtgtggggttttgacatagtgtaatatcgtgtagcaactcttatactatcatgcagaatagttttacctctgttaaaagaaaaatgttcccttcacatctggtaatcagtgacctatttcatggctttatagtttkgtcttttccagaatgttataaaattggaattgtacagtgtattagtccatttgcattgatatgaaggaatacctgagactgggtagtatataaataaaagagattcattttggattatggttctgcaggctatacaggaagcagggtatgacatctgctcctagtaaaagcctcaggaagcttccgcttgtggcagaaggcaaaggggaaaccggtatatcacatggcaagtgcaagagcaagagagaaacaggaagatggtgccatacttttgtaaacaatcaggtcttgtgtgaactcagagcaagaactcagtcattaccgtgaggagggcaccacaccattcatgacgggtccacttccatgacccaaacacctcccaccaggccccacctc

SEQ ID NO: 749631 - DNA, 586 bp, Homo sapiens
tcaccgataagtccactgtgtttgctacttcttgctcactggatccaaccagcataatgtcatcaatgtaatgaacaagtgtgatatcttgaggaagcaaaaagtgattggatctctctaaataacgttatgacacaaagccagagagttgacatacccctgaggtaggacagtaaatgtatattgctggccttgccagctgaagacwaattgcttctggtgggtcttatggataggaatgaggaaaaaggtatttgtcaagtcaatggctgaatacctggtaccaggagatgtgttaatttgctcatgcaatgaaaccacatctggtactgcagctgcaattggagtcaccacttggttgagtttatgataatccactgtcattctccaagatccatctgtcttctgcacaggccaaataggagaattgaatggggatgtggtaggaatcaccacccctgtgtctttcaagtccttgatggtggaactaatctccacagtgcctccagagattaggtagtgtttttgatttactatttttctaggtagaggcagctctaatggcttccagtgggtctttcccacc

SEQ ID NO: 749632 - DNA, 644 bp, Homo sapiens
ataatccactgtcattctccaagatccatctgtcttctgcacaggccaaataggagaattgaatggggatgtggtaggaatcaccacccctgtgtctttcaagtccttgatggtggaactaatctccacagtgcctccagagattaggtagtgtttttgatttactatttttctaggtagaggcagctctaatggcttccagtgggtctttcccaccataatagtcctcactctatcagtcagcgagccaatgtgggagttctgccagccgctaagtatgtgtatggcaattaygcactcaggtactggggaaatgacaacaggatatgtctggggacccacaggacccactgtgtgtcagtactgagctaaaactccattaattacctcacctccataagctcctacctcaactggaggaccacaatgacgttttgtgtcccttgaaatcaatatcagcacagagccagtgtcctgtagtccctgaaatgtatgttcatttccctttccccagtacacagttactctggtaaaggcaggaggtatccttggggaaggatggaagaaatattcatagcataaattgtcagtaatgtagtggagtccttcctcaaggggatccagtcaccctttcattcagtggg

SEQ ID NO: 749633 - DNA, 602 bp, Homo sapiens
atgctatatattctagatgcaaattccttatcagctatgtggtttgcaaatgttatctcccattctatgaattgctttttaactttcatgatggtagcattttaatcataaatattttaaatattgatttagtccaatttagctattttaaaatttttgttgcttatctatttggtggtaaatttaacaaacaattgcataagcaaatgtcatgatggtctactcctacttttgtttttttttaagacggagtctcgctctgtcacccaggctggagtgcagtggcacaatcttggctcactgcaagctccacctcctgggttcacgtcattctcctgcctcagcctcccgagtagctgggactacaggcgtctgccaccacgcccagctaattttgttttgtatttttagtagagatggggtttyaccgtgttagccaagatggcctcaatctcctgacctcgtgatccacccacctcggcctcccaaagtgctgggattacacgcctatgttttttttaagtgtttcatagttttagttcttgtatttataattatgattcattttgagttaatttttgcgtttggtgcataatagggat

SEQ ID NO: 749634 - DNA, 624 bp, Homo sapiens
tctacgtgttgtgttagtcattatttctaactgttgagcttctggaaattctacatctttccagataaaagatttagagctaaaaatgataaatcagtcacaaaaaaatagccttcaaatgctataaaatctctcttggkgtctctatctatctttattttccttcataatacttatcacagtctgatgatatatacctgtatgtttgttgattgtctctttctcaaaactgtataagaagaaaaagattctgtctatttattgcaataccctcagagcctagaacagtatctggtcaaagtaaagtctcaataaatacatgtggaataaataaatgagtgacagtaagacacctataggtccttatactgtgcactagcagccttgatttttttttttttaactgttcactacctcaccaaatgaggaattggtaccgattggggggagaagcacgaatgactgacaggttttattgtattcattcattagctcagaaaaacagtttttgagaacccacaatatgccaggcatgtaaagcagcttcaaaactggtatacgggtaaaaaaatagatactcagtttcaaacaagggaagggagtattgggaaatctgtagccttc

SEQ ID NO: 749635 - DNA, 624 bp, Homo sapiens
caaattgagaactgagaggatatcttactcattttcgtaaccatcactctcccaacctatccaaggaccttgctaagtagctgagacatagtgataatgagctactgttaatgaaagttgcttctttgtgccacaaatgtgttaagtgatttacgttcatttttcattccaacaactactttgtgaagcagaagttattagtctcatcttacatacaaggaaactgaggctcagagaaattaagtggctttcccatcccttgtcctgctatggctacagtctcagggcctgctatcacaggggtcatctcaatacttgttttctggttcctaggtctggatctaatcttgatggcctgacattgaccctgactgttaccstctagtctctggcccagcattaggtttccctgcacttctctccctcctcacccacttgtcgctcccagtcctggctcctaggagagatgaatccttctgggtcagccaagaagaactaggagagtctatcagtcactccatagacaggcagtaggaccacagtcctctttcaacatttctaggaaaaagaaaaggaggagccagagtctcagcccctgcaaactcatcaaggggtgcagcctta

SEQ ID NO: 749636 - DNA, 638 bp, Homo sapiens
agaagggaggattggccttaggttgctatcaaggagagggcttttgcttcaatttactctcagaaatgttgttcctgggcagatgtttcctcagtcatgttgtacatcacttttcagttcaagtgcccactacacctttctgttctctgtgtcttctggaataaattattgattgagaaacatgtataaattcctggccagttaaagcttggtgctccttgggctggacgtccaatcctgaatcagacggaggagtgggtggccaatgacatgcagtcttaacatagcccccttacccacccctcaatagtaatatgggtttgaackagtttttacagaaataaatatagtgtcagcctcacccaaacatcttttctgttatagaaacctttacttaacttcaacagatgtcaagaaagtaatatgtatcttttacaataattattataaaggtaaaaatcttagcctgtcctatgttataaaggtgtttttcttttacaactgtgaatcaggaaacacatcttcaggtgtgtacaagatctgggagatctcagatttggctaggctaccggggaggaagttctccatggttgacaaaggtggctaggttttcaggattttcctaatccacccattct

SEQ ID NO: 749637 - DNA, 556 bp, Homo sapiens
ttgctttatagtgtcagtgagtttttgtagtggctgataacaatctttccatatctagtgcttcctttgagagctcttgtaaggcaggtctggtggtaacagattccctcagcatttgtttgtctgaaaaggatcttatttcttttttgcttatgaagcttagtttggccgaatatgaaattctgggttagaatttctttactttaggaatgttgaatattggcccccaatctcttcaggtttgtagggtttctgctgagaggtccactgttagtctgatgtatttccttttgtaggtgacctgacctttctctctagctggctttaacattttttctttmattccaacctcagataatctgatgattatgtctcttggggattatcttcttttgaagtattttactggggttctctgcatttcctaaatttgaatgttggcttctctaactaggttggggaagttctcatggttgacaccctgaaatattagtttggtgcaaaggtaactgcaatttttgtcattgaaagtaatggcaaaagacacaattaattt

SEQ ID NO: 749638 - DNA, 633 bp, Homo sapiens
tgattatgtctcttggggattatcttcttttgaagtattttactggggttctctgcatttcctaaatttgaatgttggcttctctaactaggttggggaagttctcatggttgacaccctgaaatattagtttggtgcaaaggtaactgcaatttttgtcattgaaagtaatggcaaaagacacaattaattttgcatcaacctaatatgttttccaagttgcttacactctccccatctctttcagggacacccctgagtcatagatttggtctctttacataatcccacatttctcagaggtttgttcattccttttcattcttttttctctattcttgtctgactgtcttatttcagaaagccagtcttcaagctctgagattctttcccctgcttggtttattctgcaactaatacttgtgattgcattataaaatttttgtagtgygttttccagctctatcaggtctattacatttttttctatgcaggctattttgtctgtcaactcctgcattgttttattgtgattctcagcttccttggattgggtttcacatagtcctgcatctcaatgatctttgttcctatccatatttggaattcgatttctatcatttcagtcatctc

SEQ ID NO: 749639 - DNA, 620 bp, Homo sapiens
agtctcatcacattgcccaggctggtctcaaactcctgggcgcaaatgattctcccacctcagcctcccaaagtgctgggattacaggggtgagccaccatgcccagccaacaactattttttaacattgtttttaccatcctaaaatgaaattcatagataatataatctacctatatgtatacatcatgatttaaaaattcagcaaaatgccctaacataaaggggaaaacaaagggaaaataatatataattatatgtatttcaatatgtaaatattcaagcaccaatacattagaagtcataatggagttgtcagatgtgtgtacacagatgtacarcagctgcaaatgaagactaacagttggattattttgataactccaacacagtaagtagcattgtcattgatgaagtgatttttttaagatagcaattcctctttgtgaagttctaaacaaaacaaagtgaaaggtcccttcatttatacagtagctgcattcctggaaaattcattgtatactaaagcgattcccaaaatactctttgtttacatgtaagacaagttccaagcccatgtgattataaacagattttcacttctactatttgcaagttgt

SEQ ID NO: 749640 - DNA, 518 bp, Homo sapiens
cagccacagctgtggtgctggttgcccctcccccaggggagctccgcaggcttaagcagattgcagctgagaggctgttgagaatctgcgcagctccagggttgggaccctagaccccgtggcgtgggtaggtgagtgggatcttccratccgtggctgacagagttctgtggataatgctcagtttccccggctaggtagcatgctcactcactgcctcccttggctgtgggttgggggctcctctgccccgtgtggctctcaggtgggccaccacaccacactgtgttccctcctcttcgtggatcatgccagccagagtctagttggttctgatgagagaacctggatatcttggttgccagtgaaggattcacatgtttattatggttcttttcaatgggagtctccaatcaccactgtttgtagttggccatcttggccttgcccccctcatgtatttctttatagcaacacaagaacatcctacctaatgcattcataatagtctaggcatg

SEQ ID NO: 749641 - DNA, 482 bp, Homo sapiens
gagacaacaaacctcaggtatttacaccagacaatgatgctgcttcgatggcacctggtacctaccctcaaaaacaaaattatttctatgagctgggcataactggaaagcaacagaaagctgtcagatctgaagaggatgtgtacactgaggcaagaagcatctcagctgaaataaattgcacacatcttgccatgaaattggagatgtgaaaaacttagcttgccacgaacttggagatgagaactccaaaaatggcaaaagccaaatttttytccagcctggttctctgcaggaaatcaagctattcaaaaagatttttgattattattatttcttacagaactgagtttgaagatatatttatacccatgacacacaaggctaatgataaatagacctttgaagagtattcaaattaaatctaggtctctgcaatgaaacaccaaagcaaatattagactttttaaaaaatgcaaagc

SEQ ID NO: 749642 - DNA, 616 bp, Homo sapiens
tcttgttacatgttttgggatagaacttattttctttgacaaaatactaaaagtaattttgggagtgagtgaaatactaacagcagctaattttcctcatcatcttcattagcatcatcatcatcagtgtggtaggcagaatcatggccccccctcaaatatgtccacgccctrgtccctaacacctgtgaatacattaccttacatggcaaacgggactctgcagatgtgataaaggtaagagtcttgagatgggaatattttcctgcattacttaggtggtcccaatgtattaggtgggcacagaggtctttatgagaaagaagcaggaatatcagccagaggaaatctagcaatggaagcaaaagttgaactgatgccattgctagaaggtggctacaccaccaaagactggccagtctctagaagctggaaaacacgagcaaattctcccctagagccttcaaaaggaacacatgtctgctgacaccttggttagtgccataacacccattttcagatatctgaccttcagagccataataacaaacttgtgttgttttaaaccactagatttttttttgtaatttatagcagcagtaggaaattaatacca

SEQ ID NO: 749643 - DNA, 342 bp, Homo sapiens
gaatgatagcttagaacctcttattccaaaatctacttttgcttgactcatacagtctcactccccatcccaccaataaaaatatgcctgggaatattcatgagcagatgctatgaaagctgagtgatggtcttcttttggtcagaaattaggtacaaattatgtggctgtgtaaggagaaagaagaaaacraatagaaaaagcagaaaagccatagctacaggaagccttgcagatattatagctatttgagtgttccattgtcataagacccaaagcatagttttagaactagaagacatctatgaggtcctgttcatgccatcagtttataggaaaatg

SEQ ID NO: 749644 - DNA, 557 bp, Homo sapiens
tggagacatactcagtttcagggaactgttaaagttacaagcaaattggacaacttgctttctcgtattctgatcattagtgtaccttcaaatgagggtgaagtatgtattattaatccactaccactatttatgacacacccacacattgctgagtgctgcctgaatatcattaatttatgtaaaaggtgggttgttgaaggcataagtagaaatttttttaatgaaattgtaggaccagaaagtcatgaaaatattttggttatttcctaaagtatggtagaactaccactggagactacaggaaatgatcttcagtggcatatgayatgattttagttagtacctggataagacattaaataacattacctcctaaatggtgttccctggttatgttaagcaggaagtttcagattgatattagttttttttttttttttgtaccacttctggaatgcttgttaatctctattttcaccaaaatgagagagaacatcatctagctaggatctaatgtaattgtttaatttatatttctatgaatgtgttttatt

SEQ ID NO: 749645 - DNA, 557 bp, Homo sapiens
tggagacatactcagtttcagggaactgttaaagttacaagcaaattggacaacttgctttctcgtattctgatcattagtgtaccttcaaatgagggtgaagtatgtattattaatccactaccactatttatgacacacccacacattgctgagtgctgcctgaatatcattaatttatgtaaaaggtgggttgttgaaggcataagtagaaatttttttaatgaaattgtaggaccagaaagtcatgaaaatattttggttatttcctaaagtatggtagaactaccactggagactacaggaaatgatcttcagtggcatatgatatgattttagttagtacctggataagacattaaataacattacctcctaaatggtgttccctggttatgttaagcaggaagtttcagattgwtattagttttttttttttttttgtaccacttctggaatgcttgttaatctctattttcaccaaaatgagagagaacatcatctagctaggatctaatgtaattgtttaatttatatttctatgaatgtgttttatt

SEQ ID NO: 749646 - DNA, 613 bp, Homo sapiens
ccaatttcccatctgccatgcagaaaaagtggagggcttgcaaagggagtagcctctggccttttgtgacttaggcgtggaaagttagggttttccttgcaatttagttctaggaagttggcgtgaagcagccttaggttccctgcctccagatcctagtctcctgcctcactatctcactgcctactcaagccaggcccaactgtttgattttcttggtacagtttcttgttgctgtttgaaagcaaatgtggttgagaggatgaggtacaaaatcgctctatgatatgttgctgctgtcggaagtttctaggctgtcatcatatgagatgatgtgtgcagaagcacattagagaaggaaatgcaccaataaaatgtcatcattttattatctgaagcagctgttagggaatacrctatcctttttgaacattattttcaacacaggcagccacttggaaaaatgtattcgttgatctggacaaagatctgtggagagaccatgaagggcccgaggccaatacttcactcacccctacagagggggaactccaagcacctgttgctctagaaatggatatgatgtttcagtttttgaaagtgacagagcaga

SEQ ID NO: 749647 - DNA, 609 bp, Homo sapiens
atggaaccaagttagaaaacactctttaggatattatacaggagaactttcccaacctagcaaggcagaccaatattcaaattcaggaaatactgagaacactacaaagatactcctcgagaagagcaaccccaagacacataattctcagattcaccaaggttgaaatgaaggaaaaaatgttaagggcagccagagagaaaggttgggttactcacaaagggaagaccatcagactaatagcagatctgttggcagaaaccctacaagccagaagagagtggggccaaaatatacrttcttaaagaaaagaattttcaacccagaatttcatatccagccaaactaagatttataagtgaaggagaaataaaatcctttatagacaagtaaatgctgagaggttttgtcaccaccagacctgccttacaagagctcctgaaggaagcactaaacatggaaaggaacaaccggtaccatccactgcaaaaacatgccaaattgtaacgaccatcaatgctaggaagaatctgcatcaattaatgggtaaaataaccagctaaagtcataatgacaggatcaaattcacacataacaatattaacctta

SEQ ID NO: 749648 - DNA, 597 bp, Homo sapiens
cgctatcataggaaggaaaatatactgatttaaagagatgattgaggaataaatgatgattttgaagcacatagcacttaactaagcatagtataagaacagctaaattaaaaagtattttcaacaccattgcacatttctcattttctccaataagttgaatgtcagtagaaaagaaattctaggaggatagtgccaagttgaaaattaaaaaaaaatattcaatacaaaactcaagaagccaataatctgtagaaaaatccacctcaataaactataacattttgaactacttgctggcaaatgacagagaatgaaagaagmagcttactaaaattcaaaaatgacagcaaagcaaatccaggttttgtctcatagctatgtaatgaagatgactttctgcttaaattaactgctacaattcaatgacggtctgttgatactcagggttactcaatgtttttcacatttccattatgataatttttaaataagccaaaatttgtactgaacactttttattgtattgaaatacttaagatggatagtgagatattatgcatgcattttagttacattgtcagtattgtcagtttt

SEQ ID NO: 749649 - DNA, 576 bp, Homo sapiens
tgatatagtctgggacatggctttctggtcagcttgcctttttcctcttctgctgtcttgatcctctagtgtcgaagtatctcagagtcccattatgagtttccacaacacatgccatgccccgcacatgacccaaaatgaggccagttgtcasatgtcatttagtaccaggcttgcatggtatttcttatctccatagttgagaaatagttctaaaatatgtctattaaagaggagaaacaaaagacaggtcaagaatacacttgatttcaaaaaagtagtagggaccatattattttataaaagtgaaaaaacattcttaagtatttaatatgtagccatgaggtcctagtcacttatttacagcttctgccatggccccttatattaattttctgttgaagataacagaaactatgttagcattttacagaggaagtgatttaacaggaaatttgatgtttacaaaatcattgttgatcagaagactaagtcttcaggattgattcccagcaaacaatacagaggtggacagccacaggaggctggctgtattttgctatacgcaagaggtgc

SEQ ID NO: 749650 - DNA, 623 bp, Homo sapiens
taagatacgtttggttatgtggtcatagcaaacaacacccccaaaataggattggcttaagacaaataagcaaatgacaaaggggtttcatttacacacaggtcacattcgctttgcaagttagtggcactttgttttccattgctttacccagagattcaggctaatggagacttcattacccagaacttcctggtcatgtcagcactggcaattaaacacagaatgggcacatgctacttccattcttatttctttggccaaggtaagtcaaaytgccatgttgcctaactttaagggacaaagaagtttcttttacgatttgtgctttttgtgtcctctctaaaaaatctttgccttcctcagattacaaaaattttcacctattttcttctagaagttttatattttttacttttatgttcaaaattgtgatctatttcaagttaatttttgtatattatgtgaaataaagtttgaagtttattttttacagttgttccagttcatatttattgaaaaggcacacctttattgaattatcttgaaaataagttgactatatgcacacagacacatgggtttatttccagattttatctggaattttaaaattccattct

SEQ ID NO: 749651 - DNA, 623 bp, Homo sapiens
taagatacgtttggttatgtggtcatagcaaacaacacccccaaaataggattggcttaagacaaataagcaaatgacaaaggggtttcatttacacacaggtcacattcgctttgcaagttagtggcactttgttttccattgctttacccagagattcaggctaatggagacttcattacccagaacttcctggtcatgtcagcactggcaattaaacacagaatgggcacatgctacttccattcttatttctttggccaaggtaagtcaaattgccatgttgcctaactttaagggacaaagaagtttcttttacgatttgtgctttttgtgtcctctctaaaaaatctttgccttcctcagattacaaaaattttcrcctattttcttctagaagttttatattttttacttttatgttcaaaattgtgatctatttcaagttaatttttgtatattatgtgaaataaagtttgaagtttattttttacagttgttccagttcatatttattgaaaaggcacacctttattgaattatcttgaaaataagttgactatatgcacacagacacatgggtttatttccagattttatctggaattttaaaattccattct

SEQ ID NO: 749652 - DNA, 559 bp, Homo sapiens
ctctgttttttccccatctttgtggttttatctacatttggtctttgatgatggtgacgtacagatgggtttttggtgtggatgtcctttctgtttgttagttttccttctaacagacaggaccctcagctgcaggtctgttggagtttgctagagaccagaccctgttttcctgggtaccagcagcggtggccacagaacagcagattttcgtgaaccaggaatgctgctgtctgatcgttcctctggaagttttgtctcagaggagtacctggccatgtgaggtrtcagtctgcccctactggggggtgcctcccagttaggctgctcgggggtcaggggtcagggacccacttgaggaggcagtctgcccattctcagatctccagctgtgtgctgggagaaccactgctctcttcaaagctgtcagacagggacatttaagtctgcagaggttactgctgtctttttgtttgtgccctgcccccagaggtggagcctacagaggcaggcaggtctccttgagctgtggtgggctccacccagttcgagcttccca

SEQ ID NO: 749653 - DNA, 521 bp, Homo sapiens
atttctaaaatctaggagagtttgtttttgtttgggcttttttggggagttgttggggggagatcgaggcatttaggaaaacctctgccaaattatagccgattgccaagagaatgaacagagaattcagtggacaaacacaatgaagaacacagactttacaaaaatagttttaaaagactcattaaacaaccaccagaacaagcagcaataacaatccccagggagggggaaacattggctctccagctacaatattcaaaatatccaatttccaacaaaaacatytgaggcatgcaaataaagatcaaactatatcctggtcacaagagaaaaagaaattaacagaaattgtcccagaggaaggccagacactgaatttactagacaaagactttaaatcaactgccttaaatatgctcacagaactaaaaaaaaaaccctggacaatgaactaaagggaaccagaatgtcatctcaccaattagagaatattgatgttaaaaaatagaagtcacaga

SEQ ID NO: 749654 - DNA, 626 bp, Homo sapiens
ggcacatgcctgtaatctaagctactcaggaggatgaggcacgagaatcacttgaattcaggaggcggaggttgcagtgagccaaggtcatgccactgctctccagcctgggggacagagcaagattctgtatcaaaactaaataaaaaagtaaaagggggtggagccaagacagccaaataggaacagctccagtctacagctcccagcgtgagcaactcagaagacgggtgatttctgcatttccaactgaggtactgggttcatctcactggggagtgccagatagggggtgcagcacagtgggtgcagcacactgtgcgtaagccaaagcagggtgaggcatygcctcacccagggagcacagggggtcagggaattccctttcctagtcaaaggggtggcagacagcacctggaaaatcaggtcactcctaccctaatactgcgcttttccaacaggcttatcaaacggcacaacaggtgattatatccctcacctggctaggagggtcctacgcccatggagcttcactcattgctaagacagaggtctgagatcaaactgcaagggagcagcaaggctgggggaggggcacccaccatttctcaggcctgagtaggtaa

SEQ ID NO: 749655 - DNA, 626 bp, Homo sapiens
ggcacatgcctgtaatctaagctactcaggaggatgaggcacgagaatcacttgaattcaggaggcggaggttgcagtgagccaaggtcatgccactgctctccagcctgggggacagagcaagattctgtatcaaaactaaataaaaaagtaaaagggggtggagccaagacagccaaataggaacagctccagtctacagctcccagcgtgagcaactcagaagacgggtgatttctgcatttccaactgaggtactgggttcatctcactggggagtgccagatagggggtgcagcacagtgggtgcagcacactgtgcgtaagccaaagcagggtgaggcattgcctcacccagggagcacagggggtcagggaattccctttcctagtcaaaggggtggcagacagcacctggaaaatcaggtcactcctaccctaatactgcrcttttccaacaggcttatcaaacggcacaacaggtgattatatccctcacctggctaggagggtcctacgcccatggagcttcactcattgctaagacagaggtctgagatcaaactgcaagggagcagcaaggctgggggaggggcacccaccatttctcaggcctgagtaggtaa

SEQ ID NO: 749656 - DNA, 538 bp, Homo sapiens
gctgcaataagttatcatggttcaagtatatgaagaaaatctatactcatggtagcatatttttagatacttgtggacaatctttgatattacatcaaagcttgacaagtgatatctcttagaagttaactataatgtgaattatgaagccatatgaatgagcttttagtacttttttcacattaaaatccattsgtctaactgaactttgaatggatcttttttaacccatgtgtcattttacaatatcatatatcagtaatttggaaaatgctggttcactggtttacgaaggtcttcaattactgacacgtttcatgatatacaatatcaaaagtcatatttattaatattactaccaaagccaccacaaaacatctttaagctctgtaaaggtagcaagctcaaggtggccgatacagatttactcaaattctaattttgcttggaagctcaaatttcatcatctgtaacaaatattgacagtggctttccttgaagtgacaagttcactttgttccttttcaaggaatatttt

SEQ ID NO: 749657 - DNA, 638 bp, Homo sapiens
acaagtgatatctcttagaagttaactataatgtgaattatgaagccatatgaatgagcttttagtacttttttcacattaaaatccattggtctaactgaactttgaatggatcttttttaacccatgtgtcattttacaatatcatatatcagtaatttggaaaatgctggttcactggtttacgaaggtcttcaattactgacacgtttcatgatatacaatatcaaaagtcatatttattaatattactaccaaagccaccasaaaacatctttaagctctgtaaaggtagcaagctcaaggtggccgatacagatttactcaaattctaattttgcttggaagctcaaatttcatcatctgtaacaaatattgacagtggctttccttgaagtgacaagttcactttgttccttttcaaggaatattttcaataaaaggtttgccaaagagccaaatctgaataaccataatgttagttgttttttcaagtaaaaaggtattctattaaaaaaaaaaaaaagtctagtccagctagcaactcaatcacataagcatttttcctgtgcagcatatactcattttatcatacagacaccccagggtgaagtgtaatgtaagtaatttatacttaa

SEQ ID NO: 749658 - DNA, 596 bp, Homo sapiens
atataaatagcttttaattgcctgaaacaatagagaaggaggaatcaacaacaacaacaaaaaaaggtagattcacgttcctcttacagcctgtggcttgttgctgccatctctaaacaaacatttagaactcatctttgaaaagtcctttcctcacatctgaggacagaactctgtataaaagtttccaatggttgcccccacagctataagaataaggttcaagtctcatagcttagtaagatacttagaaattgacgtctacrtaacttctctcccagcctcatcttgtgccatcccttcgcaatccttagtcaactaataccacacttaagatcatgaggaatatgatccccaattgagaagatgggagtaaactggctaactctaaaatgtattattcaggggatatagatgaaagacagatactaaaggaagttctccaggaccaaagtgacactagacagtaatgaatccacaggaagaaataaagagcactggtaatggtaattacaggtaaaggaaaaatgacagtataaaaggctgtataaatataacttctacttttttcttctcttaagaggtaactgcataga

SEQ ID NO: 749659 - DNA, 631 bp, Homo sapiens
agctcgacttttcttcatttgctcctgctcccaggatcagtgtcaattctgtgtctggaacttgatcttgtagccagaagagtagtagctgtctgcagagcttgtatcctcacattccttacatttccatgggtacatctagtaagtagagccaatgtcacaggcctgcattctaaccgcaagagaggcaggaaatttgagttcgcaattctatcctgggtaggtaggacctataatcagaaaagtatcccaaatatagaaaggttatttaaaagattatggcaaccatgactataacacaatccattactgatacacatgttaaacatttaaaggtattcaccaaaataaactagtatgtggaacttccaaacctatagagaaaaaaaaaatggcctagasaaaacttagttaatgaaatagtaggcaaaagagataaagagaggcaaattaacggtatgataaatgggaaactcaaatgagattgtacaaagaagtccaaggatattgttaatcacaataaatataaatggatttgatctgtctataaaaaaacaacaaacacattcagactgagtttttttaaaaaccagctatttgcaagatatatggttaaaacatattgcaaaag

SEQ ID NO: 749660 - DNA, 594 bp, Homo sapiens
aatcaaggttttagagtaatagtatatgagcatgggagtgggtagctaaggtggggtggagaaaaagatcattagagatgaggagtcaagaaactgaatgaccagagtgtcagatgtatcatttagtgcttgttgaagtcaccaagaataacaagtcacagtggagagacagggacctgtatgctaaaattttgaatgaatgagaggaaatgactgaaaggtcagtagatgattgcaacatagaggggtggcaggtgccattgactgatggcaaactattcctttatttaataaatatttatttacatatggccaactaattactgtggggagaacaacttaccacatcctcaaggattacatgctaaytggaagataatatactcctccatcaaaaacgaaacagtaaggcaaacattgcagtatggtgaggcagaaataccacttgcctaagggtcagaaaatccgatttctattataagttccagctttgtcagtaattagctgtgagcctgggtaaatcagttaacctcattaggcctcagtttccacatttggatacagatgagatgattctcaagcttctgcagggca

SEQ ID NO: 749661 - DNA, 640 bp, Homo sapiens
ctgccaaaggctgtgatgaggttggttcagttcaattagacagttactgaaaatttcctagacagccgattctgctggtttctagggataaataaaaagaaaaatacatggatttcatttacaaaattccaagccaacacttaaactataaaakgaggttttctctttggtggatttctgtttccctttctacattctctttcctttcttggtcggccttatttaaaaacctttttttgcagctaagtatcattgccaatttaataattttaatttttgctaattttactttccttacaattaaacaggtctattaatcatataccttctttagatttacatttgtattagtccagcaataatttactcatatttaaatatacatttatagggtatataaactaatatcagtatatgtactattagagatgcttaagtattcaagacttagacagaaaaaaaaaaaagattacatgcctgtaatctcagcattttgggaggccacagtgggaggattgcttgagcccaggaatttgagatgagtctgagcaaggtagtgagaccctcatcgctataaaaaaaaaaaaattagccaggtgtggtggggcatgcctgtggtcctaactacttgggaggcaga

SEQ ID NO: 749662 - DNA, 635 bp, Homo sapiens
ggttccatatctttgcaattgtgaactgtgctgctaataaacatgcttgtgcagatgtctttttcatgacttcttttcctttgggtagatacctagtagtgggattgcttgattgaatggtagttctatttttagttctttaaggaamctcaatactgttttccatagtggttgtactaatttacattctcacaagcagtttaagtgttcccttttcaccacatccatgccaacatctattgttttttgacttttaaattatggccattcctgtaggagtgaggtggtatctcattgtggttttaatttgcatttccctgatgattagttatgttgagcattttttcataggtttttttggctgtcttcttttaagaaatgcctattcatgtcctttgcctactttttgatgagattatttgttttttccttgctgatttgattgagttcattgtagattctggatactagtcttttgttggaggcagagtttgcaaatattttctcccactctgtggcttgtctgtttaccctgctgattatttcttttgctgtgcagaagctttttggtttaattaggtcccatttatttatttttgtttttgttgtgtttgcttttgaggtcttagtcatgg

SEQ ID NO: 749663 - DNA, 491 bp, Homo sapiens
ctactggagcccactgtgcccatacccacaaaaggaaaataaacttttttttccctgggagcccattgactatacaaaggacaaaggcatttctttgttcctttatgtgagtgaggaggaggtctgtgcaagtttttgtccaaatgggctggagatytttctatctgtggagccgtgggcatgtctccaggcacaacaccctgtgctagttcccttattggtgcctgccgcttgaattttttcccaggctgctttttatgttatgtggggatgaggcactgacccatgggctgggggttctctggggacccttcccttgctatctacctaatgcaaaatctagctgactcctttcactatgatggtgccgctgcactccagcctgggtgacagagcgagagccctgtctctaaaaaataaaccctaacaaattgacattaaaaaaactgtctaatctgtcataggactgagtttaaaagagaaaaggtggc

SEQ ID NO: 749664 - DNA, 613 bp, Homo sapiens
cagtgtgtggtgttcaactgttctgatgggctagattatctagcaatgggaaaggtagttaaattgctgaatcaataatattaaatgtttcaaacttacagctaggtctaattggataaatggaagcaaactcatgtttaaacatgaatgtggtttgaatattacttggactttcattttaggagtaaagacattgtttttatccttggaacttttactaaatttaactttcaattctgacttaaaatattagrtatttgttttaagagatgatatcctttcctgagaaaaaaatcactttcctttttctttgtccttagttttttaaaggactggcttcttctggtgcttgggcttgctttgatgaattcaatcgaattgagttggaagtgttgtcagtggtagctcaacagatcctttgcattcagagagctattcaacagaagttggttgtgtttgtttttgaagggacagaacttaagctcaatccgaattgttttgtagctattaccatgaatcctggctatgcaggacgctctgaattgccggacaatcttaaggtaatattatttatttatttatttatttatttattttatgtttttgaaacagt

SEQ ID NO: 749665 - DNA, 613 bp, Homo sapiens
cagtgtgtggtgttcaactgttctgatgggctagattatctagcaatgggaaaggtagttaaattgctgaatcaataatattaaatgtttcaaacttacagctaggtctaattggataaatggaagcaaactcatgtttaaacatgaatgtggtttgaatattacttggactttcattttaggagtaaagacattgtttttatccttggaacttttactaaatttaactttcaattctgacttaaaatattaggtatttgttttaagagatgatatcctttcctgagaaaaaaatcactttcctttttctttgtccttagttttttaaaggaytggcttcttctggtgcttgggcttgctttgatgaattcaatcgaattgagttggaagtgttgtcagtggtagctcaacagatcctttgcattcagagagctattcaacagaagttggttgtgtttgtttttgaagggacagaacttaagctcaatccgaattgttttgtagctattaccatgaatcctggctatgcaggacgctctgaattgccggacaatcttaaggtaatattatttatttatttatttatttatttattttatgtttttgaaacagt

SEQ ID NO: 749666 - DNA, 648 bp, Homo sapiens
tcttatgctgcaatctcctgtttgcggagggtagtggggggtgggggacaaaaactggtctgttctagggtctatctgtttccttaaagtcttagtttgattccatcacatttagcatgagtgtctccattttggtttggtctggtctgttggggtctagtgcatgagctcagtccaaaacaatggtctctcataatgttgattaaaaattactcccttttggtcaggttctaacttaggtaagagtatgattaaaacttaggaccttagcaccactctcagttaccatgatttggggcttctggccttagcatgtcataggttacagtgccttcrtggtcacacatttctttcagttcttgtcattctagttgaagagagaccatttgacattctagagatggctgcatgcaaacatttaaaacttttgaaagaatatagcacatcagggaggctactattatgatcatcagaaggataacaccaagagtttggagtatgctccttagccagggtccccatgaacctaaccaactaaaatcaaatagagcaaataatgagctatacaaaaagtctgcttgctttaaccaagcagcctgttcattaatcccctacaactgactctctataatatctgatttattcctc

SEQ ID NO: 749667 - DNA, 576 bp, Homo sapiens
gatacattttctaacaattttcctaatttacttcaaaccatggaaaaaagggccccctaacaaatgttaccccatctagaagaatgaagacttcctggcaatgttctctttaacccatgatgtaggttaagaggagtagacaaatgttctgtttctgactatgaggtaacaaatgtatcattaaaatttgtcacctatgttgggccttcrtcatccatctatcgaggcataggctgttgatgtacaaagctggcacaaaatcccttgcaaataaaagtataccccatgaatgcacacaatagacctcctttccacttctattgtttacagaagcataaggaaggaaaaaatagatagataagagtctcatgatagcagagaaatcttgatccctgatcgtgggacaaagctgtccatgtcaaggatgctgtcttcttatggggagaaacatccctggttagctttaccgtaaggtttccaatgggtgtacagttccaagagtgtggagagacctttctgagttgtgagattacaaacccaaggttcaaggtcaccaaattttgttgcagtatatat

SEQ ID NO: 749668 - DNA, 581 bp, Homo sapiens
ccaatccaattctgaatccagttcagtttctgtcatgccttccaaacacagtttggatcataaattagctcaaagaaacttgaagagctcagaacacaaatccatggagctttggaatcctggagagaacttaccaggatccccagtcactgccagagaacaatgaacacaatgggcctggcgggaaccttgcttggccacttggtgctcctggaggtcaccaaaagctctactttggatctcacttctgacatcatctgttaaaagggaaaccttagccaaattaaattttatagagtttaattgaccaaagaattattcatgaatcaggcagccttccaagtaggctcagagactccagtgaagccamgagatagaagatgattgaaggacagaaaaaggaaaatgatatatagaaaacggaaatgaggtacagaaacagcgggactggtatagcttggcatttgccttatttgaacactgtctgaacagttggccttctttggttggccaaaactcagtgattggcacaaaagtggactatagtctatctacacctccatttaggttataatttgtca

SEQ ID NO: 749669 - DNA, 605 bp, Homo sapiens
gatttaaaattggtgagatgttccttgggctggtctgaggatccgacgtcataggtggatctcctcacggagagagggcaaggacaggggattgatctcccgagggagatcccctgtcccaggtttttcagcaccaaatgttacaagagtccatgtgaagagaccaccaaacaggctttgtgtgagcaataaaactttttaatcacctgggtgcaggcagactgagtctgaaaaagaagtcagcaaagggagataggggtgggacagttttatatgatttgggtaggtagtggaaaattacagttaaaggtggttatctcttgtgggcagggacggggctcacaaggtgcagggtggggagatcatgagactcgttgcccaggagaaggaatgtcacaaggccaattgatcagttagggtggggcaggaacaaatcacaatggtggawtgtcatcagttaaggcaggaactggctattttcacttcttttgtggttcttcagttgcttcaggccgtctggatgtatacgtgcaggtcacaggggatctgatggcttagcttgggctcagaggcctgacagacagcagagctaaaagagcactgga

SEQ ID NO: 749670 - DNA, 640 bp, Homo sapiens
aaatatgttaaaggtttaaaacacttggtattatgcttaatcagtttaaccatgaggtgagattcttataaaccttttatcaccctctacaatttttgtaaaagagcagatcagtgcttcaagaaaaccatttgtgcttttatttcaatgttcgatttatggaaaaactgaataatacccctttaaatttagtcaatatgttcaaacacagaatatttttaccagattaatttttagaaaacttccgcaacttgttcagacccttagctttttcttatctaatttgaaacaatcctttagccctctaaactaggcaaaaatttacatttccatcccttcttatartcttttaccaaaaacacatttcactctcctcacataccttgcatgtaaaactattttttagtagttttaattatatgttacaatggtaacttttagcaacttttacttttggtgcataaatttcttttcatgaatcctttcacaatgtacacagaccatctacaacatgcttggactttctgacttgtcctaaacatccctctttttaaacaactagttattttattttaggacaaaaatttaccatgcgagatcctttcctatataaaatctcttttctgtataaccttctttg

SEQ ID NO: 749671 - DNA, 630 bp, Homo sapiens
tgtggatcttaccttcagcaaacattttttaaatgtggggctttgggctttgttggatcaaatagcacttcccgcaacagaacacatatgcgcaccggtacatttcccaggcacagggactttataaagttgtatagcagcggtccccaacctttttggcatcagggacccgtttcatggaagacaaattttccrcagactgcgagatgggagaagatgattttgggataaaattgttccatgtcaaattatcaggcaccagattattataatgagcatgcaacctagattcctccatgcacagttcacgatagggtttacacgcctatgcaaatttaatgcctgatgatctgacaggaggtgaagctcaggaggtaacactcactagcccaccactcacctcctgctgtgtggcctggtttcactattgtaacaggtcatggaacagtacctgtccatagcctgggggttggggacaactgctgtataggacaataactcctttatatttattatatttgcaagttttggatctatcagcttttgctggctggggactttggaatagatggagcttaatatggcttggctctgcgtctctacccaaatctcatgttgacttgtaattcc

SEQ ID NO: 749672 - DNA, 630 bp, Homo sapiens
tgtggatcttaccttcagcaaacattttttaaatgtggggctttgggctttgttggatcaaatagcacttcccgcaacagaacacatatgcgcaccggtacatttcccaggcacagggactttataaagttgtatagcagcggtccccaacctttttggcatcagggacccgtttcatggaagacaaattttccacagactgcgagatgggagaagatgattttgggataaaattgttccatgtcaaattatcaggcaccagattattataatgagcatgcaacctagattcctccatgcacagttcacgatagggtttacacgcctatgmaaatttaatgcctgatgatctgacaggaggtgaagctcaggaggtaacactcactagcccaccactcacctcctgctgtgtggcctggtttcactattgtaacaggtcatggaacagtacctgtccatagcctgggggttggggacaactgctgtataggacaataactcctttatatttattatatttgcaagttttggatctatcagcttttgctggctggggactttggaatagatggagcttaatatggcttggctctgcgtctctacccaaatctcatgttgacttgtaattcc

SEQ ID NO: 749673 - DNA, 609 bp, Homo sapiens
agttcttggaaattatctttttagcaaaataagaaaaatgcaagagaagtattaaataatagaatgtgcatgattgaagagcaaattggggctctggagaataaagtcaaggatttaaaaaaatgaaatctagaaaccaacaaacgaagatctcctacaagctaaagagatgaaaatttgagatraaagttaagagatgttgtcaatcaatcctagaagtttaatctaataagagacaacatagtaagaggggagaaataatcaaataaataataaaacagaaaaatggttcccaagcttaaaaaaggaattttctgaataaagagatttatccaatgctgaccaagaagaataataaatgacccacatctgggcatattcttatgtatttcataactccaagggtaaaagaaaattccagaagcttctacggagacagagccagaaagaaaattttgtccaaaggagtaaaaatcagatttgtataaggagaaaaagaagcaataccttcaaagtcctgagggaaaaccattttttaacttacaattctgtatctagtcaagctaacactatagtgaggcaaaataaggattccttcagacatggaga

SEQ ID NO: 749674 - DNA, 606 bp, Homo sapiens
gcaccaaaatacttttcctctcatttacttacagtaacagctttattaagaaataattcatacgttgtaaaattcatccatttaaggtgtacagttcagtagtttttagtatgttcacagagttgtgccaccatcaccactttcttattttaggatattttcatcagcctcagaagaaacctcatgcccactaacagtcattccccattgccaccttaccaagcccctggaaaccacttacctactttctgtttctatggctttgcctattctggacatttcatataaatagaatcatacagcatatggtcttttgtatctggcttctttcacttagcatagtgttctcaaagcttctccatctataaataaatgtagttttacctctttgcataatttattatgcaaataatattttattgcatagatattgtttattgtttatccwtctatcagttgataaacatttgagttgtttcctgctatgaacaagtgtacaagtttttatgtacacatatgtttccatttctctcgagtatatacctcagagtggagtttttgtcatatgaaaaacaacaaaaaaatgctccatgtttaaccctttca

SEQ ID NO: 749675 - DNA, 555 bp, Homo sapiens
ccttgttgcttattgctatattgtgaccataatttattaataggcatttttgtttcttccagttttattcaattccaaacagcgcttttatgaacattttaatccatatttccaggttcagatgaacaagaatatctcttgggtggatatgcttgagagtagaattgctgggtaatatgaaccaatgttcatttttacaagttaatactgtattgcttttgaaattgattgtactgatgcttctacatgcaatttatgagatcctrtagattcactgcctcactaatacttggaattattagacttcttaatttttgctcatcaaatgggtataaaatatctcattatggtcttgttttacattttttaaattaccaattaggatcagcatctcttcctgtgtttattggccatatttgtttcctctcttgtgaaatgcctgttctttcttttgcctcttgcttattgatttctaagagtacttcactcttgctgctaattctttgttggctgtatgtaatgcagatataggctatctgtttgtaacttgtcttt

SEQ ID NO: 749676 - DNA, 582 bp, Homo sapiens
tctctgttctcctttcggttgtccttggtcactccacttggtcacatggagagaattggcagctttcggaggcagtccctgagtgctctgtgatggctgaggctcccccagctacagagctttaggggaagttcagtttatctggtggaagaaggtgaatggccctgacagcctctccccagagctcagccctgggggagtgagccgtgttcagtgggtgaggctcccccatgcagcctgacaagagctgcaagtgttctgctgatcaggaaccccgaggccggggagaagtgatctgcccaggaccccacagcagactgtgtggcagagtgtggttcccrcactgggcttctggcagcctttgctccagtcagcatgggccatgcagctgcaaatggttgtagatgccacttgtaggactgctggatgttggtatcttggcatcattcccatttgttaggagccttggagccatgttttccttgggaattgattatatgtgtccccaaactaaattaactcattgatatttgagatcttgggatcttgagtatgtgtcttatgtctcaccccaactttgtt

SEQ ID NO: 749677 - DNA, 645 bp, Homo sapiens
ccatcctgaacatcatttctttgggaagaaatctgtaagccaattctctccccagcatcatctccagttcatgaggatgctggggagagaaaaaggccctgccaagaggaacccagaggacactcaggccacacagccttccctcccttcctcctggtcacacgcacgcatggatcgkgacatcccctctttggccatgaaaaccagaattcatgtggaaatctgattaggtaaacaagtaacacaggagaaatgcccagactttcagtgatggagccactaagctaggagagaaaaccactctcatcaaatgagatacactctccatccagggtaaagcttttcaaatccttttaataaaaatgcccttcccaaaatgactttgtgactatggttctgctttgatgagaaaattaaaaggaagcttttccattttttcttgcacaaagcagctgactctcccatctcaaaatgcctttaacaatcgaagcctcggctattaatgagagcagagcaggccacacggcatggcttctgaaacgcttaatttatatttttaaattattctgataagccacaattgtaaaatgacaacactcagccatttccatttcgtatgtcaaattatcgcattttttaaaaggc

SEQ ID NO: 749678 - DNA, 591 bp, Homo sapiens
acccatttgcttctagacctataactcaagtcccacaggtccctagaggtgaggttgagagtgtgacccaggaggaggtgcgctacactcaaaaagaactgttctcggccaggcacggtggctcacgcctgtaatcccaacactttgtgaggccgaggtgggcggatcacgaggtcaggagttcaagaccagtctggccaacatagtgaaaccctgtctctactaaaaatacaaaaaattagccgggcgtggtggtgcacccctgtaatcccagctactcggcaggctgaggcaggagaattgcatgaacccgggaggcggaggttgcagtgagctgagattgtgccactgcactctaacctgggcaacagaacgagactccctctaagaaaaaaaaaagaactgttctctaatttatataaacagcaatctggagamcaggcatgggaatgggtattaagggtatgggataatggtggaaggaacatagagttggatcaggctgaatttattgatttgggcccactaagtagggactctgcatttaatgttgcagctcggggagttaaaataaggttctaatagtttatt

SEQ ID NO: 749679 - DNA, 339 bp, Homo sapiens
gtatataaggttgatccctgtactcttgttgggaacttgagtggtatgaatagagaaggtgagttcttggggacagaggctacagtttagcaagctttcctatgcggaccttggtaatttctttacattttatagaccaaagaacaatcttaacttgcccttttttctaaaggcattgtttaaaaactgtmatcaaatcattgcagtttatggcaaatggcctttttttaaaaaaaaaaaaaaagcaatctaaatcttttcttcatcttggaaaaagacttctcttggatttctgatagaatatttccagtatgctatgttattgcaagacagtaactt

SEQ ID NO: 749680 - DNA, 516 bp, Homo sapiens
tttaggcaccttatttaatattttcaccatcatttgatgtagaagttaatttaattttaaaaatttttgtgtatactaatataaaatatcatatataagatctgatattgtatgatttataatgaatatagatttttttacaatgacaattttaaatatccagaaaaaaaagcttgacaatagaataatgagatacagcaargtcaaaaaaatttgaaagtggcaaaataaagttcagaacgttttgaatcatataaaataataatattcattttaatagaaatatttagatacctagggaaaaacacaaaagggtaaaataattactatgatgcatcattatttttcttgagaaaatacacatcaaacatcatttggtaaaatggaatcaactacatgtaagacagagtgaaaaaaataatgaagacaatgctgcttatcatgcatgaggtagggatggtaatataagttagttcatgtcttatagctgttattagtttagtgtcacattatgct

SEQ ID NO: 749681 - DNA, 606 bp, Homo sapiens
cacattgtggtgtggaagatggctggacaagaccagggtcttgagggaaagtgatgtaaatagcaattgtgaagcaggttcttgcaaagatgagttagtcaagctcctgaccagatagcacagggatctgaaataccaaaaagttccaggtcagccggccgggacctgcctgagctgtgcggggtaggaggtgggagggactgggctctctgtgctgcgggtgtcattgcaaagtcaagagccactaatggaaataacsactggggcatgatttttcatgtcctgattccaatcacagacctgtcatccaagaagaatattgaaggggaaatcccatttcctttgaaaccaaatgttccccacagaagccaaaggcttgtagaaacaactctgattggaaagacttgagcatacattgcctggcttctcgagtaagaggtggcaacactcatcatttattgagagatgagtttacagagagatggggcctgcccatacatggtgatgacctttcttgcttccttgcatcagagacccgactcacaggaggacactgtggcccatctggtctctgtgagcagacggagatggatcctggcaggtgac

SEQ ID NO: 749682 - DNA, 613 bp, Homo sapiens
tctgtgggatcagttgtagtatcacctttgtcatttctgattgtgattatttagatcttctctctttttctttgttaatctagctagtagtctattgaatgtgtttatcctttcaaagaaccaacttttggtttcattggttgtttgtatggatttttgggtctcaattttgtccagttctgctctgattttagttatttattttcttctcctagctttagggttagtttattcttccaggtgtgatgttacattgctaatttgatatctttctaacattttgaggtaggtgttaagtgctataaactttcctctgagcactgcttttgccgtaytggagatttttgttatgttgtgtctctgtttttatttatttcaaagaattttattatgtttgccttaatttcattatttacccaaaagtcattcaggagtgaattgttgaatttccatggtttaattatatggtttggaaggtcttcttggtattgatttctatttcaattccactgtagtctgagagtatggttggtataatttcaatttttttgaatttattgagacttgctttatggccaagcatgtggttcattgtggaatatgttccacgtcc

SEQ ID NO: 749683 - DNA, 621 bp, Homo sapiens
atttattgagacttgctttatggccaagcatgtggttcattgtggaatatgttccacgtccaggtaagaagaatatattctgtggttgatgggtggagtattctgtagatatctattaggtcctattattcaactattgaatttaagttcagaatttgtcaattttctgccttgatatctgtctaacattgtcagtgggggtaatgaagtcccccattattactgtgtggctatttcttttttcttttctttttcatatttttgagacagagtctcgttctgttcccaggctggagtgcagtggcatgatctcggctcactgcaacctccgactacctggttcaagtgattctcctgcctcagcctccccagtagctgggattacaggcacctgccaccttgtccagctaatttttgtatttttagtagagacggrgtttcaccatgttggccaggatagtttcgatctcctgacttcatgatccacccccctcagcctcccaaagtgctggggttacaggcatgagccactgcacctgaccctgtgtggctatttcaaagttatagtaattaaaacagtatgttactggcataaaaacagacatgtagactaaatagaac

SEQ ID NO: 749684 - DNA, 635 bp, Homo sapiens
caagcatgtggttcattgtggaatatgttccacgtccaggtaagaagaatatattctgtggttgatgggtggagtattctgtagatatctattaggtcctattattcaactattgaatttaagttcagaatttgtcaattttctgccttgatatctgtctaacattgtcagtgggggtaatgaagtcccccattattactgtgtggctatttcttttttcttttctttttcatatttttgagacagagtctcgttctgttcccaggctggagtgcagtggcatgatctcggctcactgcaacctccgactacctggttcaagtgattctcctgcctcagcctccccagtagctgggattacaggcacctgccaccttgtccagctaatttttgtatttttagtagagacggagtttcaccatgttggccaggatagtttcratctcctgacttcatgatccacccccctcagcctcccaaagtgctggggttacaggcatgagccactgcacctgaccctgtgtggctatttcaaagttatagtaattaaaacagtatgttactggcataaaaacagacatgtagactaaatagaacaaaatatagagcccagaaatagacccatgcatcaatgg

SEQ ID NO: 749685 - DNA, 638 bp, Homo sapiens
atttttaatccatatatttgtcttatggctagataaagatttctctgaaaaaaagaagcatgtcaggtaagtggcattttaaactttttgttccatttgtgtgtctaaaaattcacttaatttctaagtcctaacgagaagaccyttagtatttagaaagtagttattttaaaaatgttggataacttttagtgtaattaaaatatattttgaaacatgttaatgagtataagttgacatttttcttttgaaagaaaaatgtggacagcattttagaacgtaaatctaattacagctgttcagtaagtgttcactgataattatgccatgtgaagtacttgttatttttaaagaagcttttgttgactatgtgtattcctctttagtttagtttagctattaaacaggataagtgtaattctaattcctcagagattaggcactatagtattttctagaaagcaatgcaattgtcaacattcagagagacaacaattttgaaaaggccagtgaaaattcaattgctgtgagattaatcatgagggttagatccatattcactcgctgttgtgaaagggttggatccatattgactcactgttatgaatccatgttgatggttcattcctcctgtatta

SEQ ID NO: 749686 - DNA, 638 bp, Homo sapiens
atttttaatccatatatttgtcttatggctagataaagatttctctgaaaaaaagaagcatgtcaggtaagtggcattttaaactttttgttccatttgtgtgtctaaaaattcacttaatttctaagtcctaacgagaagacccttagtatttagaaagtagttattttaaaaatgttggataacttttagtgtaattaaaatatattttgaaacatgttaatgagtataagttgacatttttcttttgaaagaaaaatgtggacagcattttagaaygtaaatctaattacagctgttcagtaagtgttcactgataattatgccatgtgaagtacttgttatttttaaagaagcttttgttgactatgtgtattcctctttagtttagtttagctattaaacaggataagtgtaattctaattcctcagagattaggcactatagtattttctagaaagcaatgcaattgtcaacattcagagagacaacaattttgaaaaggccagtgaaaattcaattgctgtgagattaatcatgagggttagatccatattcactcgctgttgtgaaagggttggatccatattgactcactgttatgaatccatgttgatggttcattcctcctgtatta

SEQ ID NO: 749687 - DNA, 627 bp, Homo sapiens
aatatatttttgtctatttgtttgttttgttttattgggcaggagggcaaattcagtcctgttactctatcttgcctggaagcaaaatttcactctagctagctattgagaaagttttctcttttttactaatgagactagttatcctatataaatttcttctctatactcttatttcctcattaaaaaatcttagctgtgtaaatactgggtacaaaaatgtaaacctctttaagcctagagatagcctcatagtgaggtcagtatacccaatcctagctctggctagtcctatcttttgtcatcttcttgactggcccgttttgtcacasactgaaaaagctctgagaattagcctatcacaattattgcatgttatactcagtagacagtgctttatatgtgaatggtacactggtcacaggtgattatccactcttcattcatgaacccaatgactgaatttatctctttgggtgtgagtagacaactgatggagaagatgatggaaacagtggctcaattagaatacacttagaagaaggaaacatatcctaagaattggagcatcaggattaaataacttcaaaatttcaaaataatataggctctacaaatcttaatgga

SEQ ID NO: 749688 - DNA, 641 bp, Homo sapiens
tgcatacatgcttaggatttttttttatttttcttagaatattgactgttttattattatgtggtgcccatgttatccatgaatttttttttttttttttgagacagagtctcgctctgtcacccaggctggagtgcagtggtgctaccttggctcactgcaatgctttgtctaaaactagtgtagttactacagctttcctttggttagcattaacatgctgtatctttctatccttttcctttcaacctatyagtgtctttttatttaaaacattttcttgtaaacaacacgtagttgggtatttttaatccaccttgtagctgtaggtaaaagaacttcaagaatctctaatgtcctcattttttgtctcccatcttcactttgggcttccctaggtaatcctccttagaaaaaaatctgtgtctcatgggtctttcagctataatttactgctattttactggaaccctgttggtatggaggtaaagtgtattgttgtggggagtgagcatactctaatcttccaattaaatctcagcctttcagtgggcctgtgtctgacctgtgactttcacaaatgattcttcttgtgtaatttttcctcctccttttagatgaggcaagaaaactagatgggg

SEQ ID NO: 749689 - DNA, 619 bp, Homo sapiens
ttttatttttcttagaatattgactgttttattattatgtggtgcccatgttatccatgaatttttttttttttttttgagacagagtctcgctctgtcacccaggctggagtgcagtggtgctaccttggctcactgcaatgctttgtctaaaactagtgtagttactacagctttcctttggttagcattaacatgctgtatctttctatccttttcctttcaacctattagtgtctttttatttaaaacattttcttgtaaacaacacgtagttgggtatttttaatccaccttgtagctgtaggtaaaagaacttyaagaatctctaatgtcctcattttttgtctcccatcttcactttgggcttccctaggtaatcctccttagaaaaaaatctgtgtctcatgggtctttcagctataatttactgctattttactggaaccctgttggtatggaggtaaagtgtattgttgtggggagtgagcatactctaatcttccaattaaatctcagcctttcagtgggcctgtgtctgacctgtgactttcacaaatgattcttcttgtgtaatttttcctcctccttttagatgaggcaagaaaactagatgggg

SEQ ID NO: 749690 - DNA, 387 bp, Homo sapiens
  misc_feature 37: n = A,T,C or G
catcaagtccatgtggcagccttcagaaatccatcanaatgcccatttaagtatttctatctgtttaaggcttcagtagcttctgttccaggaaagcaaattttgctgtggctctttagagttgcttgcctctctaggtttcagggtggtgttttgccccccaaatcagttttctgatgggtccaaraaaaggtgttgattttcattttgtccaactttttgttgtaaggatggaaatgataaccgccagctctttaaatgtcagaactgaaacccgcatttaactttcgttggttgtcttttgcagatgagttttacacttaaatctcaaaaatatgcgtgcttttcttcttgacaataatacatcaactacctctgatttaaaat

SEQ ID NO: 749691 - DNA, 645 bp, Homo sapiens
attcctggcaatctccatctagacccatccccttcctgaatcagaaccctgggatcctctgtggcttctttttaacctacacacagatgccaagtggggaaaagcgcactgagctaggatgactgccctgacaggtgatccccaggtgaatctactaatgcagggattgtctatgttgcccttaaaccactttactgaaacactactctttttttgtttttttttttgagatggagttttgctcttgtttcccaggctggagtgcagtggtgcgatctcagctcactgcaacctccgcctccagggttcaagtgattctcctgcctcagcctcctgagtagttgggataacaggcatgtgccaccatgctcagctaatttttttgtatttttagtagagacggggtttcatcatgttggccaggctggtcttgaamtcctgacctcaggctacccacccaccttggcctctcaaattgtagggattacaggcgtgagccaccgcacccagcctgaaacactgctcttcaaggaaagtgcaagggcctgtggcttctctagcctccaccacacttttctctttctttttacctcctttctccattctctccttctcccaactctcctctctcattatcccttcccc

SEQ ID NO: 749692 - DNA, 645 bp, Homo sapiens
attcctggcaatctccatctagacccatccccttcctgaatcagaaccctgggatcctctgtggcttctttttaacctacacacagatgccaagtggggaaaagcgcactgagctaggatgactgccctgacaggtgatccccaggtgaatctactaatgcagggattgtctatgttgcccttaaaccactttactgaaacactactctttttttgtttttttttttgagatggagttttgctcttgtttcccaggctggagtgcagtggtgcgatctcagctcactgcaacctccgcctccagggttcaagtgattctcctgcctcagcctcctgagtagttgggataacaggcatgtgccaccatgctcagctaatttttttgtatttttagtagagacggggtttcatcatgttggccaggctggtcttgaactcctgacctcaggctacccacccaccttggcctctcaaattgtagggattacaggsgtgagccaccgcacccagcctgaaacactgctcttcaaggaaagtgcaagggcctgtggcttctctagcctccaccacacttttctctttctttttacctcctttctccattctctccttctcccaactctcctctctcattatcccttcccc

SEQ ID NO: 749693 - DNA, 647 bp, Homo sapiens
cccactctcttctggcttgtagagtttctgctgagagatccgctgttagtctgatgggtttccctttgtgggtaacccgacctttctctctggctgcccttaacattttttccttcatttcaaccttggtgaatctcacaattatgtgtcttggggttactcttttcgaggagtatctttgtggtgttctctgtatttcctgaatttgaatattggcctgccttgctaggttggggaaattctcctggacaatatcctgaagagtgttttccatcgtggttccattttccccgtcactttcaggtacaccaatcaaatgtagatttggtctttycacatactcccatatttcttggaggctttgttcatttctttttactcttttttatctaaacttctcttctcactttatttcattcatttgatcttcaatcactgataccctttcttccacttgatcagatcggctactgaagcttgtgcatgcatcacatagttctcgtgccatggttttcagctccatcagctcatttaaggtcttctctacattgtttattctagttagccatttcaaggtttttagcttccttgcgatgggtttgaacatcatcatgtagctcagagaagtttgttattacccaccttct

SEQ ID NO: 749694 - DNA, 617 bp, Homo sapiens
tctttgcccatacctatgtcctgaatggtattgcctaggttttcttctagggtttttatggttttaggttttctatttaagtttttaatccatcttgagttaatatttgtataaggtgtaaggaaggggtccaatttctgttttctgcatatagctagccagttttcccagcaccatttattaaatagggaatcctttgcccattgatttttttttctcagatttgtcaaatatcagatggctgtagatgtgtggtgttatttctgaggcctctgttctgttccactggtctatatatctgttttgatactttgaaaactggcacaagataaggatgccttctctcaccattcctattcaacatattattggaagttctggccagagcaacaaggcaaaagaaagaaataaagcatatttaaataggaagagaggaagtcaaattatctctgtttgcagataacatrattgaatatttagaaaaccccatcatctcagccccaaatctccttaagctgataagcaacttcagcaaagtctcaggatacaaaatcaatgtgcaaaaatcacaaggattcctatacaccaataatagacaagcagagagccaaatcatg

SEQ ID NO: 749695 - DNA, 553 bp, Homo sapiens
atatgatgcaacgtgatcgatcaagcatcgcctattgaacattcttgcaaaaactgaggaattcgaatctaagtaatcaggactctctgaagctaactttcacttacagaaatatgaggatataggaacaattaaaygatactatgggaagtgacaaatccagaatgtggtacatcttgtagaactgacccaattttctcaataatagcatttttaaaaaaggtaggaaggagcactgctgtagattaaaggagaacgcagagaagagacaactaaatatcacttgtgaaacctgtttgagttatcaaaggcaaagggcaaaaatcgggaaaatttcagtgtggattggttattagataataccaatggattatggaacaattttcaggttggatagtgccgtcacgacatgtaagaaccatgtccttcatcttagagatgggtaccaaagtacataggggtaaaatgataatgtctgagatttgcttttaaaaattatgacctctcatctataagaatagatgtcaaagtatatttgtgttttattcaaagc

SEQ ID NO: 749696 - DNA, 553 bp, Homo sapiens
atatgatgcaacgtgatcgatcaagcatcgcctattgaacattcttgcaaaaactgaggaattcgaatctaagtaatcaggactctctgaagctaactttcacttacagaaatatgaggatataggaacaattaaatgatactatgggaagtgacaaatccagaatgtggtacatcttgtagaactgacccaattttytcaataatagcatttttaaaaaaggtaggaaggagcactgctgtagattaaaggagaacgcagagaagagacaactaaatatcacttgtgaaacctgtttgagttatcaaaggcaaagggcaaaaatcgggaaaatttcagtgtggattggttattagataataccaatggattatggaacaattttcaggttggatagtgccgtcacgacatgtaagaaccatgtccttcatcttagagatgggtaccaaagtacataggggtaaaatgataatgtctgagatttgcttttaaaaattatgacctctcatctataagaatagatgtcaaagtatatttgtgttttattcaaagc

SEQ ID NO: 749697 - DNA, 553 bp, Homo sapiens
atatgatgcaacgtgatcgatcaagcatcgcctattgaacattcttgcaaaaactgaggaattcgaatctaagtaatcaggactctctgaagctaactttcacttacagaaatatgaggatataggaacaattaaatgatactatgggaagtgacaaatccagaatgtggtacatcttgtagaactgacccaattttctcaataatagcatttttwaaaaaggtaggaaggagcactgctgtagattaaaggagaacgcagagaagagacaactaaatatcacttgtgaaacctgtttgagttatcaaaggcaaagggcaaaaatcgggaaaatttcagtgtggattggttattagataataccaatggattatggaacaattttcaggttggatagtgccgtcacgacatgtaagaaccatgtccttcatcttagagatgggtaccaaagtacataggggtaaaatgataatgtctgagatttgcttttaaaaattatgacctctcatctataagaatagatgtcaaagtatatttgtgttttattcaaagc

SEQ ID NO: 749698 - DNA, 512 bp, Homo sapiens
ttgcatttctgtccccactctcttggaatgctgacctgtgagcaccatatgaagaagccactagggaatgagaagctacatggattaaaaccccacctgtgccccccagaacaatcagccaacagtcagaaccaatcaccagacaggtgagtgggcccatcttagaccatccatcccagtcaaggaactggatgaatgtggtcacatgggtgacctcagatgagaaccacagaactgcccagctgagcccagcctaaattgttgwgccacagaattgtgagctattaaaacaaccgttgtcttaagcccattatgttttgggggtagtttgtgacatagaaataggtaactgatatactcccctgatttttttttacctcttatctgaatggagttgatgtgtgtgagcgtgtgtgtgtagaagcagagtcacatttactgtaacttggttggagcaaaatccatcagattttggtcaaatcaagaaaaaaatgactatgtctgagggtact

SEQ ID NO: 749699 - DNA, 623 bp, Homo sapiens
tgcatctccagttttgccttgcacaaggtctcttcttgctctgtggatcctctacctacgtgtgtctacctgctaactggacaggcacatgctcactagttttccttactcccaaaattcaatttgcaaatgggaccaaagagctccctgttcccctcatgacaccaacacgacaaaaaagagttattccactaattcccttgctggtyggtttaggactttccacctccactattgctctaggtactggaatagcaggcatttcaacctctgtcacgaccttccgtagcctgtctaatgacttctctgctagcatcacagacatatcacaaactttatcagtcctccaggcccaagttgactgtttagctgcagttgtcccccagaaccgctgaggccttgacttactgctgaaaaaggaggactctgtatatttttaaatgaagagtattgtttttacctaaatcaatctggcctggtgtatgacaacataaaaaaactcaaggacagagcccaaaaacttgccaaccaagcaagtaattacgctgaacccctttgggcactctctaattggatgtcctgggtcctcccaattcttagtcctttaatacctatttttctcc

SEQ ID NO: 749700 - DNA, 623 bp, Homo sapiens
tgcatctccagttttgccttgcacaaggtctcttcttgctctgtggatcctctacctacgtgtgtctacctgctaactggacaggcacatgctcactagttttccttactcccaaaattcaatttgcaaatgggaccaaagagctccctgttcccctcatgacaccaacacgacaaaaaagagttattccactaattcccttgctggtcggtttaggactttccacctccactattgctctmggtactggaatagcaggcatttcaacctctgtcacgaccttccgtagcctgtctaatgacttctctgctagcatcacagacatatcacaaactttatcagtcctccaggcccaagttgactgtttagctgcagttgtcccccagaaccgctgaggccttgacttactgctgaaaaaggaggactctgtatatttttaaatgaagagtattgtttttacctaaatcaatctggcctggtgtatgacaacataaaaaaactcaaggacagagcccaaaaacttgccaaccaagcaagtaattacgctgaacccctttgggcactctctaattggatgtcctgggtcctcccaattcttagtcctttaatacctatttttctcc

SEQ ID NO: 749701 - DNA, 611 bp, Homo sapiens
gcttggcaattctctttattgaaagaatagaaaggacagattgctcagcagtgtaactcacttcaaagtaacttcctttaccaagcgatagtgtctacttgtcacacaggaagtgaagacttggcaaaattttcgctgggtagtttcctttgactttttgcattacagtcaacttatctatgagtgataggaagtgtaaatttaactgtactgacaactttttgataatctactgtatctgcaagacttttccagccaaatggcccactgacccttccaactgagtattataaacacctaacatgctaaatcaatgatgaataaattaatgatgaaatagattgattcattcattcatcagtttaaaaccacatttgtgaccaggcactgtggctcacacctataatcccagcattttgggaggcygaggcaggcagatcactggaggtcaggagtttgagaccagcctggacaacatggtgaaactccatctctactaagaatacgaaaagtagctgggcgtggtggcacatacctgtagtcccagctacttgggaggctagggcatgagaattgcttgaacctaggaggcagaggttgcagtgagctgg

SEQ ID NO: 749702 - DNA, 608 bp, Homo sapiens
tatggggtcttgaaatttataatggatccaaattctaaactcttggacaatgctgccaaattatagaatagtaaatttttattgttacctcatttctttggtacaactggttttaagtatatttaagtgcatttatttatattatatgctttcactatcatgaaaaatctaaattctttctyagatctttcaatatcatttttttagaaagcaccaatatatactgtgtgtgtgtgtgtgttgtatataattgcctttatctaaaacatttcaatttaagagatccagtggttttcatttactggggttgagaacctattttgatttattttaaaacagattttaaattgttggttgtccaacaacttataatggaaagtcatttgactaaaagagtagtcctaagaaaaattttagaacggtgttcttagtttgaactgggtatctgagcaacaaaaatttgtagttactttcttaatttgggtcattaaaatacagaagggagagatagcctaaacattttagaatcgtatctagtgaggtaagggaaatcattgaaatgttttagcttgaagatgaaaagtcagattcatactttagggaggtca

SEQ ID NO: 749703 - DNA, 469 bp, Homo sapiens
gctactgaaacttgtgcatgcgtcacgtagttcttgggccatggtttgcagctccaccaggtcatttaaggtcttctctacactggttattctagttagccattcatctaatcttttttcaaggtttttaacttcttcrtgatgggttcaaacgtccacctttagctcagagaaatttgttattaccaatcttctgaagcctacttctatcaactcgtcgaattcgttctccatccagctttgttccgttgttggcgagaagctgcgattctttggaggagaagaggtgctctgattttaagaaatttcagcttttctgctcttgtttctccccatctttgtggttttatctatgtttggtctttgatgatggggacctacagatagggtttttgtgtggatgtcctttttgttggtgttgatgctattcctttctgtttgctagttttccttctaacagtcaggaccc

SEQ ID NO: 749704 - DNA, 651 bp, Homo sapiens
tggagccctgatgcagtgctgggatcaagggtgtgctttgcagggttacagagcagcatgtgcaatgggcagaacaatgtcaagaaaagtgatcatgagtttaacacttctctgcatgaatgaggggagggctgtcataatttcaaatgcatatgcccttgttttgactgtgactctaagggttaccaagacaggacactccaaagagtatctgagcccagggagaccttgctaatgttctgcaggtgacgtcgtctgtggccctggagagaaacatggctcatggttcttccagctgagctgttatcttcttcatctgggcaaaatattggcttgaggtacaggagaccttaagctttctcagagccttctccccaccaggtggtaytctgtgtttacaaagctgcctggattacctctgtcttgtcttttagactactgccagttgtcgtatctacctccctctttagactgggagcatgctgagagcagaacctgtgtctggtttattatcccttccctcagtagctcctacagtgcctatgacatagcaggcaatgaacaaatgtttgttaaataaaatcaattataaagtgggaacttgactcttgactcttggatttcattttcttccaaagcttgattggcaca

SEQ ID NO: 749705 - DNA, 616 bp, Homo sapiens
attttatagagagacttttcagatttaaatgtccttttcttctgatgtaataataatacccaaaactaatggagcctttatcatgtactgtgccctaccctaagcactgcagacccacacccacatatatacatctgtatatattatttaaccctgacaatgacctgaggaggtaggaacttttattatcccagtttttcagatgaggagatagaaactcaaagtaaatttcccaatgtctcacagctagtaaaggacagagctaggattcaaacccaggcagtctcagtctgcagtctgtgctcctaactactgtcctgtatgttcacttctatgtaccttgtttctgaaaaagagtacacagttacctcaggaggttgtattaattcattcttgcattgctataaagaaatatctgagcctggataatttatataggaaagagttttaattggttcagggttctgcargctatataggaagcacagtggtttctgcttctggggaggccccaggaagcttccaatcatggcagaaggcaaaggggaagcaggcatttcacatggctggagtaggaggaagagagagaggggggaggtggcacacacttttaaag

SEQ ID NO: 749706 - DNA, 408 bp, Homo sapiens
tccctttgtacagtttcagtttgtgtggtcatttttacactctcagattgcctagcgaaggagagaccacttgggctgagtgctggtgactttgcagtgaggtgagcattctcaaacatggctaacaggagtagaaattaataaatgmaactcttcatttaggacaagttgactgaatgtaacagggaacggaaaaaattaccatttctggccttgtaattttactacttggattatgtcacctgtaaatagagacacagtcagatatttatataccagtatgtttatttttagcatcaaagattgctacattagctgaagaggtaatgtggcttcggacacaaacaaatagaaggcagacataaggacattttctcaaatacaaaacgaagattatgaattcagaac

SEQ ID NO: 749707 - DNA, 636 bp, Homo sapiens
atttatatttaatttttgcatgcctgtatctgtagacataacacatatgtgtcaatatgtatacatatgtgttgagagagagaggttggttttatatcatttgatgagttgcactgcatctaatcaggagaacctgttttgtttttgtttttgttttgttgttgttgttttgagatggagttggaatttcrctcttatcgcccaggaaatggtgctaccttggctcactgcaacctctgcctcccaggttcaagtgatgattttcctgcctcagcctcccaagtagctgggattacaggctcctgccaccgagcccagctaatttttgtatttttagtagagatggggtttcaccatgttggccaggctggtcttgaactcctgacctcaggagatcacctgcctcggcctctcaaagtgctgggattacaggcatgagccaccaagcccagctgaaaacctgttttaactcattgtattactctctatgacttgtcagagagttcacagatgaattccatatatagtcttagaaattagattagcatacttgtagttgtccttctttctgattttctagttatataaaatacatatatatacgtttatattatatacttttccattacatcctta

SEQ ID NO: 749708 - DNA, 496 bp, Homo sapiens
tgaaatgagaacataattattttttacttctcttaaaatatgaaggaagctatcatttaaaccttacttcagtgtattacatgcaacaagttcccttgaaagagtggcagcaaggctattaagctctcaaccccaacacagaatggctgtgttccctaagggtttgtttaaatttaaagcacataagaacagtaaagaaatataatgtaatcgagtaagaaatgttcaacatcactgtcatccattcagcagtraatacatataatgcaaaactacttcaaattgtgtatgtagtgtgcaaagttaatatctaaatagaaatattagatattacttccatttcacatgtttatattttaattcttataaagctcaaaacaattctatcatttataagaaaacttcacacaaatgtgaaggaaatatatctatagtcccctcatagtgatttaacccaaaagtatatctacatacattccatacaaatcaaaagtat

SEQ ID NO: 749709 - DNA, 527 bp, Homo sapiens
ctctgacactgtgtgtcagtgtcaatattttaagtggatcccaagaaagtcttaagaggatgtcttactgcaccaatagctttcacttcattactgccctgcagttattttacattatttaatcccaaatcccatcttttggattctaccttcctcttgcattttaaatctttaatgggagcctctggcggtccatgggtacaatgattagatacctgcagagagaaactgaaaaattaatcgtggtttccattttatatttttgtattacactaaaaattacttacttgtagagctaacttctacactcctgcaatatgttccttaacattgcaaatgctgagaatgatttcagataaagcatgtccaaactgagccagtraacagccttaagttattctttgagatttgtatgctgggttttcatccaaatttcatttcaaataattttaattaagacgcatttattgatagaggtttgttacatgtggcctaaaaccagggcaagagtaccccaggctaatcat

SEQ ID NO: 749710 - DNA, 594 bp, Homo sapiens
tcaaaccattggtcgtcctctttacagaaacactaagaaaagttgcagcatcctctcttgaacccaaagggatctaaggcagtcaactttaattgtacaaaaagcaaactgaggacaagaggggtacatggtttatctgcagttacacagatgacatgcaggtgagaatcctggctctttccaatggcaaatgtacttgagcaactatgactctgactcttaccaaacattcacccatgccttgccaattctcaatgcaggaatggctgcctaagaggccaaatattgagctagggggagatgatgatactggtggtgatactatcaatgaagaaaatggtaactaacactgaatcccaactacgattggttctaaattactttatataaacagaaagtttatgtaatgtggtcaaggtcacgcagcctggatagaatcccttcactgtattcaagaaygacatacacacaaaaagtccactaatccatagacgtatggatttggagttcttccattcacctggaactagaactacttgcttgacatgaccgattaaaaaaaattagacacgtatagaaaaatatattcggtta

SEQ ID NO: 749711 - DNA, 550 bp, Homo sapiens
tggtgcacccatcacctgagcagtatacactgaactcaatttgtagtcttttacccctcacccccttcccatcctttcccctccccgagtccccaaagtccattgtaaaaaatgatagttaattttaagaaaattctgtcagtaatgtttaggtctcatttccccctcaccctttctaatccctttgcaggcttttgtgatgcagaaacagagtcaagttcagaaagaaatataatwggaaatgagtatgtggtcaaattctcctcaatagagagaagaaaaaacagagattggaagaaaagggtgagcaaggaggaaaataagttcaggttttcaaggaagttttgttttgggaatgggagcaacactttgggagagatatggaatgagagacagagcaaaggaaccagaaaaaaattttaagagatgttgtgggttcggcattcattcccacatcatagtctaagagacatgagtatgaagattgaaatcacttttgtttactttcagatattagattgtattcatctgaatatcacatggagactga

SEQ ID NO: 749712 - DNA, 582 bp, Homo sapiens
gtaagtactgtaagtcaaaatatggaaactcttcaagaacaactgaaaaggggcctgtaatcccagggctttgggaagccaaggtggatggatcacttgacatcaggagtttgagaccagcctggtcaacgtggtgaaaccccgtctctacttaaaaaataaataaataaatgagtacaatacaaaaattagccaggtgtggtggcaggcrcctgtaatcccagcttctcgggaggctgaggcacaaggatcgcttgagcctgggaggcagatgttgcagtgaaccaagatcgtgccactgcactccagcctgggcaacagagcgagactccttctcaaaaaaaaaaaaatgaatgaatgaaaaggaaatgctaaaaattaaaaaaagaatgaatgaataaatgaaaaggaaatgctaaaaattaaaaaaatatatagaccataagggaaatgaagaatgcctttgttggtctcatcaggggactggacagggtgaaaggtacaatcagagagcctaaggaaatgcaacagcaacttcccatttttattgccattatatgaagtacgataatacgattatcg

SEQ ID NO: 749713 - DNA, 582 bp, Homo sapiens
gtaagtactgtaagtcaaaatatggaaactcttcaagaacaactgaaaaggggcctgtaatcccagggctttgggaagccaaggtggatggatcacttgacatcaggagtttgagaccagcctggtcaacgtggtgaaaccccgtctctacttaaaaaataaataaataaatgagtacaatacaaaaattagccaggtgtggtggcaggcgcctgtaatcccagcttctcgggaggctgaggcacaaggatcgcttgagcctgggaggcagatgttgcagtgaaccaagatygtgccactgcactccagcctgggcaacagagcgagactccttctcaaaaaaaaaaaaatgaatgaatgaaaaggaaatgctaaaaattaaaaaaagaatgaatgaataaatgaaaaggaaatgctaaaaattaaaaaaatatatagaccataagggaaatgaagaatgcctttgttggtctcatcaggggactggacagggtgaaaggtacaatcagagagcctaaggaaatgcaacagcaacttcccatttttattgccattatatgaagtacgataatacgattatcg

SEQ ID NO: 749714 - DNA, 593 bp, Homo sapiens
acaagaatagtctgagaaactatcacagcttagactaaagtagcatggtatcctagatgggatcctcaaacaatgacaggaatgtgcaggtgaatattgatttatgaattatgaagaatgtatcatattattgcatgatgttaataataggagaaactggacatgatgtataggaaaaccctcttaactgtcttcgcaacttttctgtaaatttaaaattactctaaaatgtttactaaaaaaaaaaaaacacttaaaggaatggggaaaaaagccaaaaatggggagaaaatacttgtaaaccccgtgtcggataaaggattcatatactgaatgaataaacaccttataacatgcaaccacataaaaatgaagagtccaataaaatagtaaatgatttcaagacttcaccartgaagatacacagatcacaaaaaagcatatgaaaagatgattaccataattattcaataaaaatacaaatgtaaacagcagtaacattcttctacccacctgttacaattgatacaatgcaacaacctgaaaataccaaattgtacaaaagatgtggcattctctttcattgctggtag

SEQ ID NO: 749715 - DNA, 656 bp, Homo sapiens
gaagatgaattaattaaagtcatgcgtatctaaatcatttaaataaaacaatacctccattattattcattgtcgatgcacattaatattcatttactttgtctaaggattaattgcaaagaaaatattcaggctccagttacaagttccaactgtgtatgaaccttctawtttgaagaataactaaagtgactttgttttttaaaaaaggactagttttatttactcaaattttgttgtcaaatggataccaaaactttagttagaaagtgtttttaaagaattggaaaaacccagaattcatgaaataaaactgcagaaggggaaagtatagttaagtgatcggaagtcaacaatgagttgaaactccattggaaaactagaaatatgaatcactaacatgtttgttcttacttttcatactttgaccatttctactattttatcagaaagaaatttttcaataatttaaaactcttgttctttaataaaaatagtttaagctttaaacctttaaaatatgattttacgataatttgaagcacagtgtcaaaattaaagaacaggatatcccgtagcattttctttttcttgagtccccattgtgcttcaaaacctcgactgtctttctttgtcccagatactttttggtactc

SEQ ID NO: 749716 - DNA, 585 bp, Homo sapiens
acccagcaataacaatatctgtccctagaattttttggaagaattagtgaggtcataaatggaaaagtattaccccatgcttggcatgttgtaaatgcccattacatagagactgctgttatttttaccattactrttgattataataaagcctagtaatttataggtggttttcacaaatactgtttcattaattggagtattatgacacttttccacacaaaggaaattaaaactaaaaaattcaggacataggaaataggatatatatatataaatatatatataatctcatacatatatcagcaattatatatataattttctcatctctccttatgctataaaatacaagcagctgttgacatttttgacaactttaaacacttttgtctgtgactcttcaaactacctgataattccttgaacataatgctccaatgggggaaaaatagtgtttagctttctcatatgtgtattcttttaaaatattagagcatttctcttgtgtattagttcctggcacctaatatacctaatacacaaatgtacaatattacatttaatcacaattgacggatcctg

SEQ ID NO: 749717 - DNA, 585 bp, Homo sapiens
acccagcaataacaatatctgtccctagaattttttggaagaattagtgaggtcataaatggaaaagtattaccccatgcttggcatgttgtaaatgcccattacatagagactgctgttatttttaccattactgttgattataataaagcctagtaatttataggtggttttcacaaatactgtttcattaattggagtattatgacacttttccacacaaaggaaattaaaactaaaaaattcaggrcataggaaataggatatatatatataaatatatatataatctcatacatatatcagcaattatatatataattttctcatctctccttatgctataaaatacaagcagctgttgacatttttgacaactttaaacacttttgtctgtgactcttcaaactacctgataattccttgaacataatgctccaatgggggaaaaatagtgtttagctttctcatatgtgtattcttttaaaatattagagcatttctcttgtgtattagttcctggcacctaatatacctaatacacaaatgtacaatattacatttaatcacaattgacggatcctg

SEQ ID NO: 749718 - DNA, 619 bp, Homo sapiens
atcatgccactgccctccagctggagcaaaagagcaagaccctgtctcaaaaatgaaaaatttattctatcttatgttctatttaacagtcccatcccctatcacccatcactttatctacaacaggagtcattcaaaaaactaaagagccaggtagttcaaaatgcaagattcttcattgcctggtccaaatctgtctttccagtttcaatccccatcatttccttaatgcctgctctgccccagtcattgaccaccaggatctccccaaatgtgctgttctctttccaaacctctgagaacttgcacatattgtttctttgcctacaatctctctcctatccacttgtcaagcttctatgtatactttattacttggcttacaatgtggtttctattcccaaaagagtgccaagaaactacatatgttgcasgcacctgtcaataaagaaaatcctaccattgaatccaagtcaggcgctgaggtcctgatatccagtgacaggcttccccgatgtgagagccttcctccgctgtgtatttcagccatgctccacagatcttgcaatcttaccctttctctctcactcctctggtactatctactctcttcactcaa

SEQ ID NO: 749719 - DNA, 619 bp, Homo sapiens
atcatgccactgccctccagctggagcaaaagagcaagaccctgtctcaaaaatgaaaaatttattctatcttatgttctatttaacagtcccatcccctatcacccatcactttatctacaacaggagtcattcaaaaaactaaagagccaggtagttcaaaatgcaagattcttcattgcctggtccaaatctgtctttccagtttcaatccccatcatttccttaatgcctgctctgccccagtcattgaccaccaggatctccccaaatgtgctgttctctttccaaacctctgagaacttgcacatattgtttctttgcctacaatctctctcctatccacttgtcaagcttctatgtatactttattacttggcttacaatgtggtttctattcccaaaagagtgccaagaaactacatatgttgcaggcacctgtcaataaagaaaatcctaccattgaatmcaagtcaggcgctgaggtcctgatatccagtgacaggcttccccgatgtgagagccttcctccgctgtgtatttcagccatgctccacagatcttgcaatcttaccctttctctctcactcctctggtactatctactctcttcactcaa

SEQ ID NO: 749720 - DNA, 589 bp, Homo sapiens
gtttgctaaactatttccagataatgatatgttggtatttgctgaagtaatgccttattattttaatccaaacctgcttgttactgcagagagagtgaacattctttctttcctggctggctggttggctaacagctatttctcatcatctgtacacatcygccagtacttaaagttacttatctactcctcctcttcattctagggaggtgggattgctaatcaaccgaccaagaagccaggtttaacaataattgtggtttttccaatgccctatagccagttgccattaagaagagacatctgacaccctgaccatgctctaactctatgcaaaaggattttttccattttctttttaaaatatgcctttccaaaccagtcctgatttcatagggatccaggcttacgatcttatgtttacaatgaaggcatattttctgcttttctttttctttttttcccagattcagaacttgaataataccctctttgatccatctcaaatgctgtgtgcttattgtgccatgccctatgcccttgggctgcaaaatacttacttttttttttctacccgtacactagagaa

SEQ ID NO: 749721 - DNA, 629 bp, Homo sapiens
acagataagcaatatttctacaataatgttgacctaagggaagatggtaggatgtgtgtgttagtaagtttggtgtaatttggtatatgtaaaacaaaacaaaacaaaaaaagcaaaatggtgtcattagaatcaatttatagggctaytgaataatgaaattaactctctcaaggaacctcagaaaatttgtaataaatggcaaatatcatgaatatattttagtcaacatgatagttaaaaagcaactacttataggtcccatatgtagaaaaatattgaagaatagaaatcacaatgccagaatgctagaattaaaaaaagaggccataacccttcattgtttttctaatggtactattctttatttttcaagcatcattgaactctctagcagaactttatgcctagctcttttttttttccaccaaaaccatgactttcagctgtattttccaggatgctgacacagctaattatctgagatttcattactctgtttcaatgtttgcagaaaagttggattacaaaaagcaaaaagtcatgaagtataaagacttaaagatataaatttagtcatatatatcttaaactgctaaattgcatgaaagatattcttttgtacgtat

SEQ ID NO: 749722 - DNA, 589 bp, Homo sapiens
agataaggtgagtagtgtcacatgtagtttttaatatttaatgactctatatgggtacaatccattatgtgacaatttaattatatgacaaaaaagtttgataaataatattgtggtaggacatctaattcattatttaacatagaaatcaatactttcataaatcatagttctccacagatrtactcttttttttttctccaagtgtgcaaaccccttattcagaatccataggcaatttattttccagtcaggacaagtttgaatggaaatttaattgggcccaggacagccataaattctatttactttttttttaaaccattaaatggaaaggcttctgttacaagtacttttcagaaaggcttaaagaatgtccagatagcattttcctatagtgtattttaagagcagaaacaggggtagacataaattatgtattaagctaaaacaaagcacaaaataataacacaaacatacttttgcacatcctcctttttcctggttagacttcaatgtacattaagtaagatgaagcttttatattttaacattttcaacagtcttaggtttgcatttattgcaggac

SEQ ID NO: 749723 - DNA, 561 bp, Homo sapiens
aaatcatacaacaaactggacaattaaagagtttcttttccccccccttctctttggcagaatttgaatgagattcttatttgtttctcaagtacgtggtagaattcaccagtaaagctatctgggcctgaaaatttctttgtgggaaggattttatttcagactcagttttctttaattagaatccaattttattcatattttctttttcaccttgtgtcagtttgtgctagttgtatttttgagaagcttgtctatttaattcaaattttcaaatgtattgctctaacattcctttttaatgactatagtatctatacagaagtttgcctttttctttttaacatgggtttttgtttcttcactcttttcaaagaccctacatttggcttcattgatcctttcaaytgcatttgtgttttctattttattacattatgatttattgttatttcctccctcttaattttgtggttctctttttaacttctccagaaagatgtttagcacattaacttactttttttatttttttaattttaattcttaatttttgtgggt

SEQ ID NO: 749724 - DNA, 539 bp, Homo sapiens
agaaatgggaggaaaagaaaaacaaggaattttttaaaagtcaactttatccattttaagatgatgtagtcttaccaccaaagtagaaagcatccgcacttctgaatatcatcagatcagcaggcatgagaaacaaagctgaggctttgaggtccccagtgacagccctggccaaaggaaggggtgagggcccctgctctaacatgcagcagagaaaaacaccataactcaccacgtttttagcccaggcaggggcttcggggtgcaaaggaaaagacaaactcttctcaccagggagcttcatagaaacaggccaagggcagttagatgttccaargtccaaaaggcaagttcaagaatgtttctgttaagtgctgaaaaggaggctcggcctagcatgagactctgggccagctgctttgaggtgtctatagctggaggaagcttcctaccagaaaaggccagaggccccttgcatagaaaaatatttatttcttatctgcagaaacaaaagaagaaatttaagccccggtctgaga

SEQ ID NO: 749725 - DNA, 569 bp, Homo sapiens
aaatgtgagtagattgatttcctatagaataaatagaaagtaaagataaaaaataaagtcacaatatctaaaactgtggaagtgatgcagttgtccattgaggaataattggataaattgtggtgtacacatacaatggaatattaytctgccttaaaaaaaattctgacacaggctacaacatggatgaactttgaggacattatgctgagtgtaataaaccagtcacagaaaagatagtttatgattccctttatatgataaatctagaatagacaaattcattaaaagcaggtggtttccagggcttgcagggaggtgaagacagggagttatctaatgggtttagagttttagttttgcaagatgaaaggagttctggagattgggagcacaataatgtgaaagtgctgtcacaaactacataatagtgttgcagtcagcaacgaactgcatatacaaaggtgatctcataagactataataccatataccttttctatatttagatatgccgagatacacaaatgccgttgtgttacagttgcctacagtattcagtatagcaa

SEQ ID NO: 749726 - DNA, 577 bp, Homo sapiens
cagcaatgctacaatataaaggagacccagtgtccattagcagtcattcctcattccttcctcaccccagcccttggcatccactaatcttttatctctatggatttatttatactggatattacatatcaatcaaattatacaataggtgtgtcattttgtgtcttttttcactatcataatgctttcaaggtcaattcaagttgtagcatgtatcactacttcatttctttttatgtctgaataatattccattgtatggataacacagactttgttgttttagaattggaatctatttttgtaaatggtgtgaggtagggctttaatttggtaaagtgatagacattaaagggatattttatttttattgtagacatcaatgcccaagaggaaatcaaaatgaattagtattctccaaatgcatttatattycatcacccacattaaccagagacctaaacactttcaacacatcctgtagtgacagttggcagagataaagcaagatattacttaaacaatgaattaccagcctttactttagccatctaagaaatcacaccgattcatgggc

SEQ ID NO: 749727 - DNA, 624 bp, Homo sapiens
atgtagagcttgagttacagctgtgaataatgttttgggtcactattttagtaatgtatattatttatggatcagttggtatgcacaggcactacgctaagtgcttttcatgcttcatgtcatttaatcttctcaatagcatgaggtgggtatgattactgttcccagtttttagatgaggaaaccatacccttgagtggcaaataacttgcccaaggtcatccaactaagtttgagaagtggggtatgggcacagctcttcctgactccaacacycctgctttaagccaatactgttctgtctccccaagtcttcttcatactgccatttgcctcttctggaattgaagccaccactgacttcagacatggaccttgtaataatgatgcagtggtggcaatgacagtgatagcaaacacatgtgccaggctctctgctacgtgctttacatatatgtagtccactaataatcctaggacacaggtcctattatgatttccattttgcatgtgagaaaactgaggcacagagaagcctcacagccagaaagcagcagaggcagatgggagcccgggctgttagtgagctttgccattgcagtcgagatggctcagtggtacaat

SEQ ID NO: 749728 - DNA, 629 bp, Homo sapiens
ctaaaacaaaaggtaagagaggcctgccagagggaggaatggtatgggtaaagacactgcagagagattacaggatacattaagaaaacatgaagtaccacgctttgtgtatggcatgggcttcaggaacgagattcctgctgctacgataactgatagctacacattgctggcattacctatttattaagtgctttatttgtattacttcgtgtagtttttactgctcctgtttgtctccttctgtgttaaataatttgcccagtttctaatggctagtayggggtagagttaagaatttgggatccgtctgaccccaaaacctctattggaagatttgagaggtgtaaggaaatgtcaagactggcaaagactctaaagatttgggacaaaattgagggcaggtgtttatttctggctgggtaatgcactttacaattaagtcagtgagaaatgatcgcttgtgcaggttttggagaaaaaaagcataggaagttatcagagttctgttttgagcaactaaaaatttatgtaatatttcaaaacatacctgatattgaggcatatgtggtagttgtaaaatctgtcaaggacagctataaaggcaaatcctttttataaatccacct

SEQ ID NO: 749729 - DNA, 597 bp, Homo sapiens
attttaagctttttcaccatacaaaaaataagcatgtgatataatatgttatttagctcaatttattcattctacaatgtgtacatattttaagacatcatgttgtatacaataaatatatataattttccaaattaaaagtaattatattaatttttaaaaagtttgtgtgtgttattgctgcataaactacccccaaaataaatagcttaaacaaagaatttattatctgatgattttgaatttgacctgagctcagctgagcatttagtttggtagttttgcccggagccaytcgagtaacataagtcatctgatagcttaattgggactgatggcctcactcacatcactggctaccagttttggctacttgccagctattggctactagctatctctgtgtgacctgtgtttctcaaggaggcttgcctggacttctccacagggcagactcagtgtgcaagaatagaagctcccaggcttaggagcagaattcacaataacgtcagttgagccacattttatttttcaaattcaataggctaactcagattcaagggaaagggaaatggactccattgcttgaaggtaaga

SEQ ID NO: 749730 - DNA, 617 bp, Homo sapiens
aaaacaataataatattagaaggtggcaaagaacctttaatatttctacaatccaaccaaccttctaaatttctgactgtccattccaggcaatccaaaatatttcactttgggacttctccattgagcatcaaaatgcaacttcattgtatcattgagagaaatatttactacaggaactcatactttgaacattttagttttacattttgtaaactgatcatctattgtattgtatattattatgmctttgtattatatattattatgtttagctgattgcttttctaatataatatctgcttgtcaatttttagtttcccttactggagttatggctcttaaaaattattatttaatatgactaatgacacattttgggggatgtaggctacattctgttagagacttacctattttgaaggaggcagctttatttttaaacatgtaattcaattgaaatcaacattatgctgttcaaaatgtgtatttattgttcttgaacttggaagaattacaattctggaatgcatttctttctgttattaataacaactgtatctaaagattgcatcctataggcaaaccatgtgccaaccctcaccacaatttaccta

SEQ ID NO: 749731 - DNA, 606 bp, Homo sapiens
cagtcttttgcagctattctcacctaccagtcagggtatcatatgaaatatctcattggtggctttgggtcacataatgacctctgtcttaactactcctaacctgccctccacctgccactggctccaagcctttgcaactcttctcatcaactrtttttccaggtcaagtaagttaaaagaaaatacttttatcatttttcacccatcaaattagcaaacatttaaaaatctgataatatcaaacactggtgggaagtaagccagtaagttctcttctgtactactagaggaagtgaaattagtactacaactttggaaggcaatttgaaatgagcaaaacttaaaatgcacttattcttgtacaatacacttcctgattaaccagcaattgcactttcaaatatctaatgtcaaagaaaccttccacatttgaagaaggaggcacagcccatgatactccctgcagccctgcctgtaatatcaaaactatgggatcaacataaatgtttatacaaagaagaacagctaatgaaactatgatagactccaccaagaaatactatgcagaaattaaaagggaagagttcgatctatttataacaa

SEQ ID NO: 749732 - DNA, 606 bp, Homo sapiens
cagtcttttgcagctattctcacctaccagtcagggtatcatatgaaatatctcattggtggctttgggtcacataatgacctctgtcttaactactcctaacctgccctccacctgccactggctccaagcctttgcaactcttctcatcaactatttttccaggtcaagtaagttaaaagaaaatacttttatcatttttcacccatcaaattagcaaacatttaaaaatctgataatatcaaacactggtgggaagtaagccagtaagttctcttctgtactactagaggaagtgaaattagtactacaactttggaaggcaatttgaaatgagcaaaacttaaaatgcacttattcttgtacaatacacttcctgattaaccagcaattgcacttycaaatatctaatgtcaaagaaaccttccacatttgaagaaggaggcacagcccatgatactccctgcagccctgcctgtaatatcaaaactatgggatcaacataaatgtttatacaaagaagaacagctaatgaaactatgatagactccaccaagaaatactatgcagaaattaaaagggaagagttcgatctatttataacaa

SEQ ID NO: 749733 - DNA, 580 bp, Homo sapiens
agaaaaataaaaaaagaggagaaagcaatagggaagtatgacgagtgctatataaatgaaagtataagggattatactaaaaaaatactgacttcccccaagcatatcccttcttcttagaggagtgagaacagtgatggaagcaatggcatttaatttggtgtcttctactccatgaaaaattgcgagagaagccataaggaaagacgtgtccccagcagggaatggcrgggtagggagtgatgtctgagaagactctgggacctgattgttctgccaaggctcatgaggatgtcaaaggagggaagtcaaaggagtgagtcaggctgtgaagagtcagactgtgaagagtcatagcctttggggctattctaaagtgtctggaatttttttttcgtaagcagttatgacatattgaagtttaaaaagaagtattacacaattgaatactttgtgttgaaaagaaaaagataactgattcaggtgatcaagagctaggaattgtagttaaccactggaatgacaagataaaaactaagttctagtgtagttttagggtgttttgtgtctacaacaaggg

SEQ ID NO: 749734 - DNA, 626 bp, Homo sapiens
tcgtatggatgtttttgaggtacatgtgggacaggaggcaaggagtggtgattgtaatccttaccatctgtccagacatctaacatcctgctcagtcttagaaaggtaggtcagtttcttataattacagttttgggctaatgtgcctctttgaacatgctgaattcttacttaatgtattgatttttaaatataattataacatkaatttaattgaatatatgtgtttggaacatatggtgtccctcggcaaatgttttcttaaattatatgcttgtacatgtattaaagtgtaggaaattattgttttacttgtaacatgctcaaggtgcgttttaataaatataaggaataccctgaggcagggaacaggaagatcaaaagctttttctattttagaaagcagttttattactgttgattattaatttaaggatttatttttggcgggtaaaatgactaggaagggtgtgagcccaagtagatctcgtgtgtgtgtgtgtgtgtttgtgtgtgtattcattttctttccttctgcccgcatcctgtcttctctcacttccccctcccacctttttgtttcttatgccagggggctttcatagacccccttaaaacagcagagc

SEQ ID NO: 749735 - DNA, 494 bp, Homo sapiens
attatttaaaaatatttacagggaaatgctcaatatattattttcctggtgctgccataacaaaataccatagaccttgtaacataaacaacagaaattgatttatcacagttctggagaacaaaagtccaagatcagggtgccagcagggttgctgtctcctgaggcctctgtccttggcttgcagctggcctccttcttgctgtgttttcacatggtcctttctctgtgtttgtacattcttggtgtctctcccttttcttttttctytttttttttaagatggagtctcactctgtcacccaggttggagtgcagtggcatgatctcggctcactgcatcctctgtctcctgggttcaaacgattctcctgcctcagcctcctgagtagctgggactacaggtgcgcaccaccatgcccagctaatttttgtatttttagtagagacgtggtttcaccatgttgatcaggctggtctcgaactcctgacct

SEQ ID NO: 749736 - DNA, 313 bp, Homo sapiens
ggaatgtatgccactgtctaaacctgttgaaaacctcctcctcatcttgcaaaagcctgctctacaaaattcctcttcccctattcttccctcattttcctcattggtggtaatacctctcaaaaaagatgcactaatgtattgttgctaaaaraaatcttaagactacaaaaaggctgaattcctccttcctgtgccctctcccaacccctttccttgaagtaaccacgttactttttgctaagcatttacttgaacacatatacatagaaatacagttaactctcgagcaacatgggtttgaattgttata

SEQ ID NO: 749737 - DNA, 642 bp, Homo sapiens
tcacagatttttatcttcacatttttttgtgatttctaggctagatttatgcattgagactgctaaatgagattttgtgttttttttgttttgttttgttttgttttgagatggagtcctgctctgtcgccaggctggagtgcagtggcacaatcccggctcactgcaacctctgcctcccgggttcaagcgattctcctgcctcagcctcctgagtagctgggactacaggcgtgcgccactacgcccagctaatttttgtacttttaatagagacggggtttcatcatgttggacaggatggtcttgatctcttgaccttgtgatccgcccgcctcggcctcccaaagtgctgggattacaggcgtgagccaccgcgcccggccragattttgaaaagaaaaaataaactgaaatggaatcacttattttattctgacctcatgctttctttgggtgtttgagaggaatgtcacaactgtaactatgcagctgcaaatgtctggtggctttaacacaagaattattaatttgttggacttacacatattcatttctccacacttttattgagcacactatatccaaaagcggatgtcaatgagcaattaatgtttctaaatgcaattatattctaaaacc

SEQ ID NO: 749738 - DNA, 631 bp, Homo sapiens
atctattataaaatgttaaaatttgtcaaaactcacataaacatttacttaccatgcatcgcaccacccgcagtcaagagaaatgtaaacaagtaaagaagcagtattaaatcataaccgcgtaaagttaactgtagtacatactgcactactgtaatcattttgcagacctctcgtgttacggtgtagtgaggagtagagcaaatatccgctgaaaacacccagtgacatgggtctgcatgcgagtggttcctctctccagcaaatcgcatgttgcagtaacaagtgatccttcggggtggttctcctgtatttcccgtgtgatatagtcaacgttgaataacaccaagggacccatatgaagtgccactagtgatgtcagtagtgcttccaaggagcagagaaaagtcaagactttagaagaaaaagtcgaattgcttggtaagattgaggtctgcrgctatggttgcccaccatttcagactgatgattcggtttgtaaacagatatacgtatctataatacagtacctactataaaactatttccccttccttataatttcattaataacatttcttttctctagcttactttattgtaagaatgaagtatataattcatataacat

SEQ ID NO: 749739 - DNA, 579 bp, Homo sapiens
agcaaactgtgaacttcataagcaagtgtttaaaacatgattttcaaagacattccttaccattgtgtttaaagccataatggaaagagtttacatgtacacgtttaaaagatgaatctcagcatattacttcaaagatgcattgtgagctgctttattacagggaagtgaactgtttaccaaaccacaaactcccatatacagtacaactgtattacctacagtcctcatattgtacattaggtttctgattgcagttttaaattcagactcattaaatataacttactcttcttaagcaggctgatgaggagagttttgaggtcttcctttaggtatggcagggaaaaatcaaactataagaatcaaattttattgaattccagaaagaataagggtcctaaactttttagtattttatttgcaatacggstgagatcctcggagatattttagcaaaaaacttcattgtagatgtaaaaaatgtcattatcatgataatacaggtacagtcagaaaggaagcataagtgctttcaatggtagtaatttcaattaccagctgaaagcaatgtaaatg

SEQ ID NO: 749740 - DNA, 551 bp, Homo sapiens
attcaaaatgtatatcgccaaaatagccaaccccatagacagctgttacctactccataggaagggaaattgggttaactatatagcggcctgaaaaggatactttactacttcacttaccatgaacatgtccagtagttcatttttgtcaatagaaccatttccatcagcatcatacagcttaaaataccattttaatttttgctccattttttcttgcatgattagatttacagcagcaataaactccaaaaagtcaacaaatccatcctatggaaagtaagatgaaaagagaaataaatatttaagaagaataattgttttttatttgagaactcagcattcgtgagcagggcctttagtwtaacttaaatcaatccataagatttcagcataaaacttttccctagtgtttcatttaaaaaaaagtttatagacacaagtgactttaattttacaattaagcgccttaagtaaataggcattattttttagtgtagttttaggctcacagcaaaattgaatggaagctacagaggtttcctgtatac

SEQ ID NO: 749741 - DNA, 567 bp, Homo sapiens
aaagaggcagaaacaatgattacagactagaaaattagggattgtgcccaagatcagactcatatagtccctctgttgcattcataatttgtgctattttcaccaataccaagtgtatccatcatctccacaggcaacaccgagcatggaggtggagaaaaggcctcccaccctcctgcactaggcagctcttccctccacttctgctgagcagcttgtcaggcatgtgcacctcactcaacttcaccacagccctgcgggagccctttgtagactactcactgttacttaagcatagccaatagatgtgaggcttactctttgcacccmaagcagctgttcaaagttttctttccaatcacatctggtactgttcctgagaggagatttggtaaacacaattttcttcatctatctcagtgatgtcttggtgatttcggtaagattagtgctttggatacctaatgtgcctgacctacccaatcctcagctcagctgctcataagaagcagctgaggagatgtatctaaggaacagaaactctgtttttggtgggggagagagaag

SEQ ID NO: 749742 - DNA, 512 bp, Homo sapiens
ctgctcaggaagctgaggcaggaggatcagttgagcccaagatttcaaggctgcactgagttgtgactgtgttccagcgggggtgacgggttaagaccccatctttaaagaaaaaaacttttaagtaaatagctgtatagtatttcattatatagatgtatataacctgactgtataggtacaaaccaaaactatttactttgatcatttaattcccttactcagactcttttaagtattggacctcttggatttatcctatgttctttttactgtatgttttggtcattcaatttaatattctgagaaattttgcaggcccaatttaatrtatcttttgaattttttcctgtgccctgaattatgtttgtttcggttgaaatttttccttaagtgtctggtgatccctggatttctgctcataattaaggaaaagaatgctgactcactggacccaggcagggcttctctcccagattgcaggcttgcctcggggatacacgggtttccca

SEQ ID NO: 749743 - DNA, 607 bp, Homo sapiens
tctctttactctgtggactcaccctaaattcttttcttgcacaagaattaagaaccctctcttggggtctggattgggattcctttccagtaacaacagcaggttacacatttttctcaagctcatatggaatgttcaccaagaaagaccacatactgggctagaaaacataccttaaaaatgtaaatgtataaaaaattcgtacaatgtctcctctcagaccgtaatagaattaaactaaaaatcaataacagtagctagaaaatcctcaaatacttggakattaaattacactcttctaaataacacatggatcaaagaaaaaatctcaagtgaaattgaaaaagatcttgtggtgctgggataattggttattcatatgcagaagaatgaagctggacccttccctatcaccatacacaaaaattaagtcacgacggattaaagacttaaatgtaagacatgaaacaataaaaatcctaggaaacaccctatgaaaatattttatatggaaataccccataaaaacataggaaatactctttttaatactggccttggcaaataatttattactatgtcctcaaaggcaattgcaacgtaatca

SEQ ID NO: 749744 - DNA, 607 bp, Homo sapiens
tctctttactctgtggactcaccctaaattcttttcttgcacaagaattaagaaccctctcttggggtctggattgggattcctttccagtaacaacagcaggttacacatttttctcaagctcatatggaatgttcaccaagaaagaccacatactgggctagaaaacataccttaaaaatgtaaatgtataaaaaattcgtacaatgtctcctctcagaccgtaatagaattaaactaaaaatcaataacagtagctagaaaatcctcaaatacttggatattaaattacactcttctaaataacacatggatcaaagaaaaaatctcaagtgaaattgaaaaagatsttgtggtgctgggataattggttattcatatgcagaagaatgaagctggacccttccctatcaccatacacaaaaattaagtcacgacggattaaagacttaaatgtaagacatgaaacaataaaaatcctaggaaacaccctatgaaaatattttatatggaaataccccataaaaacataggaaatactctttttaatactggccttggcaaataatttattactatgtcctcaaaggcaattgcaacgtaatca

SEQ ID NO: 749745 - DNA, 719 bp, Homo sapiens
taaattttattagaatagaaaataatacatacagataaccataggatacacacacaggaattgaaagataaattttatacttttcaatatgaaacaaagtgcatatctcatggagatatattgctagaaacaacatgaaacaatagagcaatcatcttgaaaatgaaaagtataggaacatataggaattactaaataataaaaaggtccaacttcattacatgtagcataaaatacaagtattggagaaagtggaaataacaatggtcatatgaaatctactagtcattcagattgtttcaatatatacagtatatgcggaccttatagagaaagttataaatatttattgtttttgtgtatgatgactttatcttaaatgtaatctctaaatgtaaaatagtgctttatggtgatatcagaatttccctaatttttaatctttcttgttatctgaactgttttctaattctgatattgttggaaatrtgaacaagtttctgcaaaatgtgaaattggtaggaaagaggtaaaaaactgattttgcaatgttgaaaactcaatctgctgattttaatttattctctatatattgctatgaagtcacgtcttcaacaattttttgaaaaccacatattgaaagactgagtcatacatatcaaagtcagcagcattgccttggttctattacaaatttaactcaggaactaaaaagcctg

SEQ ID NO: 749746 - DNA, 561 bp, Homo sapiens
caaaaatagagcattaaaccactaaagctaagggccttacagagtccatttcacagccccgccacctccactggaacaggtgctggtatccatggctgagaaactcatagatggtttacatcataggactctatgcagacaacccccagtacaagcccgagcctggtagacatgctgggtgactagacccagaagagasataaacaatcactacagcttggctctcagaaagccacatccataggaaaagggggagagtactacatcaagggaacacactatgggacaaaagaatctgaacaacagccttcagccctacaccttccctctgacagagcctacccaaatgaggaggaatcagaaaaacaactctggtaatatgacaaaacaaggctctttaacaacccccaaaaatcatactagctcaccagcaatggatccaaacaaagaagaaatccctgatttactggaaaaagaattcaggaagttagttattaagctaatcaaggaggcaccagagaaaagtgaagcccaatacaaggaaatccaaaaaatgaaaca

SEQ ID NO: 749747 - DNA, 558 bp, Homo sapiens
tccgaagaatttgtccaaagaaaataatttcagaagtaaacaaaaagccctatatcatgaaggtattcattgcatcattatctgaactatgagaaaaactggaaccagcccagaagaggtgcaggatagcacattcacackcctggagtgttatgaagacaatgtagcagtgagcagaatgtgagcagtgaaagagaaagcaggaagcagaactgtgtgagccaacagatgcaactcaggagacagtgtttcaactgagtgaaacagcaactacctacaaaaactaggaagcaagatggaacagctgctgggtaggggatgttggtttacagatgggcttcctaattattactatgctgctttacatgacacaaattcagaaataaaaatgtaactaattttcagaaaattactctttcatcacttctcattcctctactttatgattttcaaagtctctccactaactccaagatatgccacaaatgcctggcctttaagagctttctgatctaaacccacctcttccaaattgatcttcagttccctaaatgaagc

SEQ ID NO: 749748 - DNA, 631 bp, Homo sapiens
taggactgtgactgcacacatgaagttgaagacaaaggaatgccaatgacaatactgctcattaatttgttcagcagattccattcacatttcttgagctccctcctttgtgcccagccctgagttcaggactttctagtctttcctttttgtaataacagcccctctggcctggcagttattccacaacagagtcttgtacagtggctcagaaggacagagctactggctcagacaggagatcaaggacttgggccttcctcccatctcaacataaggcctgcttcttaatggatgccaactgagaattaaacaaggccaagctccatgatttctatttgaccttgttcatgctagtcacaactctgagattcaaggtcctctttagcaaaatggagctgataaaagtatatacccatagggctgttgtatagtctgcttaggctgccattaaaaaaaawaccagtctgggtagcttaaacataattcattttcttacagttctggaggctgggcgtccaagatcaaggtatcagcagggctgttttctggtgaagcctccgtccttggtttgcagatgccaccttcttgctatgtcctcacatggtttgtttgtttgtttgtttgtttt

SEQ ID NO: 749749 - DNA, 628 bp, Homo sapiens
gatacctgcctacccttgatgaacacgcaagatgaggaagaggtaaatttgtgctgttttaaggcattaagagttggggagtttttgttattgcaacacaacctagcccccgctgaccagtgcaggtacagttaatcatgatgatctaatgacaaaaatctagcatggtcagagtgctggtaagaggagcaccatgtgggaaatgagatataaaaggttatttggggctacctttgactaccaagaataaagcagatagtgaatctgtgtttcaggagaccccagtgtgttagcaatggtttggtacaacaaagatgatcctgtaaggtctgataccctgcttgccctgtgcttatatcccttgattaaggcttgaaggagaggaacctgttgagctcatggataaagtaccttgaattcccaggaatctgtttctttggcttctcctcactcacaaaggttcytagtacctttattctgaaggattgtggcagaggaaatattgtccctccaaggtgatacaatgttatgacttacgagcagcaggcagggaatcctcaagccatataatacttaagcccctagcctagcctggtgccaggtaactcatcttacatgaagacacaca

SEQ ID NO: 749750 - DNA, 429 bp, Homo sapiens
atatccacgctatgcacactaccttccagtgagtcacttagtagaacttctcggttatcagattgactgtctcgtgtagtgtatttgtagttcagtgccatctgtggcttcaggcatctactaagagtcttggaacattttccctctgaataaaggggattattgtacagtatatggttgctgttattaggaatagttgwcctgaagatgagataattcataagaaacccaaaattgaaaaagctgtcttgtaggagagagagtatacttttctgtttggcacaaggagtagtactatcagtagtaactttgggaagaaaagttatcatatgttatcatatatagaagatcttctaatagagatgttcaaagatagaatagaccccttgtcacaggagcaagtgggaggactgattggttgcatgctgc

SEQ ID NO: 749751 - DNA, 631 bp, Homo sapiens
gtttgtatttgtcctgaaaacaataggaagtcacagctagttttgagcagacacaaccaattaaaatgatatttggaaacatggatctaactgtggtatgtatgaggaagagaagcaaggtggccaatcagaaactattgcaaaatgtgtgtttgaaataaaaaccacaggtaaatatcaggaggaaagatcacatgtgaaaaaaatgatagctggattatttagtttgtgtaattataatttcttagaattaaataagaacatattctcatgcaagtactcccaaattttttggtgttataatgttttctgacccactttkttagtctgtttcattaatgaaatggaggtaaaaccataaatgcacgtgaacgagctgaggatgtgcatttccaaaaatcactccaaggcatgttgatgtttcaggagttaatattccttatttaaaaattgattacatacccttaattcttttaactaatgcccattttgtcaatttgccaacaaataagagaaaaattttgttctttaatatatttcggctctctaatagccaaggtgcctaaaaataaatcatagtattgaacacaatgtgactaacaaactaatgaaatataactcaccaagaaac

SEQ ID NO: 749752 - DNA, 584 bp, Homo sapiens
actttagatagatgtaatatctcaaatagactttgagaaagaacgttacattttgatgaactgcaaaatcttacaaatacatgaacaatgtaagttaattaaagtttcaaataattttttctttacatcgaagctttcattagaaagacagaaaacaagataattctaatttgtcactgcttaccatgagtcatgagtaactgtccttatatggcccagtttttaatgttagtaatacttaaaagcaaagaaaaattgataaaaataaaaatttataatttagaagaaagttttaccaaagacagtcagctctgctgggtcactgtccctttctcccaccatattggtaccaacacaagtatacatccctgcatcacttttcctggtattggagatcatcagttttycaccacggatctgttaaaatcaaacaaaaagaaaagagaagggaagaaaaaggaacagaatagaaaataaaggtcattaataaatagttttgagtatttgagcatatttgtttcccaaaggaaaaaactctcccattattttggcatttgcaggtatgttttcttttcttaaattca

SEQ ID NO: 749753 - DNA, 553 bp, Homo sapiens
ccacttaatactttgtaagtatttaatacgattgctgtctaacatagcagtttgcacctaggctttggtccaagctgcttcttggaaatcatatttttcagtagctaccaggctgaggtgtagtcagtaactgaggtatagtcaggtttcagcaaggtctattyggtattgtacccactagactatataaaccaaaatttctgctacaataaagagttaaatagtactccataagacgtgttgcacgaggcatatggagatttcaagtgtgcatcgcagtgtgagcattaacttaaatgtgtcattttatagttctctagtgcagaactatttggtgtacgattgtatgtaacatgcaaatcccatcagttcacactactattatttgtaggattattttaacaaaataatagttccatttcctgtttggtataaaactaaggctttatttttaaaagtggaggaagatgttaatacaaatttctctgtggtttattttccaaaattgatactttctcatatgtagcatgttgttgttgttgttgtttccaaa

SEQ ID NO: 749754 - DNA, 565 bp, Homo sapiens
acttcagtcttgtgtccacctgcctgcttgacagtgtcttgaatgtctaagagtaactcaacattaccaaaatggaattcatggttttcgccatacaagtctttatttccgcaatcttccctgtctttgtacatggtatcatcttctatgaatcgctcaaggaattattattactcctccatttctgtcacccatgaacacactcacaccatcctgaccattcgtaagctccaatgactgtgaaacttattcagaatccacccgattttcctsacttccgcccctgtcattttgtctgagtcaccaacatctctcagagtacacagcagccaactcaacaatcttactcttactcctgtccacactacagtcaattcttcctgcagcagacagaggaacctcttcaaaattataaaaataaatgttaacatctttttacataaaattctccgaaggacccccccacccactccaccacccccatcacatttagaaaaaagtgaaaatccttatcctggcctacaaggttcaagagatatgacctctcatctcgtagtatctaccc

SEQ ID NO: 749755 - DNA, 628 bp, Homo sapiens
tgcatcaaaaatgaagaaaaattatttgaaggcaggaaatgcttgtttagttttgagcctatcacaagtattgataagcatagcccataattttcaaaagaataatcaaatcgtgagtttgcaaatgtgattaagaacactgacctcttgtgttgtggtttgctatggayggattcacaacgtatgttgatttatcaccttataaattataaaaataagtactaggagttgaattaataacttatcttgaattacatcaagtgtttttaaatacagttctcatttttaagaaagcaattacaacttttaacatggggtatttgcaaattgcttttctgctaaggcacggtccatattccaaatgttcataattcacaagaacatgtaacttaatgttgaccttaatattctaccaaagaacttattttgagccaatatcctttaattttctgggaagtattaaaactactatacaaaacaatgacaattatgtaaacagccttcacagagatcagcatgtataattaaaatatgaaaaagatgaaactcatatattcccttaaagtatctgaaactaatttgaaaatccatttgaaagctaaatttaaagaacaacttaaaaattaac

SEQ ID NO: 749756 - DNA, 431 bp, Homo sapiens
ctcagaagaagacatttatgtggctgaaaaatacatgaacaaaagctcatcatcactggtcactagagaaatgcaaatcaaaccctcagtgagataccatctcacaccagttagaatgacaatcattaaaaagtcaggaaacaacagatgctggagaggatgtggagacataggaacgattttacactgttggtgggagtgtaaatcagttcaaccattgtggaagacagtgtggcrattcctcaaggatctagaaccagaaataccatttgacccagccatcccattactgggtatatacccaaaggattataaatcattctactataaagacacacgcacacgtatgtttattgcagcactagtcacaatagcaaagaattgcaaccaacccaaatgcccatcagtgatagactagataaagaaatgtg

SEQ ID NO: 749757 - DNA, 413 bp, Homo sapiens
ctatcactgatgggcatttgggttggttgcaattctttgctattgtgactagtgctgcaataaacatacgtgtgcgtgtgtctttatagtagaatgatttataatcctttgggtatatacccagtaatgggatggctgggtcaaatggtatttctggttctagatccttgaggaatygccacactgtcttccacaatggttgaactgatttacactcccaccaacagtgtaaaatcgttcctatgtctccacatcctctccagcatctgttgtttcctgactttttaatgattgtcattctaactggtgtgagatggtatctcactgagggtttgatttgcatttctctagtgaccagtgatgatgagcttttgttcatgtatttttcagccacataaatgtcttcttctgag

SEQ ID NO: 749758 - DNA, 497 bp, Homo sapiens
gcaacagggaaggcatttctctatcagtcagtttgtaaatgattattgacaaacaatgtgctgggaaggtggagtgatttgagtagatttggcctctattctcatggagcttcctttctagaggggaaggcagatgatggatggataaatataaatgattctaacaggttggtgcagcagtcattaaaagtaatgacaaaaaaamacaaaagaaacggggaggagccggtgctgcagttcatgaatagtaatggcaaaacccgcgatgacttgtgccccaacctaacccagtaaccacgggtgtgcaaatgtggcgatgggcaagttccgagtgctaggagagcatctagcttcccggagtcaggagacgggggttggcaacctaaccaaggttaagtccaagtgaggggggtgggcagggagcgatatttcagtggagactccaaggatgaatggtatttagagagtaaaccccgatagagagggtgtgtgtctgg

SEQ ID NO: 749759 - DNA, 497 bp, Homo sapiens
gcaacagggaaggcatttctctatcagtcagtttgtaaatgattattgacaaacaatgtgctgggaaggtggagtgatttgagtagatttggcctctattctcatggagcttcctttctagaggggaaggcagatgatggatggataaatataaatgattctaacaggttggtgcagcagtcattaaaagtaatgacaaaaaaacacaaaagaaacggggaggagccgktgctgcagttcatgaatagtaatggcaaaacccgcgatgacttgtgccccaacctaacccagtaaccacgggtgtgcaaatgtggcgatgggcaagttccgagtgctaggagagcatctagcttcccggagtcaggagacgggggttggcaacctaaccaaggttaagtccaagtgaggggggtgggcagggagcgatatttcagtggagactccaaggatgaatggtatttagagagtaaaccccgatagagagggtgtgtgtctgg

SEQ ID NO: 749760 - DNA, 497 bp, Homo sapiens
gcaacagggaaggcatttctctatcagtcagtttgtaaatgattattgacaaacaatgtgctgggaaggtggagtgatttgagtagatttggcctctattctcatggagcttcctttctagaggggaaggcagatgatggatggataaatataaatgattctaacaggttggtgcagcagtcattaaaagtaatgacaaaaaaacacaaaagaaacggggaggagccggtgctgcagttcatkaatagtaatggcaaaacccgcgatgacttgtgccccaacctaacccagtaaccacgggtgtgcaaatgtggcgatgggcaagttccgagtgctaggagagcatctagcttcccggagtcaggagacgggggttggcaacctaaccaaggttaagtccaagtgaggggggtgggcagggagcgatatttcagtggagactccaaggatgaatggtatttagagagtaaaccccgatagagagggtgtgtgtctgg

SEQ ID NO: 749761 - DNA, 497 bp, Homo sapiens
gcaacagggaaggcatttctctatcagtcagtttgtaaatgattattgacaaacaatgtgctgggaaggtggagtgatttgagtagatttggcctctattctcatggagcttcctttctagaggggaaggcagatgatggatggataaatataaatgattctaacaggttggtgcagcagtcattaaaagtaatgacaaaaaaacacaaaagaaacggggaggagccggtgctgcagttcatgaatagtaatggcaaaacccgcgatgacttgtgcsccaacctaacccagtaaccacgggtgtgcaaatgtggcgatgggcaagttccgagtgctaggagagcatctagcttcccggagtcaggagacgggggttggcaacctaaccaaggttaagtccaagtgaggggggtgggcagggagcgatatttcagtggagactccaaggatgaatggtatttagagagtaaaccccgatagagagggtgtgtgtctgg

SEQ ID NO: 749762 - DNA, 626 bp, Homo sapiens
ttttgcttattcccacaattttagtaaagttagcacactgggaatcaagaaagtagagatttagattcctttactattcaattatcacatcattagactttaagcaccggctagcacaaataggaagaaaaacatttaactcaaagtatttttgtctattttaagaagggatcaatattttgatgtcaggttcaactttagttaatatggattaatacataataataccaagtttctctttgtaatgtacacttcatctggaaattgattttatcatttatttaaaatataagtatattcttggaattatttctggtggaatagcatctggaaactggtgtaaatgggtttctccacagaactgcttcatcacttgcggcggggcctgctgtttcttcagatgcacaggcagattacttcacacrgataaatgcaaagcagcattccttccaccatgtgccataacccctcttaaacgatatcttcttacacattgatttacatatcaatggtctttaaagaactatgaaatatatagtgctcttttcagttaatactccatatatccaaaacctgtcctatcgtatgtggaaaaaggtggccgctctgttaaaagtgcaatgctg

SEQ ID NO: 749763 - DNA, 575 bp, Homo sapiens
ctcagcccgatatgataattgtgaatgatcatatgtgtgggacccgagatattaccaggccaaaacaaaccaattttaagcaaacataaaattaagccatattttaaaaactgaaagcaacaattttagcatatattcctaatgggtgatcgaccagtgtctcagccrtcaggtttataatggcatcagaaagcaagttataacccagagaacttaaaatttcatctataaaactgttgggaatactacaatgattccttaaatatttacctatctttttgattttagcatttcttactaaaatcatttctctaattctcttccttttggataaaagcaaatttgcaagttgttaagtacagactagtaaaaatgcttttttgcatatggagaattactgttaaagttctcacttaatagttcctatacagtacttaggcctgaggaagaatatgctctaagttttcacaatgtaagaaagtaattcacattaaagaaacaaaactctatcatcaaagttttggaggacaatattcatattactttaataaaaatcactgaaacatttattttaa

SEQ ID NO: 749764 - DNA, 590 bp, Homo sapiens
attgttagtagagatggggttttgctacgttggccaggctgggcccaaactcatgtgatctgtctacctcggccttccaaagtgctgggattacaagcgtgagccaccctgctcagcccgatatgataattgtgaatgatcatatgtgtgggacccgagatattaccaggccaaaacaaaccaattttaagcaaacataaaattaagccatattttaaaaactgaaagcaacaattttagcatatattcctaatgggtgatcgaccagtgtctcagccatcaggtttataatggcatcagaaagcaagttataacccagagaacttaaaatttcatctataaaactgttgggaatactacaatgattccttaaatatttacctatctttttgattttagcatttcttactaaaatcatttctctaattctcttcctttyggataaaagcaaatttgcaagttgttaagtacagactagtaaaaatgcttttttgcatatggagaattactgttaaagttctcacttaatagttcctatacagtacttaggcctgaggaagaatatgctctaagttttcacaatgtaagaa

SEQ ID NO: 749765 - DNA, 643 bp, Homo sapiens
caccttcattttcattagttgcttccattctactgcagacagtttaaagacagtaagtcccatcttaaaacaaacaaaccttaacctttatattcatatttccacttctacggtcatgaacatctattcttaaatcacattcctcctcaatcytcccaaagaacactgaacctggtctcgtcaaagtcatcaacaacttgcacgttgtcattggatcggtggccacctctgtatcttcctctttctgggcttcttcaacagcatgtgttgcttttggaaacactttctcgtgtggcttcccagacatctgaactcttacctgcctggctgcttctttgcagtcccctcgtctctgctcaacctctaaaggttgagccatccaggtctgtaccaagcccctccttttgctgtttcctcacttcccaaaggcaacctcatccaggcctccagctttagatacctccttgcgtgctgatgattctcaaatccacgtcagggttaacaaaaccctatgcgacttgccctgacctccttgaaagagctcaggaagtatccttctcccactcatccactttgctcccctccctggccttctgttggttcttgaaagacttcaaggtgcagcctgggcaacgtggcaaaa

SEQ ID NO: 749766 - DNA, 611 bp, Homo sapiens
tgacaacaataccactgaagtgatgttgtgcccttcccaatgttttttgttgttgttgtttttgtttttgttttggagaaggggtctccatctgttgccctgcctggagtgcagtggcacaatctcagctcactgcaacctccgtctctcgggttcaagtgattctcckgcctcagcctcccgtgtagctgggaccacaggcacacaccaccacgcctggctaatttttgtatttttagtacagacagggttttgccatgttggccaggctggtcttgaactcctgacctcagatgatctgtctcccacctctgtctcccaaaaagctgggattacagatgtgagccaccgcacccggcccccagtgtattatatgagagggtacatgatgtcagtatgtctcattgctgttgatctaagttttggtcacttagataatgtggtgtctaccaggtttctccactgcaaagttactgttcttcccattagaattaataagtactttgtggggagatgctttaagactctgcaaacatcctgtttctcatcatacttttgcccattaattttagatactattgatgattcttacctgtaacagttattagtgt

SEQ ID NO: 749767 - DNA, 503 bp, Homo sapiens
cagatagggtaatgaaacaattttatgttaaaactttgggtttcggttccaataaatgttcttgaacatgctttgagtaaggtgaataaggtgtttgagaaagaaagctttgttcttgtctttatttataaaatattcacttttaatatcaggaactaaattgaaaatactcaaaagatgaaaagtaataatrataattgaagagtataaaatgtcacaagaaaaagtttttctactttttttgtgtaaatattatccaatatgttgtgggagaaaaaaggattacagaaacataataaatgtttagtctagtctttcaagaagagatataatacttaatgctctggtcggtgtatgggcttatagtcaggactcaggaagttatcaaataaaaaagctcaaaataagtaaggtgggaaaaatatgagagtagatgtaatatttggttcactgaaagactgtagcagggagtgattgcaaagaatctccaggtgtatcattat

SEQ ID NO: 749768 - DNA, 503 bp, Homo sapiens
cagatagggtaatgaaacaattttatgttaaaactttgggtttcggttccaataaatgttcttgaacatgctttgagtaaggtgaataaggtgtttgagaaagaaagctttgttcttgtctttatttataaaatattcacttttaatatcaggaactaaattgaaaatactcaaaagatgaaaagtaataataataattgaagagtataaaatgtcacaagaaaaagtttttctactttttttgtgtaaatattatccaatatgttgtgggagaaaaaaggattacagaaacrtaataaatgtttagtctagtctttcaagaagagatataatacttaatgctctggtcggtgtatgggcttatagtcaggactcaggaagttatcaaataaaaaagctcaaaataagtaaggtgggaaaaatatgagagtagatgtaatatttggttcactgaaagactgtagcagggagtgattgcaaagaatctccaggtgtatcattat

SEQ ID NO: 749769 - DNA, 503 bp, Homo sapiens
cagatagggtaatgaaacaattttatgttaaaactttgggtttcggttccaataaatgttcttgaacatgctttgagtaaggtgaataaggtgtttgagaaagaaagctttgttcttgtctttatttataaaatattcacttttaatatcaggaactaaattgaaaatactcaaaagatgaaaagtaataataataattgaagagtataaaatgtcacaagaaaaagtttttctactttttttgtgtaaatattatccaatatgttgtgggagaaaaaaggattacagaaacataataaatgtttagtctagtctttcaagaagagatataatacttaatsctctggtcggtgtatgggcttatagtcaggactcaggaagttatcaaataaaaaagctcaaaataagtaaggtgggaaaaatatgagagtagatgtaatatttggttcactgaaagactgtagcagggagtgattgcaaagaatctccaggtgtatcattat

SEQ ID NO: 749770 - DNA, 620 bp, Homo sapiens
atctttggagtagctatgatattgtgggggtgcagcatgagaggtagtttttaagcatatactttgtgtttactatttttttagttttatgttcccacttgaatagagaaagaagtggtctctgaaatacctcctcattaggcaggaarctttcttaggaatctattatttcttgataaagtttaagtgtagcctcaatattctcttttaactttctttgggagtgtaacgcacatatcaattggagaccctcctctgctccttggagacgaaaattaccttgagcctcttaatataatttatgagaaagcccaataatctgtctaggattgatgcaagttcctaggggtcttatgtattcatagccttctttacctctggggtttccgagtccacatgtgctgttctgctaccaatattaaccttgagagactccacaacatcaaaagaatagattttcctgaagatatcaatgatggagaacaatgggttttgtatcacaaacaattttaaatggaaacataagcctcctttttcttaaaaaaacattttcacatcctctgtactatgacttctttgaaaaattatcattttgcatagtattgtagtaaaatatacat

SEQ ID NO: 749771 - DNA, 579 bp, Homo sapiens
acaacaacaaaaaaacttcaggccaatatccctgataaacattgatacaaaaattctcaatacaacacaaaaaaggcctttgataaaattcaacaatccttcatgttaaaaagtctcaataaactaggtattgaaggaacataactcaacataataaragccactcaggacaaacccacggccaatattatattaaagcattcacctgaaaactgggacaagacacgaatgccctctctcacgattcctattcagcatagtgttggaagttctggccaaggcaatctggcaagagaaagaaataaacagtattcaaataggaagggaggaagtcaaattgtctttgcagatgacatgattgtgtatttagaaaacccaatcatctcaccccaaaagctctttgagctgataagcaacttcagccaagtctcaggatacaaaatcaatgtgcagaagtcacaagcattcctatacaccaacaacaggcaagcagaaggccaaatcatgaatgaactcccatcaaaattgctcatagagaataaaatatccaggaatagagctaacaaggcaagtgaaggg

SEQ ID NO: 749772 - DNA, 577 bp, Homo sapiens
aatgccattcaggacattggcatgggcaaagatttcatgataaaattgccaaaagcaatttcaacaaaaggcaaaattgacaaatggaatctaattaaactaaagaccttctgcacagcaaaataaactatcatcagagtgaacaggcaacctacagagttggagaaaaattttgcaatctatccatctgacgaaagtctaatatccagaatctacaaggaactcacacaaatttacaagaaaaaaaaacattaaaaagtggacaaaggatacaaacaggcattttttaaaagaagacattcatggagccaacaaacataygaaaaaaagctcaacatcactgatcattaggaaaaagcaaatcaaaaccacaatgaaataccattgcatgccagttagaatgaccattattaaaaagttaagaaacaacacatgctggtgatgttacagagaaatagaaatgcttttatactgttaatgggaatgtaaattagttcaaccattgtggaagacgatgtggcaattcgtcaaagatctagaaccagaaacagcatttgatgcagccatcccattactg

SEQ ID NO: 749773 - DNA, 643 bp, Homo sapiens
aggacctgaacaatgagaacacatcaacacagggaggggaacaacatatgctggggactatcagtgggtggagtggtgggagagagagtagtaggaaaaataactaatgcatgctgggcttaatacctagctgatgggttgataagtgcagtaaaccatcatggcacacatttaactatgtaacaaacctgcacatactgcacatgtaccccagaactaaaaataaaaattaaaaaggaaagaaaattaaaaaatcatacaccctactgtattttcaaaacttttaaattaaaaaataaagtttgtataacttagatccatatcttacactttgcatgagcataaatacaatatggataatatatgtgaaataaaattataaaaattcttgtaagaacacatattctctatagacttggggatgagatatgttttctagttttggctcaaaatactatagctgtaaaatatatgcttgatagtttttccraaaaagaagaaatagcatgaaaagaaaaataaagaggaagaagaggggcatagaaagaggaggacaaaaaagaaggagagaaaaaggaagaaagacaacataagtaaagtcaaggtaaaataaaaatctggggaaatatttaaaatttatata

SEQ ID NO: 749774 - DNA, 471 bp, Homo sapiens
tctgcctccagaaaggtctaaaatacaaacttgaccatgtcatatctctgcctaaaagacttgtgctaaatagtatacaaaactaaattctgaaaaaagtataattttgatatactgtaattacaccctctattactttgtagttcaatctttcattttgtagaaaattgttatgtgttagtccattcttgcattgctacaaagaagtacctaaatctgggtgatttataaggaaaagaaatttgattggctcatggttctgtggrctttataggaagcatggtgctggcatctgcttctggtgaagcatcaggaagcttccaatcatggcagaggtgaaggggagacagcatgtcacgtggatgaaccagagcaagagaaagagaaggggaaggtccctaactcctttaaacaaccagttctttggtgaactaagtgagcaagaactcactcatcaccaaggagatggtg

SEQ ID NO: 749775 - DNA, 637 bp, Homo sapiens
ttgagcattgttttgcagttctcattgtagagaactttcaccttcctgggtagctgtattcctagtttttttttttctttttgtaacaattgtgaatggtatggcctttctgatttggccttcggctgggctattgttgttggataggaatgctagtaatttttgcacattgcttatgtattctcaaactttgctgaagttaacttgtacagaatccaaaacctgtttgcaagtgataatattacttgaaacttttacaartttgacattactgtaattgttctggttatttttgtactggtttattgcttgggacattaagataaatgaactatgttcttttcttaattaaaattgccaaaattttagactttaaaagctttgtatcataaattattcagttttagaagtatatgatggaaactaatataatcaggataacataatcatatttattatacctcgaagactttcccctaggtttttatgatgttaaaacatttattgattaaattatagaaagttgagttgttatacagtcaaatatattttcacatatataccctggactatataagcttttaattgaataattttgataatatatacacaatatgttaaccacattggtacacat

SEQ ID NO: 749776 - DNA, 637 bp, Homo sapiens
ttgagcattgttttgcagttctcattgtagagaactttcaccttcctgggtagctgtattcctagtttttttttttctttttgtaacaattgtgaatggtatggcctttctgatttggccttcggctgggctattgttgttggataggaatgctagtaatttttgcacattgcttatgtattctcaaactttgctgaagttaacttgtacagaatccaaaacctgtttgcaagtgataatattacttgaaacttttacaagtttgacattactgtaattgttctggttatttttgtactggtttattgcttgggacattaagataaatgaactatgttcttttcttaattaaaattgccaaaattytagactttaaaagctttgtatcataaattattcagttttagaagtatatgatggaaactaatataatcaggataacataatcatatttattatacctcgaagactttcccctaggtttttatgatgttaaaacatttattgattaaattatagaaagttgagttgttatacagtcaaatatattttcacatatataccctggactatataagcttttaattgaataattttgataatatatacacaatatgttaaccacattggtacacat

SEQ ID NO: 749777 - DNA, 619 bp, Homo sapiens
gccttttttttttttaacctattccttagtttgttgaaatcaaaaatttcatggtgccacctctctcatcttccctgccttcattcaaaaacacattgttaagggttcatgggcagcatggcaaatcagattttaattacttaactgcttcatgtgatagtcttatcagtaacatgttcatgttctaatagagctttgatcaatttaataagcagtcacacttcataaggattaaatgtaagctttcctcccccaaaaattgttaccaacagtgccttgtcaaatccctttccatctgcagaaggtgctcccttagaagcatggcaatctgatttctagccttttgctagaaataaataccatgtttctagccatttgctagaaataaataccatatttctagccatttgctagaaataaataccataaataaataccataagactcccccaactttgcatccctccttgacactttwttttttaatttttaatttattgttatattttttttttggtggtgggtgtttgtctttttactttaagttctgggttacatgtgcagaatgtgcagttttgttacacgtgcccaggtggtttgctgcaaccatcaacccgtc

SEQ ID NO: 749778 - DNA, 537 bp, Homo sapiens
acctgcctggaaaccacatcctcatcaaaagatagaaagaagaaaaactcgaggcagcctaagaaccctaccttgtgctgctaaccaccgagactgccgttcgcacagcagaaaaggatagacacatcatacccaagtcaaaaaagcgtcatcaccatcaaagtyataggtcattgttccagggtcaagccctaccaagttaaagctaagaaaactttatctatcttttctttcctttaactactccccatcttattaatgtaactaaatctaactcacctcaaattattacttttaatgcctgttcagttatcactcctctcataccaaatgacaaaaccaaagtctttgtagtaaaagtaaaaaaatctaaagcaaaccacagcaattaaaacaagatatcaagatgtaaatgactagctaaaatacattaaatattctgtccgcactctaaataaaagcaattgttatgcttgtgcacacagtaggctagaagtccaagttatcccctttccactcagatagtcctctaatcga

SEQ ID NO: 749779 - DNA, 557 bp, Homo sapiens
ggaagctcgaactgggtggagcccaccacagctcaaggagacctgcctgcctctgtaggctccacctctgggggcagggcacaaacaaaaagacagcagtaacctctgcagacttaaatgtccctgtctgacagctttgaagagagcagtggttctcccagcacacagctggagatctgagaatgggcagactgcctcctcaagtgggtccctgacccctgacccccgagcagcctaactgggaggcaccccccagtaggggcagactgayacctcacatggccaggtactcctctgagacaaaacttccagaggaacgatcagacagcagcattcctggttcacgaaaatctgctgttctgtggccaccgctgctggtacccaggaaaacagggtctggtctctagcaaactccaacagacctgcagctgagggtcctgtctgttagaaggaaaactaacaaacagaaaggacatccacaccaaaaacccatctgtacgtcaccatcatcaaagaccaaatgtagataaaaccacaaagatggggaaaaaacagag

SEQ ID NO: 749780 - DNA, 581 bp, Homo sapiens
taataaagataaaataacaaataaaaataaaaatggaagatttcaccatgtgtcatttaacaaggtgagaagaaaatgggttgctctaggatatgcttcaatgtgaaagggcatatgtcatmgattggagactgaaaagttaattccacatggaaaacagaaagatttgtttataataatacaactcaaaatgatttaaaatttttcatatgacacaccagaataagaacattgctaatacattggaaactcaccaaccattgaatgtggtgccatttgtccatttccaagaatctccttgtttcctgcttagtccaatccagtgcatatcagttcctgcgtacctcttcaaaaattcctttcacaaaacaaagggaatcagcgattacttaatatgttacagcacattgctgaacatgcttcccaccccaattattctatcttttaggattcacattctaatttgtcttccctgatgcttctataacaacaaacagcacagatgttgatgtttgggttagttttatcagaaagattttcattttgcttttttgcatcttaagtatctccagataattggg

SEQ ID NO: 749781 - DNA, 504 bp, Homo sapiens
cattagagttatacagccaaggtgtttgatcctaggtctggaatgtattatttgtgagaggcaacttactcattctgtcctgtatattttttatctgtaaatggattttcttatacctgtatcctagtctaatgaggattaaatmcaaatagcagagcatagtgtatttaacattagctcactaattcacaaactctaaaaaagaaaattatctgtaacaagcccatagaactgatgtttatgtgggatttttttttataaatatagaaattgatcctcctagttttaaaacttgaaacttacatttgtcttatttgagttcattctttaggaatctgacctttagtcctctcagatagtaacaggaaaccgaaagtcaccagatcaccacttccagacaagggactcctcactgccatgattgtctaaccgaccacctgctccctgttgaccaactcttcttccctacccctccctaattcgggaatagtcattgtctccggg

SEQ ID NO: 749782 - DNA, 565 bp, Homo sapiens
tggagacatactcagtttcagggaactgttaaagttacaagcaaattggacaacttgctttctcgtattctgatcattagtgtaccttcaaatgagggtgaagtatgtattattaatccactaccactatttatgacacacccacacattgctgagtgctgcctgaatatcattaatttatgtaaaaggtgggttgttgaaggcataagtagaaatttttttaatgaaattgtaggaccagaaagtcatgaaaatattttggttatttcctaaagtatggtagaactaccactggagactacaggaaatgatcttcagtggcatatgayatgattttagttagtacctggataagacattaaataacattacctcctaaatggtgttccctggttatgttaagcaggaagtttcagattgatattagttttttttttttttttgtaccacttctggaatgcttgttaatctctattttcaccaaaatgagagagaacatcatctagctaggatctaatgtaattgtttaatttatatttctatgaatgtgttttatttgtggcag

SEQ ID NO: 749783 - DNA, 565 bp, Homo sapiens
tggagacatactcagtttcagggaactgttaaagttacaagcaaattggacaacttgctttctcgtattctgatcattagtgtaccttcaaatgagggtgaagtatgtattattaatccactaccactatttatgacacacccacacattgctgagtgctgcctgaatatcattaatttatgtaaaaggtgggttgttgaaggcataagtagaaatttttttaatgaaattgtaggaccagaaagtcatgaaaatattttggttatttcctaaagtatggtagaactaccactggagactacaggaaatgatcttcagtggcatatgatatgattttagttagtacctggataagacattaaataacattacctcctaaatggtgttccctggttatgttaagcaggaagtttcagattgwtattagttttttttttttttttgtaccacttctggaatgcttgttaatctctattttcaccaaaatgagagagaacatcatctagctaggatctaatgtaattgtttaatttatatttctatgaatgtgttttatttgtggcag

SEQ ID NO: 749784 - DNA, 621 bp, Homo sapiens
gaatggaattttaaaattccagataaaatctggaaataaacccatgtgtctgtgtgcatatagtcaacttattttcaagataattcaataaaggtgtgccttttcaataaatatgaactggaacaactgtaaaaaataaacttcaaactttatttcacataatatacaaaaattaacttgaaatagatcacaattttgaacataaaagtaaaaaatataaaacttctagaagaaaataggygaaaatttttgtaatctgaggaaggcaaagattttttagagaggacacaaaaagcacaaatcgtaaaagaaacttctttgtcccttaaagttaggcaacatggcaatttgacttaccttggccaaagaaataagaatggaagtagcatgtgcccattctgtgtttaattgccagtgctgacatgaccaggaagttctgggtaatgaagtctccattagcctgaatctctgggtaaagcaatggaaaacaaagtgccactaacttgcaaagcgaatgtgacctgtgtgtaaatgaaacccctttgtcatttgcttatttgtcttaagccaatcctattttgggggtgttgtttgctatgaccacataaccaaacgtatctt

SEQ ID NO: 749785 - DNA, 621 bp, Homo sapiens
gaatggaattttaaaattccagataaaatctggaaataaacccatgtgtctgtgtgcatatagtcaacttattttcaagataattcaataaaggtgtgccttttcaataaatatgaactggaacaactgtaaaaaataaacttcaaactttatttcacataatatacaaaaattaacttgaaatagatcacaattttgaacataaaagtaaaaaatataaaacttctagaagaaaataggtgaaaatttttgtaatctgaggaaggcaaagattttttagagaggacacaaaaagcacaaatcgtaaaagaaacttctttgtcccttaaagttaggcaacatggcartttgacttaccttggccaaagaaataagaatggaagtagcatgtgcccattctgtgtttaattgccagtgctgacatgaccaggaagttctgggtaatgaagtctccattagcctgaatctctgggtaaagcaatggaaaacaaagtgccactaacttgcaaagcgaatgtgacctgtgtgtaaatgaaacccctttgtcatttgcttatttgtcttaagccaatcctattttgggggtgttgtttgctatgaccacataaccaaacgtatctt

SEQ ID NO: 749786 - DNA, 478 bp, Homo sapiens
aaggcaaagaaaaacctcctgcagtgtgattgcttctcctatcagagtcccatctcgaaaacctgaaartcaaacctgataaatgatgtagacatatcaagaaaagccaagaggacagaatcaagctatactggaggaaaacgttgcttctctagaattttaaaataaatatttcagcatcagaccatgacagcagttaaggcaagagggaaaaaaaagatacaagaactgacaaagttgaaggagatagtttcatttcaggttccttcaaggggagacaagctgacagcaacaaaacacaagaaagctgcactttggagatatagatctgagaagtattcaaaaagtaacagattatagagtcaaaatcaaaacctctcatccaatcaatattttaagaaaaccttgttctaacccaggggactaatctatatctctctcccctagttactggatcctttctaccctgtttcataaa

SEQ ID NO: 749787 - DNA, 579 bp, Homo sapiens
gcacctcttgcgtatagcaaaatacagccagcctcctgtggctgtccacctctgtattgtttgctgggaatcaatcctgaagacttagtcttctgatcaacaatgattttgtaaacatcaaatttcctgttaaatcacttcctctgtaaaatgctaacatagtttctgttatcttcaacagaaaattaatataaggggccatggcagaagctgtaaataagtgactaggacctcatggctacatattaaatacttaagaatgttttttcacttttataaaataatatggtccctactacttttttgaaatcaagtgtattcttgacctgtcttttgtttctcctctttaatagacatattttagaactatttctcaactatggagataagaaataccatgcaagcctggtactaaatgacatstgacaactggcctcattttgggtcatgtgcggggcatggcatgtgttgtggaaactcataatgggactctgagatacttcgacactagaggatcaagacagcagaagaggaaaaaggcaagctgaccagaaagccatgtcccagactatatcacac

SEQ ID NO: 749788 - DNA, 606 bp, Homo sapiens
tcctctttagaaaactgacaatactgacaatgtaactaaaatgcatgcataatatctcactatccatcttaagtatttcaatacaataaaaagtgttcagtacaaattttggcttatttaaaaattatcataatggaaatgtgaaaaacattgagtaaccctgagtatcaacagaccgtcattgaattgtagcagttaatttaagcagaaagtcatcttcattacatagctatgagacaaaacctggatttgctttgctgtcatttttgaattttagtaagctkcttctttcattctctgtcatttgccagcaagtagttcaaaatgttatagtttattgaggtggatttttctacagattattggcttcttgagttttgtattgaatatttttttttaattttcaacttggcactatcctcctagaatttcttttctactgacattcaacttattggagaaaatgagaaatgtgcaatggtgttgaaaatactttttaatttagctgttcttatactatgcttagttaagtgctatgtgcttcaaaatcatcatttattcctcaatcatctctttaaatcagtatattttccttcctatgatagc

SEQ ID NO: 749789 - DNA, 615 bp, Homo sapiens
aatctgctctgtcactttcaaaaactgaaacatcatatccatttctagagcaacaggtgcttggagttccccctctgtaggggtgagtgaagtattggcctcgggcccttcatggtctctccacagatctttgtccagatcaacgaatacatttttccaagtggctgcctgtgttgaaaataatgttcaaaaaggatagygtattccctaacagctgcttcagataataaaatgatgacattttattggtgcatttccttctctaatgtgcttctgcacacatcatctcatatgatgacagcctagaaacttccgacagcagcaacatatcatagagcgattttgtacctcatcctctcaaccacatttgctttcaaacagcaacaagaaactgtaccaagaaaatcaaacagttgggcctggcttgagtaggcagtgagatagtgaggcaggagactaggatctggaggcagggaacctaaggctgcttcacgccaacttcctagaactaaattgcaaggaaaaccctaactttccacgcctaagtcacaaaaggccagaggctactccctttgcaagccctccactttttctgcatggcagatgggaaattgg

SEQ ID NO: 749790 - DNA, 642 bp, Homo sapiens
aacattctttttgtagattcttccaagtgacattactgagccgaatgggacctattaggaaaaaatgaatatccagccctaaaaacaagaaacaaactatctgtgaaaatgcttttggatgtgctgtttcctatcacagaatgaaacctgtttttgattcaccagattccgaacactttttgtagaatctgygaagtgacatttctgagcccattgaggccttatgggaaaaaatgaatatccaggtctaagaaacagatacaaactatctgtgaatatgctttgtgatttgctgtttcatattacagaatggaacacgtgttttgaatcaacatgttccatccctttgtagaatctacgaagtgacattcctgagcccattgaggcctattaggaaaaaaaaaatatccagccctaaaaactggaaacaagctatcagtgaaaactctttgtgatttgctgttttatatcacagaatggaggttacactttgattgaacaggttccaaacactctttttgtggaatctacgaagtgacatttctgagcccatggaggctttataggaacaaacgaatgtccagccctaaaaactagaaacaagctatctgtgaaaacggcttgtgatgtgctgttttatat

SEQ ID NO: 749791 - DNA, 543 bp, Homo sapiens
aaacagatacaaactatctgtgaatatgctttgtgatttgctgtttcatattacagaatggaacacgtgttttgaatcaacatgttccatccctytgtagaatctacgaagtgacattcctgagcccattgaggcctattaggaaaaaaaaaatatccagccctaaaaactggaaacaagctatcagtgaaaactctttgtgatttgctgttttatatcacagaatggaggttacactttgattgaacaggttccaaacactctttttgtggaatctacgaagtgacatttctgagcccatggaggctttataggaacaaacgaatgtccagccctaaaaactagaaacaagctatctgtgaaaacggcttgtgatgtgctgttttatatcacagaatggagcttgtgttttcattcaccaggtcccaaacctgctttttgtagaatctatgaagtgacatttctgaacccattgaagcctacaaagaaaaaaatgaatatccagtcctaaatactagaaacaagctctctgtgaaaatgctt

SEQ ID NO: 749792 - DNA, 543 bp, Homo sapiens
aaacagatacaaactatctgtgaatatgctttgtgatttgctgtttcatattacagaatggaacacgtgttttgaatcaacatgttccatccctttgtagaatctacgaagtgacattcctgagcccattgaggcctattaggaaaaaaaaaatatccagccctaaaaactggaaacaagctatcagtgaaaactctttgtgatttgctgttttatatcacagaatggaggttacactttgattgaacaggttccaaacactctttttgtggaatctacgaagtgacatttctgagcccatrgaggctttataggaacaaacgaatgtccagccctaaaaactagaaacaagctatctgtgaaaacggcttgtgatgtgctgttttatatcacagaatggagcttgtgttttcattcaccaggtcccaaacctgctttttgtagaatctatgaagtgacatttctgaacccattgaagcctacaaagaaaaaaatgaatatccagtcctaaatactagaaacaagctctctgtgaaaatgctt

SEQ ID NO: 749793 - DNA, 633 bp, Homo sapiens
acaaacaaacaaaaaaaagctcctcaagtacaaggacttcgtcctgtagccttctaaaagttgttcaactcaagaactaaaaaggaggccaggtgcggcatctcacccatcattctgagaggctgaggtgggaggactgcttaaagccaggagctcragactagcttgggcaaaaaaacaagactcttgtctctacaaaaaaattaaaataaattaaaaaaaattagccaggcatagtggtgcatgtctgtagtcccagctacctgggaggctaaagtgaaaggatcacttgtgcccaggaggtggaggttacagtgagctatggttgtgccactgcatgccagcttgggtggcagaatgagaccctgtctctaaaaataaaaatttaaaaaaaaaaaagaaaaagaaaaagaaaaaaaggccaggcatggtggctcacacctgtaataccaacactttgaaaaactgaggcaggagaaccacttgaggccaggcgttggataccaaccagggcaacatagcaagactccatctttccaaatatataaataaataaaattaggcaagcatggtggaccatgcctgtagtcctagtcactcaggaggctgaggcaggaggatcacctgagtcca

SEQ ID NO: 749794 - DNA, 633 bp, Homo sapiens
atgcagcaggacaggggagcttcgtcagaaaccaacatcaagaaagaccctcccggccgggcgcggtggctcacgcctgtaatcccagcactttgggaggccgaggcgggtggatcacgaggtcaggagatcgagaccatcccggctaaaacggtgaaaccccgtctctactaaaaatacaaaaaattagccgggcgtagtggcgggcgcctgtagtcccagctacttgggaggctgaggcaggagaatggcgtgaacccgggaggcggagcttgcagtgagccgagatcctgccactgcactccagcctgggcgacagagcgagactccgtctcaaaaaaaaaaaaaaaaagaaagaccctcccgcaagactggttcattcactcccatttaataggtgcctatatggtgccatgccaggcactgaacatacagtggtgagcaagacagacaccatctctgctccctcagggcttacrgttaacagttaaacaagtaatcacaacgcatcagcctggtcaggcttcatatccaacattacagcctggttctccaccactcaaggccatttcccccttatcaaaaactcttataaatatcagtataaaattatgactcatttttttctcattt

SEQ ID NO: 749795 - DNA, 622 bp, Homo sapiens
ggatcttgaaaaaaatctaaaatcaataaaaacactcattatgtagaaaataaggcataagaatattccttgtttgttttaaagaaaaggtctatggcaaggggcattgtggtactaggactgaaaactaaagccaccacataatgggacaaccattacccactctattaccttcagcatttgaaatttgtttggttgatttctttccagctcatttaatctcatttacatgttttaccaagacccattttatcccaccatttaattctttgcccaacctatgctgtttcaactactcttctctctttgtgcttcctgtaaacctcaacaaatgactaaacttgactctayaagctagattatttggcccaaaccctacccattctataaccaaaaataagtgagtctgcctccttgaactttctagctgctcactttcagacacactaactgtcctggaaaaaaagtacactttctagtcatgagatctcttataattggtgtattatcctatttcagaggtcggaagattattttaatctctctgactgcagtagaccttgtatgtacagtgtcctttggatgtgatactacatgcctgcttccagagatgtgacttttc

SEQ ID NO: 749796 - DNA, 585 bp, Homo sapiens
tgcaggtagagaataaggctattgtggctgcttcagagttgcattgaccatatgtccataaattttctagaagggagagattttaaatagctttcctgttgtatccctaaatcttttaatgtcttagaaattccaatagatctgcatctagattgtgtctcttargcagcctcttacatgcagaagtagcacagagatccattttttttttaggctatggtcccagtatctggttcaaaaaatgtggcatgcataattatgaagtcccaggaatctgattgtaaggtgctgcgtgtggctaccaagggcagtgagctgggtgtgaagacacagtcctgactgtgggccatttctggtgtcgttggggaaatgacataagcttgtgggaagcagagcagcagtgctgctgtgcagtgccaagtacagacagcacctcaaggcagcaccactgtccagagaaatcaacgcgctaagagtctgggaggcctccctgcacgtctcttctgtggatttagggacttctgttaccatttcccagcggccattttttaatcctcagagcacttgatttgaaggcctgtcctc

SEQ ID NO: 749797 - DNA, 600 bp, Homo sapiens
atgtatacgttagaaacggaaggagacattgttagggaattaaggattcaattaaaaaggtataaataaaatagcagagtaaacccaaatacagtagagggaaggaataatacaaaaatattaccaaaaatgaaatagaatacaaagaaacagtagagaagatcaaccgagcaaaaaatgattattttaaagactaaaacagcacattctcacttgtcaaacttgatcaactacaaagagagaagaacaaagagagagagagagagagaaatacaaacagtattagaaatgaaaaatgggagctaaatatagagacaattgaaaatagaaggtcaaaagaatataccatgaataacttctttatggccatactcttgaaaatataccttctaattaacagggataccctatgtatatatatcyatgatatacacattgtaagctagtgtcatgactagagattgagaaacataatgaccaggttaagtctggcttctgagaatgaaaattcattcattcactcaattaatatttgtggatacctactgtatacttttaattatgctggtgctaacatatttttatgaatgagagagacat

SEQ ID NO: 749798 - DNA, 600 bp, Homo sapiens
atgtatacgttagaaacggaaggagacattgttagggaattaaggattcaattaaaaaggtataaataaaatagcagagtaaacccaaatacagtagagggaaggaataatacaaaaatattaccaaaaatgaaatagaatacaaagaaacagtagagaagatcaaccgagcaaaaaatgattattttaaagactaaaacagcacattctcacttgtcaaacttgatcaactacaaagagagaagaacaaagagagagagagagagagaaatacaaacagtattagaaatgaaaaatgggagctaaatatagagacaattgaaaatagaaggtcaaaagaatataccatgaataacttctttatggccatactcttgaaaatataccttctaattaacagggataccctatgtatatatatccatgatwtacacattgtaagctagtgtcatgactagagattgagaaacataatgaccaggttaagtctggcttctgagaatgaaaattcattcattcactcaattaatatttgtggatacctactgtatacttttaattatgctggtgctaacatatttttatgaatgagagagacat

SEQ ID NO: 749799 - DNA, 554 bp, Homo sapiens
aaataaaaaataaagaaatcactaacttcaacttttgcaacttttatattgcaaaggcaatttctttctcctgaaggtgggtacctcctagacatcatatatctttacccaaaagagtttttgaggattttctgtgagtcccaaggggcacaaatgtgaaggtcaaagataatgggtccccatctgacactgggctgatttgccaagcacccaggatgcatttttatttctttttcatggtaaaagccagagagaacactgtagagtttaaacacggtttctttatctggtgcccgcatggggagatgaaggtaaagaggccaatttatccagcaaatgtgcccaagcaagtcgggaataaytacctcccttgacatctgacaaaactttgctgcatccccacaaaaattctataggcagtccttccaagtcattttcagagaccccaccatggcaggtgagcttatttatttatttctattttgagagatccacctttctagactctcttttaaggtttgcctcctgtgtaatgaatggagatcagtgggtat

SEQ ID NO: 749800 - DNA, 575 bp, Homo sapiens
aaaagttttaaagaataaactgcagttagtatgcttcatgaaatcctactctttaactctatgtttaagaattgaggactgtggccaggtgcggtggttcacgcttgtaatcccagcactttgggaagccaaggcgggcggatcacctgaggtcgcgagttcragaccagcctgaccaacatggagaaaccctgtctctactaaaaatacaaaattagccgggcgaggtggcatatgcctgtaatcccagctacttgggaggttgaggcaggagaattgcttgaacccaggaggcagaggttgcggtgagccgagatcacaccattgcactctagcctggacaacaaaagcgaaactccatctcaaaaaaaaaaataaaaaagaattgagcactgtaaggaaggacaattttatggagcatatgattgttgagtcctccactaatagtaacagaatcccccaaacgcaactaccagccatagttaaatggcaactcatgtttaaatgaaagcacatattcaattttaataagtctgtaccttggtataatgctttgcttctcagtttgcaaaatt

SEQ ID NO: 749801 - DNA, 575 bp, Homo sapiens
aaaagttttaaagaataaactgcagttagtatgcttcatgaaatcctactctttaactctatgtttaagaattgaggactgtggccaggtgcggtggttcacgcttgtaatcccagcactttgggaagccaaggcgggcggatcacctgaggtcgcgagttcaagaccagcctgaccaacatggagaaaccctgtctctactaaaaatacaaaattagccgggygaggtggcatatgcctgtaatcccagctacttgggaggttgaggcaggagaattgcttgaacccaggaggcagaggttgcggtgagccgagatcacaccattgcactctagcctggacaacaaaagcgaaactccatctcaaaaaaaaaaataaaaaagaattgagcactgtaaggaaggacaattttatggagcatatgattgttgagtcctccactaatagtaacagaatcccccaaacgcaactaccagccatagttaaatggcaactcatgtttaaatgaaagcacatattcaattttaataagtctgtaccttggtataatgctttgcttctcagtttgcaaaatt

SEQ ID NO: 749802 - DNA, 621 bp, Homo sapiens
ctgacctgcaaatgcttaaggagaataatagctactttgcaacctgaaaggcctcaaagacctaggtcaatagcacagctggtctagtcattgttgcccctctattaacatgttaaaacctgaattagctaatttctccctattacttttatatggttttttatgttctcaagtaccaggaaagagacactctgctttttaaatttttaattttttacacaaagrcaatttttaatttttaagtgaaaaacaatgctgtgaacagaacttaaaaattcatggtcatgggaagttcaacttaaaaaaaattttaacatacaaaaaagcatatgaagaaagtaaaaagaaagtaatcacttacccagtttgtttatttttcttacctagtttgttttcagtttagaacagcatatgcatggaaaacacattccccacggggcaattctttattcttaatgattaaagtctgtaagtgcctaaaccaatggcttttggtaattagtggctttaaactctaaaactggcttctatcgtctgaatgcaatggtggaggagtagagggaggggtggaagaaaattatttattttggttaagacctatcctgactaggatcttctgat

SEQ ID NO: 749803 - DNA, 621 bp, Homo sapiens
ctgacctgcaaatgcttaaggagaataatagctactttgcaacctgaaaggcctcaaagacctaggtcaatagcacagctggtctagtcattgttgcccctctattaacatgttaaaacctgaattagctaatttctccctattacttttatatggttttttatgttctcaagtaccaggaaagagacactctgctttttaaatttttaattttttacacaaaggcaatttttaatttttaagtgaaaaacaatgctgtgaacagaacttaaaaattcatggtcatgggaagttcaacttaaaaaaaattttaacatacaaaaaagcatatgaagaaagtaaaaagaaagtaatcacttacccrgtttgtttatttttcttacctagtttgttttcagtttagaacagcatatgcatggaaaacacattccccacggggcaattctttattcttaatgattaaagtctgtaagtgcctaaaccaatggcttttggtaattagtggctttaaactctaaaactggcttctatcgtctgaatgcaatggtggaggagtagagggaggggtggaagaaaattatttattttggttaagacctatcctgactaggatcttctgat

SEQ ID NO: 749804 - DNA, 609 bp, Homo sapiens
gcttttaccacacagctttgagtatacgacgccaatcttacaactttgattctcattaataaaaaagaattttgaaccaccactacacagacactgccaactgtctcctaaaccacttaatacaatgatctccatgtaacaagcaatgatatatttttaaaaaatggaattaatttacccattttaacacatttttaaaattatttttgagacggagtctygctctgttgccaggctggagtgcaatggcgcgatcttggctcactgcaatctctgcctccagggttcaagcgattctcctgcctcagcctccgaagtagctgggactatgggcacacaccaccatgcccggctaatttttgtatttttagtagagatggggtttcaccatgttggccaggatggtctcgatctcctgaccttgtgatccgcccacttcacatatttacatatgctttagtcatggagaatttcaatagagagatccatttacctcacatcagaaaaataaaaattcacattagttatcgttttcatggtggaatctaaaatatgctcaatccattttagtgtgaagaaatgaaaactaattgttgctgaacaatataa

SEQ ID NO: 749805 - DNA, 609 bp, Homo sapiens
gcttttaccacacagctttgagtatacgacgccaatcttacaactttgattctcattaataaaaaagaattttgaaccaccactacacagacactgccaactgtctcctaaaccacttaatacaatgatctccatgtaacaagcaatgatatatttttaaaaaatggaattaatttacccattttaacacatttttaaaattatttttgagacggagtcttgctctgttgccaggctggagtgcaatggcgygatcttggctcactgcaatctctgcctccagggttcaagcgattctcctgcctcagcctccgaagtagctgggactatgggcacacaccaccatgcccggctaatttttgtatttttagtagagatggggtttcaccatgttggccaggatggtctcgatctcctgaccttgtgatccgcccacttcacatatttacatatgctttagtcatggagaatttcaatagagagatccatttacctcacatcagaaaaataaaaattcacattagttatcgttttcatggtggaatctaaaatatgctcaatccattttagtgtgaagaaatgaaaactaattgttgctgaacaatataa

SEQ ID NO: 749806 - DNA, 609 bp, Homo sapiens
gcttttaccacacagctttgagtatacgacgccaatcttacaactttgattctcattaataaaaaagaattttgaaccaccactacacagacactgccaactgtctcctaaaccacttaatacaatgatctccatgtaacaagcaatgatatatttttaaaaaatggaattaatttacccattttaacacatttttaaaattatttttgagacggagtcttgctctgttgccaggctggagtgcaatggcgcgatcttggctcactgcaatctctgcctccagggttcaagcgattctcctgcctcagcctccgaagtagctgggactatgggcacacaccaccatgcccggctaatttttgtatttttagtagagatggggtttcaccatgttggccaggatggtctcgatctcctgaccttgtgatccgcccacttcacatrtttacatatgctttagtcatggagaatttcaatagagagatccatttacctcacatcagaaaaataaaaattcacattagttatcgttttcatggtggaatctaaaatatgctcaatccattttagtgtgaagaaatgaaaactaattgttgctgaacaatataa

SEQ ID NO: 749807 - DNA, 639 bp, Homo sapiens
attttgaggaatcaggaacatggaaatcatagtcaccatgatgtctaccagcattaagtggaagcatagaagatgaagggatgattgaaagaaatactcttaaaaagaccgggaccttctcggtccctgctcagcattatttctcctctatgtcttatgcccctctgaatggggcggggggaataatgatgtcataggagtagacttttacacttgggaagttttagctgaattaaatcttgtttttttaaaaaattttcatttccttcccattgttttgctgccctatgtgaagtacaacccatgaaacgcatggaatttgttcatgtatgtttatatcagaaataacttttatagctgaagagacaggtgtgacatgctcaaggtttcacatccagttcatatcagaaccagaccagaatctcaactacttgtccactgttcttttatctgttctttcctgttgtctgcctcygcccatttgcaaagatcatcaggactgggagaagagagattgtcagttactttggtggaagttgctgcacttcatttctcgttcttccctattcccttttctggcaggtcagcaggatagaagaaatgacctcagtcatcccatccatgctgacaactgtttgt

SEQ ID NO: 749808 - DNA, 660 bp, Homo sapiens
agaattagaaaagcaagagcacacagaacccaaaattagtagagagaaaaaataataaagagcagaacagaaataaatgaaattgaaatgaagaaaacaacccaaaagatcaacaaaatgaaaagttggctttttgaaaagataaaatygacaaattgttagtcaaactaataaaaaaaagagaagtcccaaataaataaaatcagcaatgaaaaagagacattaaaaccactgcttcagaaattcaagggattgttagaggctgttatgggcagctatataccaataaattggaaaacctaaaggaaatggataaatgcctagacacatattacctaccaagattaaaccatgaagaaatccaaaaccttaacagaccaataacaagtaacaaaatggaagccataataacaaatctcccagcaaataaaagcctggggccctatggcttcactgctgaattttaagaaacatttaacgaagatacaataccaattctactcaaactaatctgagaaatagaagaggagggagtactttcaaattcattctacaaggtcagtattactctgataccaaaacttagcaaagacacatcaaaaaagaaaactatttcacattgcagtatccctgataaactctgatgcaaaaatcctgaag

SEQ ID NO: 749809 - DNA, 660 bp, Homo sapiens
agaattagaaaagcaagagcacacagaacccaaaattagtagagagaaaaaataataaagagcagaacagaaataaatgaaattgaaatgaagaaaacaacccaaaagatcaacaaaatgaaaagttggctttttgaaaagataaaatcgacaaattgttagtcaaactaataaaaaaaagagaagtcccaaataaataaaatcagcaatgaaaaagagacattaaaaccactgcttcagaaattcaagggattgttagaggctgttatgggcagctatataccaataaattggaaaacctaaaggaaatggataaatgcctagacacatattacctaccaagattaaaccatgaagaaatccaaaaccttaacagaccaataacaagtaacaaaatggaagccataataacaaatctcccagcaaataaaagcctggggccctatggcttcactgctgaattttaagaaacatttaacgaagatacaataccaattctactcaaactaatctgaraaatagaagaggagggagtactttcaaattcattctacaaggtcagtattactctgataccaaaacttagcaaagacacatcaaaaaagaaaactatttcacattgcagtatccctgataaactctgatgcaaaaatcctgaag

SEQ ID NO: 749810 - DNA, 647 bp, Homo sapiens
tctaggctttataaaaagtgtttagctttatatacatatttagaccttttcagggatgtcattttttctgagttttaaggtgtctgttgaagttggaaaccaattttaactatgttaatttaagacattaaaaagttataattaaattagttcattatttttgggaattgatcttgttttttggattttaagttatatagtctttttctacatagttattggctactggactgagagtgtgctgaaaaacctgaccccttgatgaagtcaacttsttagctgtttgcagaaatgacgtatagacatttattgtagctcttttgctattctttccagaaaactccattctcatctgcactttgtaccagggtttttgttagtaggtaaaataaaagcaaaaaaatgattcatttctgtttcattggtctatatgtctgtttttatgacagttttggttactgtagctctgtagcataatttaaagccaggtcacatgattcctctagttttgttctttttgcttaggataactttgactatcctgggtcttttgcatttccatataaattttaggattgtatttgtatttctgtgaagcatgtcataggtattttgaatagagattgaatctctagactattttgggg

SEQ ID NO: 749811 - DNA, 601 bp, Homo sapiens
gttcattcaactttcacaaagaggattctgtttttctcctctagtcattctcccggaatactgttttttattctccttatatcagtaacagaataagaaggggtaggaagaaaacatagcaaaggcagagattataaaaaaacgaaaggaaaatgttggctgtgacagatatgttaatacctttattattgtgatggttctgtagttgtacacatatgttaaaacatatcagattgtgcaccttaaatattgctgtacattttatgaaaagtgtacctttataaagctgttaaaatattatttgtaataacacaggaagtcaaaaatctaatttggtaattttagtagaagttactctactaaaatttagttactctatctagaagtgcttagtctttatgaatatttcacattattaaaacaaayagatagctttttcagatttatttattcctctacttttaactcttgtgtaatattataagagacatcttctctgaccctatcttctattatccagacttaacacattatttgcagattcttcaaatatcctacttgctgtccatgtctccaacatgtctctatgctttgaaatatg

SEQ ID NO: 749812 - DNA, 516 bp, Homo sapiens
tggagtttcccttttctgaaatgccatgtggttggtgatcacacagtatgtagccttttcagactggtttcttttacttagaaatatgcatttaaagtccctctatgtttttcatggcttgatagtttatttattgttattattaaataatattccattgtatgcctgcactacagcttactcacctattaaaggacatatttgttgcttgtaatttttggtgattatgaatatagctgctataaacattcatgtgaaggtttttatgtgtacataagccttcaactaaattgagtaaataaaattgytggcttttgtggctaggctaagtatagctctctaagaaactaccaaaatgtcttccaaaatagctgtaccattttgcattccaaccagcaattaatgagttcctaactacacatcttcatcagcttttgttattatcattttttagccattataataagtgtgttgtggtatcttgttgtattaatttgaaattccaaagagatgtat

SEQ ID NO: 749813 - DNA, 387 bp, Homo sapiens
atttgctttcttttccccacccatgcctccatgtcttggctttgtcttcctctccacaagctgttgtccatagtaccagaccctgctctaacaactaggaagacagcaattctttcccatggactctaaccaaagtcccgggactagatctcaggggccaggcttgagtctcacgttcatccctaatcaccaggccayggggtgaagtgctctgagaaccccaggctggtccaggtggtggacccctccagagctggggtggcctgggagcaggggcagcttagctctatgggaatcgcactgagtaggggaggggtggctccctaaaggaaaagcaaagcatcgtttccagagcagagctacaggggccaaaactgcaggtgtcac

SEQ ID NO: 749814 - DNA, 557 bp, Homo sapiens
gaatagcacatatataccagctgctacggtttcaatatcccctctaaaacttgtgttgaaatttaatccccaatgcggcagtactgagaggtggagcctttaagaggtgattggatcatgcagtctctgccttcatgaatggattaatccatttgtggattaatggattaatgggctaagggattaatgtgttctcgtgagagtgggactagtagaggaagtgcggcctgagatsgcatgctcaacccccttgccacgtgaggccctgcaggactctgcagagtgtccgctgcagcaagaaggcccttaccagatgcggcccctccacctcggatttttcagcctccagaactatggaaacaaattcatctttttaaattgcccagcttcaggtattctatttataagcagcagaaaatcgacaaggacaccacctctttcatataaaagaatggaggagcagtcactgggcacaggagacagggagggatgagggctcttgcctgtctatacacataatctagtcaacaaattaagagaaagcggatttggttgct

SEQ ID NO: 749815 - DNA, 591 bp, Homo sapiens
tttcagtgttcctaactggcacgacacatcatccaaaccacaaggaagacttctcagttatggaatcatgcagtacatggcatatgagggtggctcctctgtgcttctaaggttccagtggtggagaaacctctgrcagctaaagcctggagccctctgaccatttgcacagcagcctggctcaggggagcaggtccaggctgagagtcagacagggcttggtgtccctgcagcagctccttcggctctctgggcctcagtcttcctcatctataaaataggcgtgctgacactttccccgtagtactgtcttaagaactggataaagcacctgctttgaaggtcagataaccaggagtgtgggattttagatccatgtcactagagtctagatgatcagagttggaaaatgtcatagagccctacattttcattatttgtgtagggaactgggaacatggaagggaagatcttaggcaagcagggacggcaggccacagcagaggcaggccaggtcccgtggcccagcccggagcctcagaatgccttccattcccattcagcaccagctttgcccgcaaccacagggag

SEQ ID NO: 749816 - DNA, 368 bp, Homo sapiens
caacctcccccctttccccaggcaacccagggggcatggtgggaccagagggagaacccagtaagacctggcattaacatgaagactatctgtgggcagtcagaggcgcccagcctgcaacagaggccaaagggcaggcgaaggtggaggaggcggggtgcttttyctccgctggtcccatcactgctaatgtggtctcagggcctcctctctggaagagcaaactgacctccggagaaaacagttggaacaggaaaaacagagagatgccagggacccaaggggcactcagagacagggtcagcccttattggagttagagaggcagacagaagacagagaggcccagggatggagaggggaagtgc

SEQ ID NO: 749817 - DNA, 618 bp, Homo sapiens
tccacttggaactttgtttatagtatgaaatacagaaacggcttcatttttctttttgtgagccaattttcctagtaccaattcctgggaatgattacagtaagttcccatatatacacaggaataagtctagactcctttctattctgcttcagagccagacgctgtagaacaraggtcgcacatttttgcacattttttttttctgtaaaggaccagacacagcaggccacacaatgtctgttgcaattactcaactttgtcatggcagcatgaaagcagtatgagtaggcgtggctgtgccccagtaaaactttatttgaataaacaggcagcagcccagatttggtttatagggggagtttgccagctcctgctgtatcttgttaatgtctaaagaaaaacagagatcctctttctgtatttattatcccatataaattttagcctccactctgcccctttcaaaaaaaaattcttagatgttgattagactgaatttaaattgtaagatgggtgaggggaatgtgacatcttcaaaatattcaacgaagccatttatgaatgctgcatttatgctctttaataccataataaaactcttgtaatagagtttta

SEQ ID NO: 749818 - DNA, 618 bp, Homo sapiens
tccacttggaactttgtttatagtatgaaatacagaaacggcttcatttttctttttgtgagccaattttcctagtaccaattcctgggaatgattacagtaagttcccatatatacacaggaataagtctagactcctttctattctgcttcagagccagacgctgtagaacaaaggtcgcacatttttgcacattttttttttctgtaaaggaccagacacagcaggccacacartgtctgttgcaattactcaactttgtcatggcagcatgaaagcagtatgagtaggcgtggctgtgccccagtaaaactttatttgaataaacaggcagcagcccagatttggtttatagggggagtttgccagctcctgctgtatcttgttaatgtctaaagaaaaacagagatcctctttctgtatttattatcccatataaattttagcctccactctgcccctttcaaaaaaaaattcttagatgttgattagactgaatttaaattgtaagatgggtgaggggaatgtgacatcttcaaaatattcaacgaagccatttatgaatgctgcatttatgctctttaataccataataaaactcttgtaatagagtttta

SEQ ID NO: 749819 - DNA, 618 bp, Homo sapiens
tccacttggaactttgtttatagtatgaaatacagaaacggcttcatttttctttttgtgagccaattttcctagtaccaattcctgggaatgattacagtaagttcccatatatacacaggaataagtctagactcctttctattctgcttcagagccagacgctgtagaacaaaggtcgcacatttttgcacattttttttttctgtaaaggaccagacacagcaggccacacaatgtctgttgcaattactcaactttgtcatggcagcatgaaagcagtatgagtaggcgtggctgtgccccagtaaaactttatttgaawaaacaggcagcagcccagatttggtttatagggggagtttgccagctcctgctgtatcttgttaatgtctaaagaaaaacagagatcctctttctgtatttattatcccatataaattttagcctccactctgcccctttcaaaaaaaaattcttagatgttgattagactgaatttaaattgtaagatgggtgaggggaatgtgacatcttcaaaatattcaacgaagccatttatgaatgctgcatttatgctctttaataccataataaaactcttgtaatagagtttta

SEQ ID NO: 749820 - DNA, 622 bp, Homo sapiens
gaagtgtcacacatctctcactttaaatcaaaaagtagaaacgataaagcttagtaaagaaggcatgccagaagccaaagacaggccaaaagctaggcctcttgggccaaacagccacgctgtgaatgcaaaggacaagttattgaaggaaattaaaagtgctactccagtgaacacacaaacaktaagaaagtaaaacacttattgctgatagggagagtttgagtggtctggatagaagatcaaacaagccacaacattcccttaagccaaagcctaatccagagcaaggtcctaactctctccaattgtatgaagtctgagagaggtgaggaagctacagaaaacaagtctgaagctagcagagattggtcatgaggttcaaggaaagaagccatttccataatataaaatgtcgaggtgaagcagcaagtgctaatacagaagctgcagcaagttttccagaagagctggcaaagataatcaatgaagttgaccatattaaacaatagattttcgatagtgacaaaacagccttctattggaaggcgatgccatcaaggactgtcctagctagagaggagaagttagtgcctggcttcaaagcttcaatgaacaaact

SEQ ID NO: 749821 - DNA, 555 bp, Homo sapiens
taagaacattcataatgcatgggaggtcaacatgaacatagtttagaagaagttgattccagccctcatggatgactttgaggggttcaagacatcagtggtgaaaaaagcaggaaaactagaattagaagtaaagcctgragacgtgactgtattgctgtaatctcatgatcaaacttgaacagatgagaaattgctttttatgggtgagcaaagaaagtgatttcttgagatgaaatcaactcctagtgaagatgatgtgaacattgtcgaaatgacaacaaagaatttggaccattataccaacttggttgataaaacaacagcactgtcaaagacgattaactctaattttaaaataagttctactatgagtaaaatgctattaaatagcattacattctacagagaaacctttcattaaaggaagaatcaatcagtatggcaaacttcatttttattgtaagaaatcgccacaaccacccaactttcagcaaccaccaccatgatcagtcagcagccatcaacattgaggcaagaccttcccatttttat

SEQ ID NO: 749822 - DNA, 555 bp, Homo sapiens
taagaacattcataatgcatgggaggtcaacatgaacatagtttagaagaagttgattccagccctcatggatgactttgaggggttcaagacatcagtggtgaaaaaagcaggaaaactagaattagaagtaaagcctgaagacgtgactgtattgctgtaatctcatgatcaaacttgaacagatgagaaattgctttttatgggtgagcaaagaaagtgatttcttgagatgaaatcaactcctagtgaagatgatgtgaacattgtygaaatgacaacaaagaatttggaccattataccaacttggttgataaaacaacagcactgtcaaagacgattaactctaattttaaaataagttctactatgagtaaaatgctattaaatagcattacattctacagagaaacctttcattaaaggaagaatcaatcagtatggcaaacttcatttttattgtaagaaatcgccacaaccacccaactttcagcaaccaccaccatgatcagtcagcagccatcaacattgaggcaagaccttcccatttttat

SEQ ID NO: 749823 - DNA, 625 bp, Homo sapiens
aaggtatataccaatttaagaattaggtactagtgacttcgaattatttaacagccaggtccatatagagaataaatagtagactatttttctcatatgggctatttaagtgagagatataagcagataaaacttcttaattaattgctttcaatagtttagagttagaataggtattttcaatttgtataatgaaaacttgtttttaggagttcttgggccaacgaagaaggcaatcgcaacattaacatagtttgaattaaacatcggtaaaacaacaactaatgaaaagcccaatatgtttttcttactacttgaaaaaatatttttactttattttttttaaccattttatcaaatggttatcaggggcccagtgctcctgaagtcaataaccaaggttcagaaatctttacccttttgcwttttgggaaacgtcctaagccacgaaaaccaacttgccgttgcatatcataaggcccacctccagccttcctggttccctgtgttataaatcttcaccttttctccctcttctttcagaccttcttcatttctgaacatccccccacttcaataacccgaataaactcatctccttaatggactggtacatcttgtcttt

SEQ ID NO: 749824 - DNA, 625 bp, Homo sapiens
aaggtatataccaatttaagaattaggtactagtgacttcgaattatttaacagccaggtccatatagagaataaatagtagactatttttctcatatgggctatttaagtgagagatataagcagataaaacttcttaattaattgctttcaatagtttagagttagaataggtattttcaatttgtataatgaaaacttgtttttaggagttcttgggccaacgaagaaggcaatcgcaacattaacatagtttgaattaaacatcggtaaaacaacaactaatgaaaagcccaatatgtttttcttactacttgaaaaaatatttttactttattttttttaaccattttatcaaatggttatcaggggcccagtgctcctgaagtcaataaccaaggttcagaaatctttacccttttgctttttgggaaacgtcctaagccacgaaaaccaacttgccgttgcatatcataaggcccamctccagccttcctggttccctgtgttataaatcttcaccttttctccctcttctttcagaccttcttcatttctgaacatccccccacttcaataacccgaataaactcatctccttaatggactggtacatcttgtcttt

SEQ ID NO: 749825 - DNA, 501 bp, Homo sapiens
tacccttcccagcttctggtaacaatccttctactctctctttccgtgagctcagttgttttaaatttttagttctcacaaagaagtgagaacatgtgatgtttgtctttctgtgcctggcttatttcacttaacacaatgacctccagttccatccasgttgttgcaaatgacaagatatcattcttttttatagctgaatagtactccattgtgtatatgtatcatattttctttatccattcctctgttagggacacttaggttgcttccaaatcttggctagtgtgaacaatgctgcaataaacacgggggtacagatagctcttcaatacactgatttcctttcttttgggtatatacctagcagcgagtttgctggatcatatggtagctctttagtcttttgagtaacctccaaactgtcctccacagtggttgtactaatttacattcccaccaacaatgtatgagagttcacttttctcaacgtcctctcca

SEQ ID NO: 749826 - DNA, 539 bp, Homo sapiens
attgtacaatgctgtatttttttttttttttttgagacgaagtcttgctttgttgcccaggctggagtgcagtggcgtgatctcggctcactgcaagctccacttcccaggttcacgccattctcctgcctcagcctaccgagtagctgggactacaggcacctgccacctcgccgggctaatttttttgtrtttgtagtagagacagggtttcatcatgttagccaggatggtctcgatctcctgacctcatgatccgcccgtctcggcctcccaaagggctgggattacaggcatgagccatgtacaatgctgttttaaaagcagcgctcgtctttgctgcctttcaactttacatgctttggtttctcatagagaaaataaaaattgtttttaatccttaaagaacttctgacaggagagaaaaatgacttgtgtgtcccaaagcccccaatcccaaagacatctaagcaaaaccaagttgggggtgggggtggagaatttaaatagcagtaattatcgtatctcaatttgcaaga

SEQ ID NO: 749827 - DNA, 539 bp, Homo sapiens
attgtacaatgctgtatttttttttttttttttgagacgaagtcttgctttgttgcccaggctggagtgcagtggcgtgatctcggctcactgcaagctccacttcccaggttcacgccattctcctgcctcagcctaccgagtagctgggactacaggcacctgccacctcgccgggctaatttttttgtgtttgtagtagagacagggtttcatcatgttagccaggatggtctcgatctcctgacctcatgatccgcccgtctcggcctcccaaagggctgggattacaggcatgagccatgtacaatgctgttttaaaagcagcgctsgtctttgctgcctttcaactttacatgctttggtttctcatagagaaaataaaaattgtttttaatccttaaagaacttctgacaggagagaaaaatgacttgtgtgtcccaaagcccccaatcccaaagacatctaagcaaaaccaagttgggggtgggggtggagaatttaaatagcagtaattatcgtatctcaatttgcaaga

SEQ ID NO: 749828 - DNA, 579 bp, Homo sapiens
cctttgctttaaaaaaaagtttgaaaaaggaaaagctattatgttgattacaaaccgaagtgagttacagtaaatgatgcaaagaaattttgacaaataggtatatgcacttgaaagtggtactactctgctctcaaggtgttgctgttaagatatgaaccaacgctgaaaactccatatccacagatagctggcttcttcgataaaattcaattcaaatcaaagagtaattaaagcacttaatttgcatgagcactgttccaagattaactaaagggctgaggggagctggaggtggggagctcaattaagaacctattcaacatatttcaagagagagggacaatctgaatttaggatatggatgtggaaatagaaaggggaatgtgagagacattatcaagagagaataaatacaaygtgaagagacaacctgggagaagggagaaaaatattgccaggcttaaaatacatgacaatgaaaaggccattaaccaatagggctaactacaaaggtggtgctttggtggcaaaaaattttctttggaaatactgatttgaggtacttgcacatgaaaa

SEQ ID NO: 749829 - DNA, 638 bp, Homo sapiens
tttaatttttatttttgtaggtacatagttgtatatatttatggggtacatgacatgttttgatacagacatgcaatgtgtaataatcacatcatgtaaaatggggtatccatcccctcaagcatttatcctttgtgttacaaacaatcaaattatactcttagttatttcaaaatgtacaattaaatcattaytgactacagtcactccgttgcgctatcaaatactaggtcttattcatgttttctatttttttgtactcattaaccatacccacacctccctgcccaccacctgtcaactatccttcccagcttctggtaatactccttctacttactatctctattagttgaattgtttcgatttttagatcctacaaataagtgagaacatacaatatttgtctttctaggcctgacttatttcacttcgcagaatgacctccagttccattcatgttgttgcaaatgacatgatctcattcttttttgtggataaatagtactccattgtgattaagtaccacattttttaaatccattcctctgccgatggacacttaggttgcttccaaatcttgactattgtgaacagtgctgcaacaaacacgggagcgcagatcgctctgtgatata

SEQ ID NO: 749830 - DNA, 609 bp, Homo sapiens
tgtgaaattagtgggcaaaaaactgattcactcacctgagaacaagccattctgtaaaataggctgagaaaccatttctcaccaacatttttcagggatgacttgaagtaatatgatccaaggagccagatttcaatatacgtttaatgttttttgataactcgttgtaggtagccactatttatcttatttgagttacaaagatacataaacacaaaatttaaacagtaatttgagtcacagactcccagagttgcaatactatcccctgtaatactcagttctatagatattttttcttttaaaagatccaaactaacccacatttacgccagctcttccaattatgactaaccgatgcatattatttctccaaatcttgacggtctaagctaatgcctctcacagttgactcacagatggaagtcacaattatttgggagtggctggctttttgttttgagttccayttcctggctcctacgctcaacttttgaattcagaatccttagagtgagaaatcatggcagagtccggaatctccattttaacaaacaccctaggtgatgctcggtcctttagaaatctgttattttagatcaagagatc

SEQ ID NO: 749831 - DNA, 564 bp, Homo sapiens
tctattatttctgaggcctgtttgtgcttagctttcaaatttcagtctatgacctgcttcccatagctttccaatcttgtgtactattacataagtagaagctgattctcagataagacaagttgtccaaaatcacacagataataaatagatgaattaggattcacatctctgttagactgaatccacattcataatcttaataaattcattatactgttcctatgatcacatctcaaatggaatttgyaaaaagcccagtaacatttgtttattgccttagcctaccacttagaaattacaatgaaatgttaactatatctgctattttgctattcgcaagtgacagatgacttggaaagcatgtccactttagtcctctaagcacatttacattttcatattgccttcacatgacatttctgtggctacacttgcaatccagactagtctttcatcctctgttgacaatgatctgtttcattttcagagaaaactacccaataagtctctttaacgttatggatatagtctttctaaggaataggaagaaaatattttttc

SEQ ID NO: 749832 - DNA, 564 bp, Homo sapiens
tctattatttctgaggcctgtttgtgcttagctttcaaatttcagtctatgacctgcttcccatagctttccaatcttgtgtactattacataagtagaagctgattctcagataagacaagttgtccaaaatcacacagataataaatagatgaattaggattcacatctctgttagactgaatccacattcataatcttaataaattcattatactgttcctatgatcacatctcaaatggaatttgtaaaaagcccagtaacatttgttyattgccttagcctaccacttagaaattacaatgaaatgttaactatatctgctattttgctattcgcaagtgacagatgacttggaaagcatgtccactttagtcctctaagcacatttacattttcatattgccttcacatgacatttctgtggctacacttgcaatccagactagtctttcatcctctgttgacaatgatctgtttcattttcagagaaaactacccaataagtctctttaacgttatggatatagtctttctaaggaataggaagaaaatattttttc

SEQ ID NO: 749833 - DNA, 587 bp, Homo sapiens
tgaatagaaatgagaataatgtatattctattgtttggaggtagagagccctgtagttgtctattagcttcatttggtaaagtgttgagtccaggtcctcaatatctttgttaattttctatctaacactgtcagtggggtgttgaagtctcccactgttattgcgtggaaatttaagtctctgtgtagctctctaacaatttgctttatcagtctaggtgctcctgtgctgggtgcttatacatttagggtagttaggtgttatttttgaagtgaacccatctttgactttttaaaaatctttgttggtttaaagtttgttttgtcaaaaattaggatatcaacccctgcttttttctgttttccatttgcttggtagatttgtctgtattcctttattttgaacccatgggcatcactgcatgtgggatacatctcttgaagacmggataccattgggtcttgctgctttatccagcttgccactctgtgtcttttaattggggcatgtagcctgtttatattcaaggttagtagtgatgtgtgcaaatttgatcctgttatcatgttattagctggttaatatg

SEQ ID NO: 749834 - DNA, 601 bp, Homo sapiens
cctctacaaatacgcacacatacacatatgcatacagagtaataagtgctattagaaaataaagaattatgaagattgtttctgtattacacagggtgatcatgaaagtttatatgatcaagtacattaagcgcaaattagaaaaatgtatgtgaatgaaagaagtgcaaagtctctgaagttttgttctgattttctcttgcttttttctcgcagtccaggcagagataacttattcaggcagaaagagtagcaagtgtgaaggacctaagatttctgaggaatagcatggaggacaatgtgtctaaagtagctaaggmagcaagtggtaggtaaggaagaagaaaccttttcagtgatgttataatcatgtaagaacattaattactcagaatattaaatataggcataaaaatagtgtctagaattatcttttcatgacacatttttaatgttgtggatttctggtcagtaaatattatatattaagggatttttttggtcattttgttcaaaaaaagtctgtatttctcaattgtattaaaagtaatttctcccaattctatcaaatctgggctcaaatttggcttggtgttcacag

SEQ ID NO: 749835 - DNA, 620 bp, Homo sapiens
ttaggcaaaagtatatttaactatgttcttcataaattgcttttggaatttaattttcactaattttgttaagattaatctctctctttcccctttgtcccaacatacatacttctatttattgtttttattcttattgtcagagaggagagtgaaatagaaatacttttactatatttaatatagcatttttgttttttaaaaaagttcttattttgttatgttttatttctcttttttaaagaaaagatatattactttttatttatatataatgtttttycctgagtatagtaattttcctttaattctacctataacctacttcaactctttctagaaatattcttaagcaggtattaaatcctcaaggtaaaaggaaaacaatattttattcaaatttatggtttttcaaaggtatatctatattcctatgtgcttttctatttttaaacatatgatgtagaatttaaatttcatcacaaactttttacaatattcgttactactgaaaaaaacttaaagcttatatttgtagctatttttaaaatacttaagagttatgaacaaaactaacatatttcaaagttttcttctctttactgacatttctatagttt

SEQ ID NO: 749836 - DNA, 591 bp, Homo sapiens
ttggtttatcctagttggagtttgttgggctttttgaattggtatgttcattttcttcctcaaatttgggaagattttggccattatctcttcaagtaggcttgctagtcctttctcccttttcttctgggtctcccatcatgcatatattggtctgtttgatggtgttctataagtatttttggcgttcttcacttttcttcattctttctttttgcttatctgactcaataattttaagtgatctgacttcaaattcactgactcttttttctgcttaagtgtcctrttgaactcctctagtgaattttaaaattcagttattgtattcttcagctccagattttaaaaaatggtttctatgactttgttgatattctcattttgtacatgtatcattttcctgatttttagttgtttatcttctctgttagctcacttagcatctttaagatgtttattttgaatcctttgtcaggtaaatcataggcctgcgtttctttgggggttggtttctggaaatttattttgttactttgatcaggccatgttttcctgtttctttgtaggccttgtgcccttttgttgagc

SEQ ID NO: 749837 - DNA, 635 bp, Homo sapiens
aaagcagaaaaagtcagagttcctgatgcctcattgcatagctaacagtatgccaagtagccaccctcttctagacttgctgtaggagaaacataaacttctattaatttaaacagttattacttacagctaaacacattcctaacccatataataagcataatggagtagagagttgtgggttggctggagagagtccttgagggacagcattgtcacattagctttgagagtcagtggaggcctctctgagaatgtcattggagctgagcacctaatgatcagagggagccaacaatatgtgggatgtgtacttgagtgtagcgtagcaccagaaccccgttgaacaaaacttcaaagtgtagaagagatagttggggaaattgtattcctttatggatttytgagcttgtgaggtccatgtgcattggagagcctagaggaactgtagatgatcaggtcagtttggggtcctgggagattatgatctctcccaggggtagatctctctactaggggtagagttctagagaaatcagactaaaacagaatgtatgtcccatgacttatccctaacacattgcctgttaccaagagactggtattcctgggtaaaggagaagtatagttgacga

SEQ ID NO: 749838 - DNA, 585 bp, Homo sapiens
ttgtttttcctaggatggtagattgaaactgtaccctaaactaatcaacaatagctgtctaccatattcagtgctcttgtatcctgtataaacaaataaccaaaatgatgaaacagaaagtttgagtgttactgaaactgctattgagtaacaaatcttgatgaatgtaatgttttaattgtggcattttaagatctaaaataatttcagaatcactcacaaatgacatttaatatacttcatatattaaatatatactacttaattatattattgaaaacaagacctcataatctgtatttgatatgttagatcacttacaaaatttcaaacattcattaagacaaaaagattgtattctatagtcatcttagatgaatttaaatrtaatgctcatggttcctaaaaaaaataaaaataaaattaccatatgattcagtaattccacttatgagtatatagccaaaagaattaaaagcaggatcttggtgagatacctgtgtacccatgtttatagcagcagtgttcgcaatggctaaaacgtgaaagcaggccaagtgcccttctacaagtgactggataagc

SEQ ID NO: 749839 - DNA, 528 bp, Homo sapiens
catatttttactgtatcttttatatgtttagatacacaaatatttaccattgtgttacaattgcctacagaattcagtacaataacatgctgtacagatttgtagcctaggaacaacaggctataccacatagtctaggtgtgtagtagtccataccagctaggtttacataagcacattctatgatgtttgcacwacaaccaaatcatctactgatgcatttctcagaatgtgtatctccattgttaatcaatgcatgaccatacatgtgtaatggtatttcattgtggttttactttgaaattacctaataaaatataattttttcatatgcttatttgccctgttgtatcttctttgatgaaatgtcaatttatatatttatccatttttaattgtcttttatttttcttatttgtcagttttgtaggttctttgtatattttggatacaagccccttatcagatatatgttttgcaaatattctttctcaggttttggcttgtttttttgataattttaatttt

SEQ ID NO: 749840 - DNA, 478 bp, Homo sapiens
ttttaggagttggtaagtacataattttatgtcttttatgtgagctcacaatcttgaattaactagtctaaattctgtattcatatactatatgatataacatcatataatccctattttttaataatttctcatctgtaatccctaggaacaggtaaagtgagacagctttgrttatcatgaagcctgttgcaagaaatatcaatctccctgtccaaattgatgccatgctgattaatgatagccttaactgtaaaatggtggctcatttctgcaaaatgctattaagtaaagatcaaattatctgacattttaatgaaactgaggctggataatcatccatattatttcaaattcagaacttcctttatataaatatatataaataaattatatatgtatatataatgatattccagtgttttaatataactatttatgggcaagggtttgttgttttctataggactatgaccaa

SEQ ID NO: 749841 - DNA, 679 bp, Homo sapiens
agacaattaaatgaaaatgaaatgtttgtgtatttccatttcttttaatactggcaaatgcaaagtttcctaagaagcttgcctggaaaaagaaattcatctcggctttcaaagtgggtggagtggagaagtaaaattccttctgtgattttggggcctatacgaggaagaaggaatttcacaggaaaatggaaagaaagaaaaaaaaaaaaaacacctccagctgtcatcttcactgtgcttatctcttgcctaattataagattgagagrccattgccccaggcagtgcagggcttggtttaagaaagagagctgtaaggatgcttggtttacctaaacaataggctttgtcaaatacctatggagcgggtgagctgtcattccaggagctggttttccagcactctgaactgtcttgtgccttccagcagccctgctctgtaattaaacagccaacctggagattaggggctcccgtgaagggattcattgcaggtaccgcacatgtctgtagctagaacccagttttatggaccttctggttgtcaagttttgctctcattttccctttcctcttcagagataatcacacaaacaatttcatttgtctttcatgcagagagagaaatagcaggtttaacagtcctgaacacccatctatggttatctcagtgttc

SEQ ID NO: 749842 - DNA, 577 bp, Homo sapiens
tggggccgcatgtgcccacccgcgcctctccctggggtgcccagctctgcttctctcctatggccctcacagatgcccctgccctcccagcccgaagctctggcaccaagcatgacgtatcacacaccatttaggtgaccacctctctccacagatagtgagctccgataatgcctaggtctggtcactttcacattccggccctgaccccctactccctgaaccttggggattggcaataagtcccactgcagtatttgttggatgaagtgcaattggccatcatcaaacctaacattctagacccatggagtagccgaatctccgtgctcctcacccasaggacaatttgtacactggcgccagtggcttagaaagctacgttaagcatctttgcaattccgccacggtttgctcctctgagaacatatttaattactggaatgtacatctcatctctcattcctccttccccggccctcccatcccatgattaatgtgaatctgtctcgctgtaaaataaccacgtctcactctaattaagttctggttgtttctaacctgggtttgaatgttc

SEQ ID NO: 749843 - DNA, 485 bp, Homo sapiens
gagaacttttccagactttgctgggaagagagcaaagcagcgatgcttcagagagcactgggcaggagagccggaagtagtcaaggccggccgctgtggggtgggagagaggggacagtagtgttaacacccctgcaagggcatctttttgagcaccccatctgtaccagacaccctgccagcctctgaaaacaacattgattaaaaagaacatccmtggctgccaccctcatgaagttcacgatctagtgggggatatggctgttacccaaagaatcacacaaagaagtagaaaatgatgagattggtgtgggcaaaaggaggggctcggtgccaagacggcctatgttagggggatttggcccattaaagggtctgggaacatggccctgaagcaactgtgttcgagctgagccctaaaggtggagtacggccagggcagagggaactactaggccaggagtgcctggggtgtagggcagtgg

SEQ ID NO: 749844 - DNA, 581 bp, Homo sapiens
ccttttagtagcattagctatttgtggttctccacactgaaatgaactgtaatatgcagtaaggttagatcttccaatcaaggacttcagtggcaaaggacctgagactgggatgacaacagagtcttactttcaacctaagtcttaatcaaagcgtagagtcataagattgaaaatctggagttagggcatgtaggggaaaaaaccattttcattgcaagcatactgtacrtgttagtcatggctcagactgcaataggaattttatggagcaagaaaggggaggtgcaagaagaaggttttgagtttcctactaaatgtatttttaaatagcattacagcatcaggatttataaagaaagaagcaataacaaaaaggagctttttacctctctcttttttttttttttttgcaaattatttgaggatgaaattgaccaccagaaaagagacatgaggagaccaaaaggagctgactgattaaagagtgagctcctgaatgtggcaaagtctggaatcctacaagacaacctaccaaagcctgttgacagctcatcttggggtataaagtctgagtggag

SEQ ID NO: 749845 - DNA, 581 bp, Homo sapiens
ccttttagtagcattagctatttgtggttctccacactgaaatgaactgtaatatgcagtaaggttagatcttccaatcaaggacttcagtggcaaaggacctgagactgggatgacaacagagtcttactttcaacctaagtcttaatcaaagcgtagagtcataagattgaaaatctggagttagggcatgtaggggaaaaaaccattttcattgcaagcatactgtacgtgttagtcatggctcagactgcaataggaattttatggagcaagaaaggggaggtgcaagaagaaggttttgagtttcctactaaatktatttttaaatagcattacagcatcaggatttataaagaaagaagcaataacaaaaaggagctttttacctctctcttttttttttttttttgcaaattatttgaggatgaaattgaccaccagaaaagagacatgaggagaccaaaaggagctgactgattaaagagtgagctcctgaatgtggcaaagtctggaatcctacaagacaacctaccaaagcctgttgacagctcatcttggggtataaagtctgagtggag

SEQ ID NO: 749846 - DNA, 542 bp, Homo sapiens
gttgactagaatgcccatatcctatctaaacaggcaaagagatattcattcccagcaatttttgtccccaatgaatgcagacctaacaatgcctgatcattttttatcaaaagatagaaatttaatttgattttaaatgtgaaaactcctaaatcctwattattagctcaattaaaagttgcagaaagcaagtccaaatagtatgctacattgattggagagaccaatagttttcagtttgtgtttgagaaaaatattcaattcagtagttgtatattcagtatatttagtagcagttcttttgaaatagctggttaaaaatagcagacatcaagaatgatttttttatagtgttaggagtaagccaaccatgtctgtttactccactgttactctggagatttagtcaaaacaacatccaagaaacaaagcaatacatgaataaaaatccagacaataccattcaggacataggcatgggcatagacttcaagactaaaacaccaaaagcaattgcaacaaaagccaaaatagacaaatgc

SEQ ID NO: 749847 - DNA, 367 bp, Homo sapiens
ttgccatgccttaactttctgactttgttttataaccttccttactaaaagtgcattcttatatctataactttcttaaaatttccttttcctcttcctactttacctctcctctttgtgttactttttgtgtcgctctatgatckctctctcttctagactttttgttactcattctttccctcttgagctggcataagctggaccattatttgttttgattttttagggccattccataaatgcacaagttaaaagaagatgtttaatgacatatcaagttgactctttagggaaagcatgtgcacttattaaatgagtgttggtttcaatggattcatgtacatatctaagttttccaaattca

SEQ ID NO: 749848 - DNA, 596 bp, Homo sapiens
ttttgttgcaggatattcaattttcactatagcccttaatgggctctgagttgctccttcatatattctacagaaagagggtttccaccctgctgaataaaaagcaaagactgggcacagtggctcatgcctgtaatcccagcattttgggaggctgaggtgggcagatcacctgaagtcaggagtytgagaccagtctggccaacatggtgaaacaccatctccacttaaaatacaaaaattagtagggcgtggtgtcagacacctgtaatcccagctactcaggaggctgaggcaggataattgcttgaactcaggaggtggaggttgcagcaagctgacattgtgccattgcactccagcctgaaggacaagagtaaggcttcatctggaaaaaaaaaaatgatttgactttataaaatgaatccacagattgcaaagcatttttacagatagattgtttctagtttttatggctggttattcagttgttcactacaagcctcaaagagatatgaaatgtctcttcatagattattaaacaagaaggattctaacctgctgaatgaaagccaaggtttaactctgaaatgaat

SEQ ID NO: 749849 - DNA, 584 bp, Homo sapiens
aaggagaggccaggctcctacccctgcaaacagcatgaacttcccaaggctccaccctgtcaccctagagctcaggacgattggagattctccgggaccagcagtctggtttttcagcctttgagctgttttaggcttgagggtggggcttcactagggaaacctttggctgcttccatctgtatcattcccccttctaactgcccttagaataaggataagggtaaggataaggatagaagatggccgaataggaacagctmtggtctacagctcccagcgtgagcgacgcagaagacgggtgatttctgcatttccatctgaggtaccgggttcatctcactagggagtgccagacagtgggcgcaggtcagtgggtgcatgcaccgtgcgcgagccgaagcagggcgaggcattgcctcactcgggaagcgcaaggggtcagggagttccctttcctagtcaaagaaaggggtgacggaggcacccggaaaatcgggtcactcccacccgaatattgcgcttttccgactggcttaaaaaccggtgcaccacgagattctatcccgcacgtggctcggagg

SEQ ID NO: 749850 - DNA, 584 bp, Homo sapiens
aaggagaggccaggctcctacccctgcaaacagcatgaacttcccaaggctccaccctgtcaccctagagctcaggacgattggagattctccgggaccagcagtctggtttttcagcctttgagctgttttaggcttgagggtggggcttcactagggaaacctttggctgcttccatctgtatcattcccccttctaactgcccttagaataaggataagggtaaggataaggatagaagatggccgaataggaacagctctggtctacagctcccagcgtgagcgacgcagaagacgggtgatttctgcatttccatctgaggtaccgggttcatctcactagggagtgccagacagtgggcgcaggtcagtgggtgcatgcaccgtgcgcgagccgaagcagggcgaggcattgcctcaytcgggaagcgcaaggggtcagggagttccctttcctagtcaaagaaaggggtgacggaggcacccggaaaatcgggtcactcccacccgaatattgcgcttttccgactggcttaaaaaccggtgcaccacgagattctatcccgcacgtggctcggagg

SEQ ID NO: 749851 - DNA, 536 bp, Homo sapiens
ttgaagagtttattattgaatttcttcactgctcttgtgatttctgtgtattgaactggtgcactcatctcttctctcccagtgattctgacttacttccaatttgtttagtacattgttactagacctctgtggccmttgctcaaaatctttatgacttcatatttcctttcatctttgcttggtaggtgactgtaatgtattaaggggcattgaatcccgaccaaacacttctgtcatcgacaatccaactctgcccaccctaccacttccaagtatagggcagggaggatcccacaagcataggaatcaaacagataacaggtattatctgggttatgttatagtttatttaatctcaacaagcataatgcaagtaccttctgtttaatgtatcttttctatgttgctgtcaaaataaaatcagataatcgaatttctagacatgataatagaatataactagagaaaaaaatccttcaaatatgtggatgatatagtgttatgggaatatagaagagaagaaagtggtagat

SEQ ID NO: 749852 - DNA, 638 bp, Homo sapiens
cctatcatctcagaaattatgaacaataaaaatcactaagatgaagtgttccaaaacagtgatataagctcttgaaaaacttgaaactatcagaaacgatgataaatagacttgaagggctctagagatgaagagaatataaaatagttacaggaaacaacaaaagtggcaattataaatgatataaataatgtcaggtacttaatattctatcctgaagaaatcactcaaaatgaaatagaaaaggataaatactggaaatagacatgacaattatttaaaagtttatacacatagggaaagaaraggaccaatacacataatttttctttcctatctgaagaagagagtaaaaaaaatgttgaataaaaaaatgcaaggaagatttcctgaaataaagaacttcttgacttggcagcaaaaaaaaagaaaaagaaaaagaaaaaaaaagatgctgaatagcctgcactgaaccatatcctggtgacattactgaacataatagatgaagacagagtaaatggaattcaggcaaagtaaacaagtcacatacaaagacagaataaacagggtcattcatattttgccacagcaatactcaatactaaaagatagagtaatttctgcagagaccattg

SEQ ID NO: 749853 - DNA, 603 bp, Homo sapiens
catctttatatatacatcttgtttagtgttctctgagcttcaggacttgtgatttcatatctgttattaattttggaaaactcttagccattatttcttccaaaattctcctgccccattcttttatctctgttatgttttttatttctactgttaaaagaaaaacttttgacaaattaaatttagcagaatttatttgagcaaagtatgaatcaggcagcactcagaaccaggagaggttcagagagcttcactcagcaacttgggcaggtaatatttacagacagaaaaaggatgtgaygtacagaaacagcttgattgattccagctcagcatttgccttatttgggcatgtctgatcagttgacagcctataattggctgaattttggctgtgatgattggctgagactcagctacttgttaaaagaatatactcaaattatgttgcagttcgcatatactgagttaggttgcagtttactacagagaaattcaaagtacagaggtaattttagaagaaatccatttagtttaatactactctttatttatctttgcatttcatatttggtaatttctagtgaactatttttaagttca

SEQ ID NO: 749854 - DNA, 607 bp, Homo sapiens
atgtaaattagtacaaccactatggagaagagattggagattcctcaaaaaactaaaaattgagctactatgtgatccagcaatcccactgctgggtatatacccaaaagaaaggaaatccgtatatcaaagagatagctgcactcttgtgtttgttgcagcactgtaaacaaatctttacaatagataagatttgaaagcaacttacgtattcatcaacaaatgaatgaataaagaaaatgtggttcatatacacaaygcactactattcagccatgaaaagaatgagatctagccagctgcaacaacgtggatagaactggagatcattatgttaagtaaaataagctaggcacagaaagacaaacattgcatcccacttatttgtgggatctaaaaatcgaagcaattaaagtcatggacatagagagtagaaggattgttgccagaggttgaaaagattaacgggggactggagagaaggtggggatggttaatgggtaccaacaaagttacagagaatgaataatatatgttgtcttccacatcttacaaataatcttgtataaatattttaattacactttcagcttattagatataatta

SEQ ID NO: 749855 - DNA, 623 bp, Homo sapiens
aacacaaatgtctctggattggttccttccctttcatatcattctggtccagaggttggcaaactatggcctgtgggctaaatccagcctgctggctgctctttgtatagcatactagttaggaatgattcctacattttaaaattgtcatgatcatttggaggagaagaggcactctggctttttgaggctccggcggttttttcattgattctttctcatcttatgagtttatctaccttaaatctttgaggctgctgacctttagatggggtttttatggggacttttacttaaaattcagttaaattaaaattgttacattttaaatggttacacaagtaccttcataatatccttgatctgtctctttggcctgcaaaacctaaaatatttgctatattgtcctttacagaaaaagttttggctgggagtggtggctcacycctctacttccagcacttttaggcaggaggaccacttgaggccaggagtttgagacgaccctggctaacatagtaagaccctgtcgaagaagaaggaggaggaggaggaataaaaaaaaagcctgcaacttcctgatttagtcccccatatagaagagggatggaataaaataagag

SEQ ID NO: 749856 - DNA, 606 bp, Homo sapiens
acacctgtaatcctagcccctttggaggccaaggtgggaggatcacttgagctcaggatttcaagaccagcctgggcaacatggtgagactctgtctgtataaacattttaaaaattagctggacgtggtggcgtgtgcctgttgtcctggctacttggaaagctgcggtgggaggcttgcttaagcccagcaggtcgaggctacagtgagccataatcatgccactgcactccagcctgggagacagagggagaccttgtctcaaaaaaaaaaaaaaaaaaaaaaagagtaaatatgggtgctgcagtgataaacagggcttctctaaataaatgacatttgaacaaagacctcaataaaataggggaktaagccacacaaatatgtaaggaaggggcattccgtgtagtgagaagtgccaagtgcaacggccttgtggaagagcacatttggcttctttgaggaagaacagataagccagtggggctggactggagtgaatgaagggaagaaaggtaggaaataaggtcagaatagtggccaggatttagatattattaagttatgaaagtcctcgtaagaattttggattctactttgagata

SEQ ID NO: 749857 - DNA, 525 bp, Homo sapiens
gaattctgtttctcccccattcctaagacctaaatgtggctgaaacattttctttttagttttgtacaggtcagatgggaaagtaccactctcactttctacaatgggaactctttaatgtttcataccaaccctaagccttccttaggaggggcaggctgcccaaagtcacagaaggctgacacctaagaaaagtccggtcctggcgtagtggctcacgcctgtaatctcagcacttcaggaagctgaggcaggtggatcacttgcggtcaggagttcaagaccagcctggccaatatggtgaaactccrtctctactaaaaatacaaaaaattagctgggtgtggtggtgcatgcctgtaatcatagctgaggaggctgaggcaggagaatcacttgaacccaggaggtagaggttgcagtgagctgagatcgtgccactgtactctagtctgggtaacagagcaatactctgtctcaaaaaaaaaaaaaaaaaaagtccatgtcaggatcacagcccacttc

SEQ ID NO: 749858 - DNA, 609 bp, Homo sapiens
aaaaagagaagatgacaacaataactggctcaataacacacacaacaaagccaacaggcatgggtacacataagtctaataaaaggtaacctgtgctaccagttattaaatgtattagaaaacttcactaagacaactgtagaaatggaataaaagtatataaaagaacaaagaaaacagatggaaaacccaacaaacccatgtatatagagattttagtatacagtaagaggtgcatgacaaaaaaggaaaaagaacaaaagtctaggaaagctgagtaactattttgagagaaaaggatcttttyttcacagcaaagtaacttcgaccagttaaagagttattccttttaaatgaagccataaaggaactaaaagaatctgatctcagggaaagaaattcctttctaagccttagggcaaatgaaaaaaaattggaaaagtaaatagattccaccattttttttttagcttaaaaggtcatttacataaatatcttaatagaaagtctaatttgaaattcatacaaatttattaacaaatcaaatactggagtatggtataaaaaactcaatgtttagtctttatccttggttcctgacacagagtt

SEQ ID NO: 749859 - DNA, 623 bp, Homo sapiens
ctttaatttcttttgctcccagaagttattggaagaatgcccattaaccatttcatcatattatttctataacccaaattaattttccagaacatgcagcatatcaccgtaatgagttgctatgaccagttgcattagaaaatattgcctttctattttttctgtatttttaaattcaatcaaacaggaataaacttctgctgacgaaactgcttggaaaaacccatgctgtttaacatgcactttcactaccttcagtttactggcttctttgctgaaaccctgggaccaaccatctgtggccggtygtcatcatttgtacaaccagtggccctaactggaaacttggaaaattcccactcctggacaatctggcacatggaaacattcttctcaagatgtgctagaattaagactcattaacgaacaaaaagcaccaacagctctcatagtttacaataggcacaggcccagtggggtgctggaggtggctggaatcggcttgggggagtggaccaagtgcaccccttcccgcctcctcattcattgttgtctcatgggcagtgtgaaattagccatggttggagtctatacataacagaaattcgcaagtgctacaagta

SEQ ID NO: 749860 - DNA, 630 bp, Homo sapiens
aacaagacaaaaaccctttcctgagttgctcggcatgcactcctgtgctgtttcatgcatgtggatgttccttccgtttgttcctgtggaataactgagtgtgcctgatggcagaacacactgcagtgttatcagtgtctgcatgttttttaatagaacaggtttacttgatctgtcatctgttatgcaaaaaacagcaattacttttgcatccatctagctaaatctataatctgtgtcaatcacttatacctatcaatcatccgtatctattcacctgtcctctatgtctgtcttctctcagtctacatccatctagccttctgtcaatcatctacttttttttttaatagaacaagaagtttacttatcaagtcttgaaagggggacatgtttcaattggtgttcaaacaaaaattccagcttgtattagaaccttgaaatggtgaagttgtggaggttttctttgttccataatacagagacaagttcataatttttagtataacagctaagttgacaaattctaagtttcctcaggtaaatagtcrtaactgtccttttccctagagaagtgcttgctgggatagtaaaaacatacaccatttcatgacttctgcaaatactttc

SEQ ID NO: 749861 - DNA, 598 bp, Homo sapiens
aacacatttgtaagtcacatatctgacaaagggttagtatccagaataataaagaacacttaaaactcaacaataagaaaacaacccagtaaaaaattgggcaatagtttcggtgaacctgtacttcaccaaacaacttgcatggattgcagagaagcccatgcaaataagcagagaaaaataagcatgtgatgcccaacwtaatttattgttagggaaacaaatgcaagcaatccggaaggtaaacactgcagctagcctgaggccacggtaccatttggggcaagcagctgaccagctagagatataacagtatgttctggggaatgagactgccacagtgggcctaggtgatttggaaggctgtgcaccttcctcataaggtaccagcagaggcctacgtcagtagctaagatgaaagaacaatcacgaagcatcccagtgctggcaaggacagtgccaagtgctggcaggaatatgctctccaaccctgctactgggaatgcagaatggcacagccactctggaaaacagtgtggcagcttcttactgtgttacactgccttaggagctggcagtctcactcctaggtgtttac

SEQ ID NO: 749862 - DNA, 598 bp, Homo sapiens
aacacatttgtaagtcacatatctgacaaagggttagtatccagaataataaagaacacttaaaactcaacaataagaaaacaacccagtaaaaaattgggcaatagtttcggtgaacctgtacttcaccaaacaacttgcatggattgcagagaagcccatgcaaataagcagagaaaaataagcatgtgatgcccaacttaatttattgttagggaaacaaatgcaagcaatccggaaggtaaacactgcagctagcctgaggccacrgtaccatttggggcaagcagctgaccagctagagatataacagtatgttctggggaatgagactgccacagtgggcctaggtgatttggaaggctgtgcaccttcctcataaggtaccagcagaggcctacgtcagtagctaagatgaaagaacaatcacgaagcatcccagtgctggcaaggacagtgccaagtgctggcaggaatatgctctccaaccctgctactgggaatgcagaatggcacagccactctggaaaacagtgtggcagcttcttactgtgttacactgccttaggagctggcagtctcactcctaggtgtttac

SEQ ID NO: 749863 - DNA, 357 bp, Homo sapiens
aattaatacactaaaaggaggagcaaatacaataatataaaattctcaattaaaaccaaaaaaggaaaaaaattgtgaaaaatttaaaaagcaggaacaaaaatagaaaacagtacaaatataatagatattaacccaacyatatgaataatcattttaaatgtccatggtctaaatgaatcatttaaatgatagatattgtcagagtggatccaaaaaacatgacccaaccgtatgttatctatgagaaacccatttaaaatataaagacacgtatagattaaaagtaaattgatagtaattatataatatgctaacactactgacaagaaagcaggagtaactatagtaaattta

SEQ ID NO: 749864 - DNA, 664 bp, Homo sapiens
aagctcatcatcactggtcattagagaaatgcaaatcaaaaccacaatgagataccatgtcatgccagttagaatggtgatcattaaaatgtcagtaaacagcagatgctggagaggatgtgcagaaataagaatgcttttacaccattggtgggagtgtaaattagtccaaccattgtggaaaatagtgtggcaattcctcaaggatatagaactaaaaatatcattcgacccatcaatccccatcaatcctgggtatatacccaaaggattataaatcattctactataaagacacatgcacacgtatgtttattatagcactatttacgatagcaaagacttggaaccaatgcccatcaacaataractggataatgcccaacccaaagacccatcaacaatagactggataaagaaaatgtggcacatatacaccatgaaatactatacaactataaaaaagaatgagttcatgtcctttgcagggacataaatgaagctggaaaccatcattctcagaaaactaatacagaaacagaaaaccaaacactgcatgttctcactcaggtgggagttaaacattgagaacacatggacacagggaggggaacatcacacgccgggacctgccggggggtggggggcaaggggagggagagta

SEQ ID NO: 749865 - DNA, 590 bp, Homo sapiens
  misc_feature 372: n = A,T,C or G
catttttgttttggttgccggtgatggttgggtattgctcaagaaatttttgcccagaccaatgtcctagagagtttccccaaagttttcttgtagtagtttcatggtttgaagtcttagatttatatcttcaatccattttgatgtgatttttgtatatggcaagagataaagatctaggtttattcctctgaatatggatatgcagtttttacaccmctatttattgaagagactgtcgtttctctaatgtatgttcttaggacctttgtcaaaaacgagttcactgtagatatttagatttgtttctgggttttctattctgttccattggtttatgtctttttttttttttttttttttttttttttnagccagtaccatgccattttgtctactatagctccatagtacaatttaaagtcagataatgtggttatttcagttacattctttttgcttaaaataactgtggctgttgtgggtctattatggtttcatataaattttaggattgttttgtttgtttttgtaaagaatgtcattagtaatttgatataggttgcagtaaatctatagattgctttagg

SEQ ID NO: 749866 - DNA, 475 bp, Homo sapiens
tgtggaagcatacaaaaaaaaacccagaaaatcaagggtcatataaggaagtctacattataaaaagaattaatatttgggtggccagatatatgaaaatttattgataacactaaacagtaaatgtgtataatttcatctacatakgtagagcactaaataatgaaaataattaagatgtaggatattaagcaaaagataatctgtagaaggcctaagaatccaaacgtccagatataatgggaaatattttccacataaaaatgaaggacaacagtcagtagtaactcagatacctacatatgtcaaatattaatatttaatctcttgacaaaacccctcagttttaatatttaatctcttgacaaaacccctctaacaacaaaacaagtagtttcaaggtggtattcacatatttgctataaaattaaatgtcaagatgtttgactgatttctcacgattgacatccaataa

SEQ ID NO: 749867 - DNA, 577 bp, Homo sapiens
tcccatattcccactgcaggatgggttcaccgggctttcaggggccacagcctgggggcatatccatgcagactgcggtttctatgggatacgaagtctgaacagtgagaaggacgccgggggcaaagggcggcgctttccttccactgcctactggcatcagctatggggaggacccttcctgctccctagcattccccaaatccctgctctaagagtctcccgaagagtacttctgctgtgaccccaggcagactcattctgtgccagcaatgggaaagcacctgaagaatctccagctaatattaggaacacctggtgcggagaccccagcttgccccgtcagagatccagaggcgcgctcagaaagaaccgrcccccagggacacactggctcaagacagggcgacctggtccccccgctgagacctacctatttcctcgcccaaggaagagttgaggattgcgcctgcagacatgacgacagcgcagtgcgcaggccgcgggggtgcagctggctcaggggcacggcgggcaccaggcgccgccagcccagcgcagaaaagggcgcctcggt

SEQ ID NO: 749868 - DNA, 613 bp, Homo sapiens
gaaagtcgtcggtaatactcactgccatatcccatcattagctggtgtgatataaatgacatcgggggatataagaggcccaccaggcaaatcatctgtccccaggcaccaatgggacagtgctccttaatcacaccttcacatgtgctttgtctacgatggtttaagtgactggggctgtcgagttcttgccagttttcccctgggaagagcactggcaagattatactcatactggattgggtgtgactttcttttcctttccactgcaattctaacattattacctggcaatgcaaaggtytgaattcccagtggatgttctctgcctatttggactacttttttctatttccattctttctccctgttctctgccctttctggccaggcctctagggaacttctatttttagaggcaaaatcaaaagtgcctcactgctggaaatcacggtgattgttccacttgcttaggaaggtcagtgcccacatcttaaatactaatgcccaaacaaagacacgagtcacatttcttagggatagttaaagtagcacaaaagagtgtttaaattctccttcaaattcttctgagagaaatgacattttccaaaag

SEQ ID NO: 749869 - DNA, 613 bp, Homo sapiens
gaaagtcgtcggtaatactcactgccatatcccatcattagctggtgtgatataaatgacatcgggggatataagaggcccaccaggcaaatcatctgtccccaggcaccaatgggacagtgctccttaatcacaccttcacatgtgctttgtctacgatggtttaagtgactggggctgtcgagttcttgccagttttcccctgggaagagcactggcaagattatactcatactggattgggtgtgactttcttttcctttccactgcaattctaacattattacctggcaatgcaaaggtctgaattcccagtggatgttctctgcctatttggactacttttttcyatttccattctttctccctgttctctgccctttctggccaggcctctagggaacttctatttttagaggcaaaatcaaaagtgcctcactgctggaaatcacggtgattgttccacttgcttaggaaggtcagtgcccacatcttaaatactaatgcccaaacaaagacacgagtcacatttcttagggatagttaaagtagcacaaaagagtgtttaaattctccttcaaattcttctgagagaaatgacattttccaaaag

SEQ ID NO: 749870 - DNA, 511 bp, Homo sapiens
atgatggtagaatgggaggtagatactaaattttaccaaaagaagctcataggtgctgatgtgttcagacgcttgggcgagtgacatcattgcacacaacgaaggtgtggagctcgcaggccttctatcgtgtgtatatacatgtatatgtaatattttaatccagatttactttcatgtgacattgtcagctccatgtaatctcacatgtcagagttcatcaacttcaggtacaaaagactgaggtggaatattgcccccaaaccaccttctgggatcgaaggtctgcaagaagccatcttggctatatccccaacttgaaaatcacagaaggccatragaggatttcctaaactttctgaaggtggtattgtagtcagtaaccactggtccatgggatgcattcccctcatagtcttcaacccagaaatgtcaaatgaacatctctgcatgatgtcaaatggaatgtgggaggagaaaatggtacaaagaaacatgtcatctttacttt

SEQ ID NO: 749871 - DNA, 629 bp, Homo sapiens
caatctcagttcacctcaacctccacctcccaggttcaagcgattctcctgcctcagcctccctagtagctgggattacaggcatgtgccaccacgcccggctaattttgtatttttagtagaggcggggtttctccatgttggtcaggctggtctcgaactccccacctcaggtgatccgcccgccttggcctcccaaagtgctgggattacaggcatgagccactgcacccagccataacaactttttaaaagcactccaatagcatgcctaaagactaagactaccactaataagttcaaaaaaattgccaatttatttaagaaaaacatgaaagaaaccaacacacacaattctcaccaaaaaaatacaaaattaaaaagcaaatatgaaaaataatttcctgcatgcaaacaggcttttacaaaacaataaaagaaawactgggaaatgctcaaaaaatattaaaaagcaattaataaaaagaagtcagagctgggcacagtaactaacgcctgtaatcccagcactgagaggtggaggttggaggatcgcttaaccccaggagttcgagactagcctgggcaacatagtgatacctcatctctaaaaaagtaaataaactaat

SEQ ID NO: 749872 - DNA, 629 bp, Homo sapiens
caatctcagttcacctcaacctccacctcccaggttcaagcgattctcctgcctcagcctccctagtagctgggattacaggcatgtgccaccacgcccggctaattttgtatttttagtagaggcggggtttctccatgttggtcaggctggtctcgaactccccacctcaggtgatccgcccgccttggcctcccaaagtgctgggattacaggcatgagccactgcacccagccataacaactttttaaaagcactccaatagcatgcctaaagactaagactaccactaataagttcaaaaaaattgccaatttatttaagaaaaacatgaaagaaaccaacacacacaattctcaccaaaaaaatacaaaattaaaaagcaaatatgaaaaataatttcctgcatgcaaacaggcttttacaaaacaataaaagaaatamtgggaaatgctcaaaaaatattaaaaagcaattaataaaaagaagtcagagctgggcacagtaactaacgcctgtaatcccagcactgagaggtggaggttggaggatcgcttaaccccaggagttcgagactagcctgggcaacatagtgatacctcatctctaaaaaagtaaataaactaat

SEQ ID NO: 749873 - DNA, 457 bp, Homo sapiens
aatcaaatgggacaatgttgacgctgagtacatttgggtgtccaccggtgtcttcaccaccacagagaaggctggggctcacttgcagcagggagccaaaagggtcataatctctactccctctgctgacgcccccatgttcatgatgggcgtgaaccataagaaatatgaaaacagcctcaagatcatcagcaattgcctcctgtaccaccaacttcttagcctccctggccaagctcatccatgacaactttggtattgtggaaggactcatgaccacgayccacaccatcactgccacccagaagactgtagatggaccctccaggaaactgtggtgtgatggccacggggctctccagatcatcatccctgcatctactggtgctgccaaagctgtaggcaaggtcatccccgagatgaatgggaagattactagcatggccttccgtgtccc

SEQ ID NO: 749874 - DNA, 591 bp, Homo sapiens
gtgcaggactggcaggcagccccacctgcaaccctggtgtgggatccacttggtgaagccagctggactccagagtctagtggggacttagagaacctttatgtctagctaagggattgtaaatacaccaatcagcaatctgtatctagctcaaggtttgtaaatgcaccaatcagtgctctgtatctagctaatctagtggggacttggagaacttttgtgtctagctcagggattgtaaatgcaccaaaacggaccaatcagctctctgtaaaatggaccaatcagcaggatgtgggtggggccagataagggaataaaagcaggctgccccaaccagcagtggcaccctgctggaatacctttccgcgttgtggaaactttgttcttttgctttttgcratagatcttactgctgctcattctgggtcagccctgcctttatgagctgtaacactcaccgtgaaagtctgcggcttcactcctgaagctagcaagaccatgaatccacggggaggaacgaacaactccagacgcgccacgttaatatctgtaacaccccgtgcgaaggtctgcagctgcactcttgaa

SEQ ID NO: 749875 - DNA, 618 bp, Homo sapiens
gctcacgcctgtaatcccagcactttgggaggctgagacgggcggatcatgaggtcaggagtttgagatcagcctgaccaacatggtgaaaccccgtctctactaaaaatacaacaattagctgggcgtggtggtgtgcgcctgtaatcccagctactcaggaggctgaggcaggagaatcgcttgaacctgggaggtggaggttggagtgagccgagatcgtkccactgtagtccagcctgggtgacggagcgagactgcgtctcaaaagaaaagaaaatagagcagagtggtgcaatagaaagggtctagaaggtttctttggttgggtggtcagggaaggtctccttgagaacctctgagaaggtggcaacatgtgagctacatcttgaatatgagaatgaaattctggggaaagagtgctccaagcaaagggaagagcagatgcaaagatgctgagatggtgggaggccgaggcaggcagatgacctgaggtcaggagctcaagaccagcctggccaacatggtgaaattcccgtctctactaaaaatacaaaaattagctgggcatggtggcacgttcctgtaatcccagctactcagggatcgatagaaatg

SEQ ID NO: 749876 - DNA, 672 bp, Homo sapiens
aatagcatgcattgcacataataaagtaagtattaaaagagcttgaaagttttcactcccatactaacaataagaaaaaggaactgaacaaactgaaaatcagctcctcttagattcatcagagaattgatgtgaaaaggtaaattgcttcccccaaaaactaaagggacagacaggtgaatacagagaatcacagtttaccaggagcagaaactcaacaggagaagctggaagctgcagccattattgataggtatattttaaaytgtaattgatgaattgctggctgttcagtacagactagtttgagttaaaaatttcaagcatccaatgttaaggagacttccacacatttgtgagttttacctctaggagccctactatgttctcattgtaaaaatggaagaaaaatcccctcaggcaggaagagggaagagtaattgttttaaaatacatccagagttgtctgttcctcttaacaaggcctaccctcaagggaaactatttaccagatcctaactggctggggtttttctaaatcataacctacatgggggaaagaaacacccaactcaagctcactataagacagacttaatcataggactcaaatgctttccctccttggggattacagctcaaagaactgtaagcctcaggccctacagaagg

SEQ ID NO: 749877 - DNA, 573 bp, Homo sapiens
gcagtggctcacccctgtaatcccagcactttgggaggccaaggcgcagatcacctgaggtcaggggtttgagaccagcctggccaacatggtaaaaccccgtctctactaaaagtaaaaaaattagccaggactggtggcaggtgcctgtaatctcagctactcgggaggctaaggcaggagaatcgcttgaacccaggaggcagaggttgcagtgagccaaggtttaagcaataaccccaactctgctcagtgttcttcatctcatgctactcaaattcaccaaggaccagtatgtaaaccatggttcaactttaaaaattcacagaatggaggttggagcgaacccggattgcaccactgcactctagtgtgggtgacagagccagaacatgtcmcaaaaaaaaaaaaaaaaaaagaaaagaaagaaagaaggaaggaaaggaaaaaagataagatatagataaagaatatatcccacgttttcaatcatgcatatgggctctggtaagagggaggcaaaagactatagaagcttgtgtaccttcagtgtagttacaaaacattgcttcc

SEQ ID NO: 749878 - DNA, 621 bp, Homo sapiens
atattcaaaaaaagttttgccttttagtcactgtattaatccattttcacactgctataaagaaatacccaagattgggtaatttataaaaaaaaaaggtttatttgactcagttccacatggctggggtggcctcaggatacttacaatcatggtggaaagcgaaggggaagcaggcaccttcttcacaaggcagcaggagggagtgagtgaatgaagtgggaactgccaaacactattaaaaccatcaactmttgtgagaagtcactccctatcacgagaacaacatgggggaaactgtccccatgatccaatcactcccctcctttggcacgtggggattacaggtccctcccttgacatgtggggattacaattcgagataggatttaagtggggacacagagccaacccatatcattctgcccctggctccacccaaatctcatgtccttttcacatttcaaaaccaatcatgccttcccaatagtcccccagagtcttaactcattccagcattaacccaaaagtccaagttctaagtttcatctgagataagtcccttctgcctatgagcctgtaaaatcagaagcaagttagttacttgcaagttaaaatgag

SEQ ID NO: 749879 - DNA, 483 bp, Homo sapiens
atcccagcactttgggaggccaaggcaggtggatgatgaggtcaagagatcaagaccatcctggccaacatggtgaaaccccgtgtctactgaaaatacaataattagctgggcatggtggtatgcacctgtagtcccagctacttgggaggctgaggcagcagaagtgcttgaaccagggaagtgtaggttgcagtgagccgagatygcgccactgcactccagcctggcaaaagagtgagactccatctaaaaaaaaaaaaaaagaaactcaaagcccttattttacattttagtgttctgacttgaccatttattactttttaaaaaaggattgtattagtctattttcatgctactgataaagacatacccaagactgggcaatttacaaagaggtttaattggacttaacagtttcacatggttgaggaagcctcacaatcattgtggaaggcaaggaggaacaaatcacatcttaca

SEQ ID NO: 749880 - DNA, 594 bp, Homo sapiens
aactcctgggctcaagtggcctacccaccttggccttccaaagtgctggggttacaggtgtgaactactgcactcagccaaaaatagtttgagggaagtctttgttaagaaaaacagaaggccctgggtgcatttcaggtggttactattccttccccttgccaggaacatgaagggatttttccctgcttcacccttagaacctamtagggatcctggagataaaaattatgaaagtatggggttatcctaaaaccgaatcttaacagatgtcttaactctcattctagtccacattgagccttcagaaagtcaccgtgttaacttttcctatcactactgctcccaatggcaggattttgctttgggcttctgctcctggtcagttgtgattcttggtatttgtccctccttccagttctgggggccacagttagccctgtgatctgaattctctgatggctctacgaagagttgttgattttcagtttgttcagcttcgtatatgctgtgaggatgggagtaatgacctctaagctctttacatatcagaccagaaatcagaagtgatcctcaaactctgatgatgcttat

SEQ ID NO: 749881 - DNA, 524 bp, Homo sapiens
ttgagcaaatacctcaccaaagaagatatacagatggcaaataagcatatagaaagatgttccacatcatatgtcattagggaattgcaaatcaaaagaatgagataccagtacacacctaatagcatggccaaaatccaaaacactgacaacaccaaatgctggcaaggatgtggagcaacaggaattcccattcawtgctggtgggaatgaaaaaatggtatagctactaatgtggttaggctttgtgtccccactcaaatctcatcttgaattataatccccataattcccacatgtcaagggagagaccaggtggagataattggaccattggggtggtttcctccatgctgttctcatgatagtgagttctcacaagatctgatggttttataagtgtttggtagttcctcctgtgttcattctccttcctgccacctgtgaagaaagtgctttgcttcccctttgctttccaccatgactgtaagtttcctgaggcctccccagccatgctgaactgt

SEQ ID NO: 749882 - DNA, 661 bp, Homo sapiens
cagggctggatcctcgtgaaggctccgaaggagaatgcatttccctgctttcccagccgggagggcccctgcaggagaatctccccatcccgaaatccttgactccatcacatctgcaaagacccttgctgtgatctgactgtctgcgtcctcccagaattcgtgtgttgaaacataaactcccagtgtgatgctgttaggaggcaggactctgggaggtgacaaagtcacaagcatgcagacccgtggatgggattagagcctcatgaagggggccccagagcactgcactggcccttccgctgtgtgaggacacagtgagaaggtgtgtaactagcctgagaaccagaattggggtcctctccagacaccgcctctgccagttccttgatcttagacttgccagcctccagaactgtgagaaatacatttctgttgtttctaagccactcaacctgcagcgttttgttagaacagccagaacggactaagataggggtccccgaccccccagccatggacrggtacccgactgtggcctgttaggaaccaggccacacagcaagaagtgagcagcaggtgagcgagcattaccgcctgagctgcctgacccctgcctcctgtgagatcattagattctgaactgcacatgctcgggatc

SEQ ID NO: 749883 - DNA, 608 bp, Homo sapiens
gcaatactgctcaccttgagcccagagcagctactatccccggcccctccgctggctttctgggaggtcccaggaagacgtgacctcttgtcaggcactcgtgggctcccccatagctgccggggtggttcttgcccctccaaaatcacacatgctcctcggcaaggatgcgtcagctaacacaggggatcggggctctgctttccttgcgaatgattttgttgcggaggggacaccacgtggctcatgctcacacctctgacacttccatgtgtctctgatttttaaaactatgaggaaacacattaggaattgccggtgcacagcgtggacacaaagcccataaggggccttgctggtggtgctgggggaggctctggggcctggggtcctgccasagggaagcagggagcagcccaggaggatgggtggcactggggaggcacccggagactggcactgctctccccacccacatgttccctgggcagaacctcaactaagctggagacacctacagcagcagatgtgtgtccctttcgtcccgcttgacttcatttctctctcccgtccttcaggagaagacagacctcccagggtccccctcg

SEQ ID NO: 749884 - DNA, 472 bp, Homo sapiens
aagaggggatctgtgttctagcctggtgctaatttcattagctgctgctcagttctgcgtctccacatggccacagcaacaggggctatgcagtagaatgtgcggggggtgtaaggaaggatggggatgggagggcagcacgctccactaccatctgcccgggctgcccaggcccgctggccrccctctgcaaagcagcaacaaagctgatgagtgtcttgtctcccaggggcaaggtagagactcagctggatagagagacatcaggccgagccgaccacgtgggccagaggggctgcctggcaccgagtgcccgtctcccagatacccagcggtgagggcccctgtgtggcccctcccaatacaaaacggggcccattcattgcacctggagcaaaccacaccccacctggagaacgtcttgccagggagcttcggtgggaaaatgagatgatacagcatttaatgtttt

SEQ ID NO: 749885 - DNA, 623 bp, Homo sapiens
gaaccatcgctggcccttcaccctgtttagaaactgaggccaggctgctggggatggtggggggtcctcggcaagctggggtggaggcagcatccaggctgaggatccagcctcaggcctcggcatccgtgtgggcttagcctgcctcctgcagctccaagccaaggcagtggtctctgttcctcacgtgtggacgtcttcctgtgagatgcytcccggaaagtccccactttgctgcctgtctccacaaccccctgtcagccactagtgaatgacggtggaccccttcggaatctgcccctccagccctctatcgccccacctggccccggcactgccagctctctcctggttgtagccttaagaacggtccccctgctctgcccatcagccctggtccctcctctgctcagcaccctcccacagcacccacctcacccaggtgacaaccagagtcctcacagtgggcacagcccctgcacgatgtgtcactatcacccctctgacctcatatgttactgcacttcctcttgcccctccagtgtccccactagaacatgagctacgagagggcaggattttttttttcttttttcgttttcttttctttctttctttttttt

SEQ ID NO: 749886 - DNA, 623 bp, Homo sapiens
gaaccatcgctggcccttcaccctgtttagaaactgaggccaggctgctggggatggtggggggtcctcggcaagctggggtggaggcagcatccaggctgaggatccagcctcaggcctcggcatccgtgtgggcttagcctgcctcctgcagctccaagccaaggcagtggtctctgttcctcacgtgtggacgtcttcctgtgagatgcctcccggaaagtccccactttgctgcctgtctccacaaccccctgtcagccactagtgaatgacggtggaccccttcggaatctgcccctccagccctctatcgccccacctggccccggcactgccagctctctcctggttgtagccttaagaacggtccccctgctctgcccatcagccctggtccctcctckgctcagcaccctcccacagcacccacctcacccaggtgacaaccagagtcctcacagtgggcacagcccctgcacgatgtgtcactatcacccctctgacctcatatgttactgcacttcctcttgcccctccagtgtccccactagaacatgagctacgagagggcaggattttttttttcttttttcgttttcttttctttctttctttttttt

SEQ ID NO: 749887 - DNA, 471 bp, Homo sapiens
ggtcttagaatgcgtttcttcagccatagagctgcgcttcagcaccacggacagaaccacaaggcacccatggaggggatgacctgagctgaatccaggatcacacaactgtgcgtctcaaacctttcctcttcgtggctgacaaggtcactcagacaggggaggatctgggcccttctatggctacatgaaccccaggctataagttcytgtgtggttgcctgatgctgctgctgctgccgaaaatctcctttggggtgtttgtgcatcctggctctcccagctctgacagtcaagtttgggcctctgaacgagaagccacagggagaggaggagaagatgaagtgacggttccatggagcccatccatcatccacctccctgtccttcccctttcctctccgtctttctctaacctctttctttgtcgcacctgaaattggcagcatttcccaggaagaacacagaccc

SEQ ID NO: 749888 - DNA, 583 bp, Homo sapiens
gattgctctaccttcatttaattccttggtgctttactatttgaatctagaatattcttgaagtctgaaagatggatagaaaagaggtaagtcatgtaaacttataaacagggcacgaaccccgctaacagacagctttgaagagatgatgatttyagatcttgtgaattgttatgtcagaggaatacatgcagaagaaaacaggcaccgaaatagttattaccagagcaaagtaaatctgaacacctaaaagaataagaaagtatcttatgcttctctctactctgaactgccttgaaaagagcaagaatttcatacatgagcctgtagcacattacaaaatctgagtatgtatttgaaattcaaatgcacacaaagttcatgcattttattttccagttgttctcaagactcctaaataaagcatttcccctgtgtgggcgacccctgggtcccatgtggggtcagtgtttgggtctctctgagaggatcaggaaggctgctcttccaggaagggctgcagggaccctgggaaccggaccagtccagctcacaagtatgaagagaatgtcgggagaggaag

SEQ ID NO: 749889 - DNA, 583 bp, Homo sapiens
gattgctctaccttcatttaattccttggtgctttactatttgaatctagaatattcttgaagtctgaaagatggatagaaaagaggtaagtcatgtaaacttataaacagggcacgaaccccgctaacagacagctttgaagagatgatgattttagatcttgtgaattgttatgtcagaggaatacatgcagaagaaaacaggcaccgaaatagttattaccagagcaaagtaaatctgaacacctaaaagaataagaaagtatcttatgcttctctctrctctgaactgccttgaaaagagcaagaatttcatacatgagcctgtagcacattacaaaatctgagtatgtatttgaaattcaaatgcacacaaagttcatgcattttattttccagttgttctcaagactcctaaataaagcatttcccctgtgtgggcgacccctgggtcccatgtggggtcagtgtttgggtctctctgagaggatcaggaaggctgctcttccaggaagggctgcagggaccctgggaaccggaccagtccagctcacaagtatgaagagaatgtcgggagaggaag

SEQ ID NO: 749890 - DNA, 465 bp, Homo sapiens
tccatggtgccactcatccaagctgcctaattagtggtatcaagccctctgtctgaaaagactgccttggatttacttagcacccatcttcctataaatgtctcccaaaagtcttgggagttcatctcctttgcattttcaccrtatcacacagaccaccatggccacacattaatgcccctgccaccagcctccatcgtccaccagggataagcaagaaaacattgatttgggacttctgcagggtccttccttcacatggtgtatgctttgaaactgccacgtccccaatccaccaccatgggtggcctccttcaaagccctcagctctccacaggaaacctcctcctccaggacacctgtcatcagctccccagctgccttaatttccttcctcaaaacactctacattgcaatcatgcgaccatgcaattgttcagcatatatgttagtttcctatgactc

SEQ ID NO: 749891 - DNA, 465 bp, Homo sapiens
tccatggtgccactcatccaagctgcctaattagtggtatcaagccctctgtctgaaaagactgccttggatttacttagcacccatcttcctataaatgtctcccaaaagtcttgggagttcatctcctttgcattttcaccatatcacacagaccaccatggccacacattaatgcccctgccaccagcctccatcrtccaccagggataagcaagaaaacattgatttgggacttctgcagggtccttccttcacatggtgtatgctttgaaactgccacgtccccaatccaccaccatgggtggcctccttcaaagccctcagctctccacaggaaacctcctcctccaggacacctgtcatcagctccccagctgccttaatttccttcctcaaaacactctacattgcaatcatgcgaccatgcaattgttcagcatatatgttagtttcctatgactc

SEQ ID NO: 749892 - DNA, 625 bp, Homo sapiens
tgggattggggtgctgaagggggatccaaaaaaaacagtcattgatttggaaggagatgctgttctccatctcagccagctgttaaagggacatggattgaactcccaggcagggaggggcattttgtttcccttggccacatcagcatgtttttacagttgagagagcaggasatgactctccagcctgtggcagagagaaagtgcccttggcccaactccgtggaagatgttccccaccccccttccaggagaagctcctgctggtggatgcacgaacccagctggtggcgacacaaggccagtgggcactctctgccttgctgaggcctcagcctcctggctgcgaaggccccgggttcccctctgcagccaagtctttacttccccttcaccctgaaaaacgtcttcacagactatcattcttggtctcttgactgcctttctccggtttcctttcacaatccctcagagatgggacatctctccagaggacgcctgggttgtgaggatctatggtcagaacattttggtcaatgacagattacatacaccacagtggctccctcagattataaaggagctgaataattcctatcaccaagtgacagtgctatgccatcta

SEQ ID NO: 749893 - DNA, 601 bp, Homo sapiens
ggtgtcagagaaagttgaatagggagccaggacttctatccccaccaagcagtaacaagcatctcccatcactacatggtgcctttaaagatcacctggtcagtctggatttttacccctaactcagagttataaggcctcccgctctctgctagtgtagtctcaaaggagagtggagaaccaggatttcaccacagcccagtgtaagaaggcccacaccccatatcagtggtgtcagttgaggctgcatggggagcagaaatgagtcactcatatctttttcagctagggaggtatcagtagakaccaacactgagagaaatgagatgttagattatctgacaaagattctaaagtagctgtcataaaaatgcttcaatgaacaattataagcacacgagaaaccaataaaaaattgaaattctcagcaaataaattgaaactctcagcaaagaacaagaagatatacaaagaaaagagccaaactgaaattttagaagtgaaaaatacaataattaaaataacaggctcagtgggtgggcttagcagcagaatggaggggacagggaagaatcagtgagctggaacatagaacaataga

SEQ ID NO: 749894 - DNA, 637 bp, Homo sapiens
ctccctctggcacagggtgattgcatcatagacctgacccaacgtgacagagaagcggttctttctgagttaccaatggccatccatctttcagcaggcgtgccttcccattttccttgctctgcccatgagaattttcagcagaaccttggattaggtgtgccagacatgttctactcttgattgtgaagattatacacactctcaccttctgagataaatgttattaaattggataaacaaccktgtgtagttttgcttttctgttttatctcaagatcctgctgacatggctaacagggcaactgtgaaaagatttttattcgtgtctacatcagtgtgaaaggcttcatcctggtgtgtactaatcactcagacagtggtatgaataaatgaaggaatgcattgacaaactaatacacaaggtgattccggaaaggcgcacctcctgggataaatacggtgacagtggtgagtctgctctaggtctacgaagttcttgctcttagtagagatccagacacccaatgttgaagacagttcctctttgctttagaaagctttgtgtgcaagagatggcaaactacttcttaaaaaacagagagtcccgtaaacatatgccaaggtccacggtgct

SEQ ID NO: 749895 - DNA, 609 bp, Homo sapiens
gggtgtaaattcttcctctgctagaagcgtgtgcaatgtgggaagcccagcacacagaaagagcttaattcatgctgctgatttaatagattttttttcatggatgtgccagaaagccccattcatgtaaacactacaattgcaaaagtttatgccagacagaagcctgcatttgttggggattaaaagaaagggcacttgactttgtagcccaaagacccaggttttccaggtgcagtcctggcattgagttgtcatgtcatcccaggcaaatcatggacttgttctgggcctctgtttctttcttcaacatgaaggaatttgttaaagaaatttctaaaattcttctgttaatgagtaatgaygataatatcagtagtcacaagcatttactgagcactgactagctgccaaccacggtgttgtttgctttgtttatataaccccattcacttttaaaatcatcttatgagggaaagaaaccattatcacccacataaggtatgactgcttatatagaaaatacccaaaatccataaacaaatgattaagaacaattaaatttagtgaagatataaaatttacatacatcaaacagctagaaagttt

SEQ ID NO: 749896 - DNA, 612 bp, Homo sapiens
aacaaatggaggtggaaaaaagtagttattcatatgggaaaaaatgaacttgaatatctccctcaaactacatccgaaaaataaccctagatagattcaggaattaaatgtcaaaaaagaaactttataatttatagtaaaatacaggtaactattttctaccttggagtagtgatatggtttggctctgtgtccccacccaaatctcattttgaattgtaattccawatgttggaggtgaggcctggtgggaggtgcttggatcatagaggtggtttctagtggtttggcaccatccccctagttctgtatttaaagtgtgtagtaccatccccttctctctctctcctactggccatatgcagatattcctgcttccccttcgccttccaccataattgtgtttcctgaggccttcccagccatgtttcctgtacagcctgcagaactgtgagtcatttaacctcttttctttataaattacccattctcagggagttctttatagcaatgcaagaatggactaatacacgcagctaaagtttttcttaagcacttaaattgttgactataaaatgataaatttaactatgtcaaaataaagaacatttg

SEQ ID NO: 749897 - DNA, 612 bp, Homo sapiens
aacaaatggaggtggaaaaaagtagttattcatatgggaaaaaatgaacttgaatatctccctcaaactacatccgaaaaataaccctagatagattcaggaattaaatgtcaaaaaagaaactttataatttatagtaaaatacaggtaactattttctaccttggagtagtgatatggtttggctctgtgtccccacccaaatctcattttgaattgtaattccatatgttggaggtgaggcctggtgggaggtgcttggatcatagaggtggtttctagtggtttggcaccatccccctagttctgtatttaaagtgtgtagtaccatccccttctctctctctcctactggccatatgcagatattcctgcttccccttygccttccaccataattgtgtttcctgaggccttcccagccatgtttcctgtacagcctgcagaactgtgagtcatttaacctcttttctttataaattacccattctcagggagttctttatagcaatgcaagaatggactaatacacgcagctaaagtttttcttaagcacttaaattgttgactataaaatgataaatttaactatgtcaaaataaagaacatttg

SEQ ID NO: 749898 - DNA, 609 bp, Homo sapiens
ttctaccaaaacatggctgaaaatttttggtgtgtgggggtgtaccctgggagcccatttagaagctacagtgaaaagagccctcattgcttcagctttgagccatctgggccctcgcacctggctcatttcacctgacagtttctaaaacttctcacaaggaatttgtcggtttattacacatccatagaatgccctgaagagctattccaaaagaagagcttgaaagtcgaacgctaagcagaaaaacagtgacttccaaaccacagggtttgttygaattatcaacttagtcctttattaacaacttcaaggtgcaaatttgtgagattccagacaggcagttcaatgagcagctggattttgctggttcccaagagcaaggaaaattcccttgttttaaagagccagatccatttggaatagtctttcttccccacatattacagcatgaacgtgactctaaagtacctgccgagggtctttctttttgtgacggtgggcgctgttccccactgtcgtggacttctcacagcgctcagtgtgcattcagttgcttctctccataacgcctctcagctaactgtgctgtttctgtgctcctgggtt

SEQ ID NO: 749899 - DNA, 624 bp, Homo sapiens
aaagcaagggccttgcttgagcagaatgatgcctcttgagtttcttaaaaaggaaaaggtaggggtaaggggctgtttaatctattaatacttcagcccactctcagcacccaaataatagggtgggtgcatcaaatcttggtagccatatacataagaatacttgtaggggttgtttaatttagggccttataaagacaataaaatgacttattgagaatcactaaaccaacacccaagtatttaatgaaaatactttttagctcatatagcttgagacaccaaactatgactatrtaaatagctataccatgtttatagattggaagacttaatgtagtaaagaagtagattctacccaaattcattgataggtttactgcagttcctttcaaaatccaagggggggacattttgtagatacaaatgaactgatactagaatttatatagaaaaaaaccaagaatagccaaaataattttgaaaaaagaagaataaagttggaggaaacatactacctgattttaagatttaacatatagctgtattaatcaagattgtggtgttgggaaaggaatagactggtagattaatggaacagaattgaaagtccaaatataaatg

SEQ ID NO: 749900 - DNA, 624 bp, Homo sapiens
aaagcaagggccttgcttgagcagaatgatgcctcttgagtttcttaaaaaggaaaaggtaggggtaaggggctgtttaatctattaatacttcagcccactctcagcacccaaataatagggtgggtgcatcaaatcttggtagccatatacataagaatacttgtaggggttgtttaatttagggccttataaagacaataaaatgacttattgagaatcactaaaccaacacccaagtatttaatgaaaatactttttagctcatatagcttgagacaccaaactatgactatataaatagctataccatgtttatagattggaagacttaatgtagtaaagaagtagattctacmcaaattcattgataggtttactgcagttcctttcaaaatccaagggggggacattttgtagatacaaatgaactgatactagaatttatatagaaaaaaaccaagaatagccaaaataattttgaaaaaagaagaataaagttggaggaaacatactacctgattttaagatttaacatatagctgtattaatcaagattgtggtgttgggaaaggaatagactggtagattaatggaacagaattgaaagtccaaatataaatg

SEQ ID NO: 749901 - DNA, 600 bp, Homo sapiens
catgctcaattatagagacacagtatgctcccctttgcattcttcattgctgattctgtgctttacatctggcagctacaaaaatttagtattttgctagcaggtgcatcaaatctatttttggtttcaaacaatacactttttgttttcarcgattctgaccagtagtcaacaattgcaagtatgtggaatgtgattctcctgctttgggaacaagggagctcccagttttgtgggcaggatccaacattcccatcataagggcagcctcacctgtctgtacctctgacacctcagtcagagcccttggagtcggctaggccagttttggccctccttactgagacctagtcattctgtagacatacttcattctcccaggcttgggcttctggttcaacctgtggctctgacattatcaccagaagatatccatctggcccaccttctgtggcttttttcccatgcacctttcagactaaattgtatacgctcatcctccaaagggttggctgtctttggtggtattttggcctgagttctgccttggatttatgttttttgttacatatatatatatatatatatatatatatatat

SEQ ID NO: 749902 - DNA, 600 bp, Homo sapiens
catgctcaattatagagacacagtatgctcccctttgcattcttcattgctgattctgtgctttacatctggcagctacaaaaatttagtattttgctagcaggtgcatcaaatctatttttggtttcaaacaatacactttttgttttcaacgattctgaccagtagtcaacaattgcaagtatgtggaatgtgattctcctgctttgggaacaagggagctcccagttttgtgggcaggatccracattcccatcataagggcagcctcacctgtctgtacctctgacacctcagtcagagcccttggagtcggctaggccagttttggccctccttactgagacctagtcattctgtagacatacttcattctcccaggcttgggcttctggttcaacctgtggctctgacattatcaccagaagatatccatctggcccaccttctgtggcttttttcccatgcacctttcagactaaattgtatacgctcatcctccaaagggttggctgtctttggtggtattttggcctgagttctgccttggatttatgttttttgttacatatatatatatatatatatatatatatatat

SEQ ID NO: 749903 - DNA, 600 bp, Homo sapiens
catgctcaattatagagacacagtatgctcccctttgcattcttcattgctgattctgtgctttacatctggcagctacaaaaatttagtattttgctagcaggtgcatcaaatctatttttggtttcaaacaatacactttttgttttcaacgattctgaccagtagtcaacaattgcaagtatgtggaatgtgattctcctgctttgggaacaagggagctcccagttttgtgggcaggatccaacattcccatcataagggcrgcctcacctgtctgtacctctgacacctcagtcagagcccttggagtcggctaggccagttttggccctccttactgagacctagtcattctgtagacatacttcattctcccaggcttgggcttctggttcaacctgtggctctgacattatcaccagaagatatccatctggcccaccttctgtggcttttttcccatgcacctttcagactaaattgtatacgctcatcctccaaagggttggctgtctttggtggtattttggcctgagttctgccttggatttatgttttttgttacatatatatatatatatatatatatatatatat

SEQ ID NO: 749904 - DNA, 600 bp, Homo sapiens
catgctcaattatagagacacagtatgctcccctttgcattcttcattgctgattctgtgctttacatctggcagctacaaaaatttagtattttgctagcaggtgcatcaaatctatttttggtttcaaacaatacactttttgttttcaacgattctgaccagtagtcaacaattgcaagtatgtggaatgtgattctcctgctttgggaacaagggagctcccagttttgtgggcaggatccaacattcccatcataagggcagcctcacctgtctgtacctctgacacctcagtcagagcccttggagtcggctaggccagttttggccctccttactgagacctagtcattctgtagacatacttcattctcccaggcttgggcttctggttcaacctgtggctctgwcattatcaccagaagatatccatctggcccaccttctgtggcttttttcccatgcacctttcagactaaattgtatacgctcatcctccaaagggttggctgtctttggtggtattttggcctgagttctgccttggatttatgttttttgttacatatatatatatatatatatatatatatatat

SEQ ID NO: 749905 - DNA, 623 bp, Homo sapiens
gctaaaccaagctactgtatttcctaacatccctggatataacttcataattcgccccttttagctttaacagagttatttcctctttacctccaaaactcctaccatcaaaccatatttgtctagtcttcttaagtagcttttaaagtacacctccaggatgccattgcctaccggtataaatctttgttaagttttgtgtgtatatttggcattaagattaatttgtgagttttcttctcatgtataaagcagaatttctcaaaatctcatctcttggtatagtccttttatgagtttcattagctacccctagatttgcttaattttgttgtatatgtatattttggaamtatgccttccatggttaaattaagcactgaattatgcaaacttaacgctggtttcttcactgcaagatttttgtaagtcattatatgcaaatgtgttaggaaaataaaataagtaataaaagaaaaataaaagaaggtttgcaggtcatcaggtatttggtcacaggaagcttttgtgtgcttgtctgtgtgtctctatttgggagaaataccaatttgtagatcacaaggttaatacagttttaataatagtctaaagcatggtttttc

SEQ ID NO: 749906 - DNA, 599 bp, Homo sapiens
acagtcatttcttcccttctgtcagacataattcctcagtttagtcttcccacctctatacagtctgataacagaccagcgtttattagtcaaatcagccaagcagtttttcaggctcttagtattcagtgaaacctgtatatcccttatggtcctccatcttcaggaaaagcagaatggactaaaggtcttttaagaacacacctcaccaagctcagccaccaacttaaaaaggactggacaatacttttatgactttccyttctcagaagtcagacctgtcctcagaatgctacaaggtacagcccatttgagctcctgtatagacgctcctttttattaggccccagtctcattccagacaccagaccaacttagactgtgccccaaaaaaacttgtcatccctactatcttctgtctagtcatactcatattcaccattctcaactactcatacatgccctgctcttgtttacactgccggtttacactgtttctccaagccatcacagctgatatctcctgatgctatccccaaactgccactcttaactcttgaagtaaataaataatctttgctggcaggactatgctgaat

SEQ ID NO: 749907 - DNA, 573 bp, Homo sapiens
gagactttgctgaaattgcttatcaccttaaggagtttttgggctgagatgatggggttttctaaatatgcaatcatgtcacctgcaaatagagacaatttgacttcctcttttcctattttaatacgctttatttctttctcttgcctgattgccctggccagaacttccaacactatgttgaataggagtggtgagagagggcatccttgtcttgtgctggttttcaaaaggaatgcttccagttttgctcattcagcatgatattggctgtgggtttgtcataaatagctcttactattttgagatgtagttcatcaatacctagtttattgagtgcttttagcatyaagtggtgctgaattttatcaaaggctttttctgcatccattgagatagtcatgtggtttttgtcattgattctgtttatgtgttggattacatttattgatctgtgtatattgaaccaagcttgcatcccagggatgaagctgacttgatcatggtggataagctttttgatgtgctgttggattcagtttgccagtattttattgaagatttttgcatcga

SEQ ID NO: 749908 - DNA, 610 bp, Homo sapiens
ctctgttaatagcaatctaggcttttttctagcctgatcctctaaactcttctgccctctgcccattactcagttccaaatctgacacacatttttaggtgttttttatagtaacaaccccacttctggtacaaatttctatcttagtccattttctrcaactagaagaaaacacttgagactggataatttataataaacagaaatttattttctgacagttccagagacttaaaagttcattatcaagaagctggaatctttcaagggccttcctgctgtttcatgacatggcaaaaggctgaagggcaaagaagcaaaagggaatgaaactagccattttataatggtattaacttcacctatgagaacagagccttcatggctcaatcacttcttaaaggtccatgtaaaaatgattacaatgttcaattaaatgtcgacatgagtttagagaagataaacttgataatttttccttgattttcttactatcttcattcttctgaaacctggttaatattcatctcctcaattggcataatgacatttgtttaaaggttatatggttatctgtcttacactttttgtcatttcatagccagaaata

SEQ ID NO: 749909 - DNA, 585 bp, Homo sapiens
gcacagtttgccaagctgtttgtgaaagaggactttatatgtgaccactcccagggtgtgtcaggaagagttccccctgatgccagaattcccttgtgtcagagccatttgtaaggtctctgagtttctaccgttgccctctgcttggaattcaaatttaaagctctctttacagtaggagggatccacaggaaaatagcttctgttgtggatttgaggaacttacaacttctctagaaactctatactcaaataaatacattaaataactgggggcttgatagagtaggtgtttctgactattcagtgaggcaagatttagagtagggagaggtcctggatagttttmtgtaatagctttttattttctttttccttttttcctttcaatgttttaattggcctataataactgtacatatttcttgggttcactgtggtatttcaatacatgtatactatgtgtaataaaccagccagggtaattagcatatctatcccttcaaacatgcatcgtttcttttgttgggaatattcaaaactcactcatctagctattcaaaaatttacacaaaattgttataa

SEQ ID NO: 749910 - DNA, 618 bp, Homo sapiens
atgttcattgcagcactgttcactatagcaaagacatggaatcaacctaaatgcccatcaatgataaactggataaagaaaatgtggtacatatacaccatggaatactatgcagccatacaaaagaatgagataatgtccttttgagggacatgaatggagctggaggccattatctttagcaaactaacacaagaacagaaaaccaaatactgcatgttctcacttataagtgggagctaagtgatgagaacaattgaacaaatagtggggaacaacacacactggggccttttggagggtggaacatgggaggagggagagggtcagcaaaagtaactaagggtactaggcttaatacctgggtgatgaaataatctgcacaacaaacccccattacacaagtttacctctgtaacaaacttgcacttgtaccacttaacttaaaattaaarttaaagggtgggtgtgttagctcacgcctgtaatcccagcattttgggaggctgaggcaggcagatcatgaggtcaggagatcgagaccattctggctaacacggtgaaaccccatctctgctaaaaataaaaaaaaataaaaaaacttagccgggtgtggtg

SEQ ID NO: 749911 - DNA, 597 bp, Homo sapiens
ttctacatcttttccaactaacactctgtacctgttaaatactgactcccctttctcccctttccccatcccctggcaaccaccattctcctttcttcctccaagaatttgattacttaacgtacctcatagaagtggaatcatacaacgttgtccttttatgactggcttatttcacttaggataatttcttcaaggctcatccatattgtagcatgtgccagttttctttttttaaggctsagtaatattcattacacacacacacacacacacacacacacaccccacattttgtttatccattcatctgtgcatggacatatgggtggcttctactttttgtgtattgtaaataatgctgctgtgtacatgggtgtacaaacacctgtttgagtatatcatatttcattttcttataaatccggaaatgaaattgccaaatcatatggtaattctattttgaatatattggggaattgccatactgttttccgtagtggctataccaccagaaatacacaaatgttctaatttctccacatctttaccaaattcaaatacatttatatatgtatagatattatatacatgtaa

SEQ ID NO: 749912 - DNA, 586 bp, Homo sapiens
catgtgggggaagggggcaagatttggaagagagaaatgccacagagtgagtaaaaacaccattcagctctgcaaaatgctgttgactctttacggctcagaagtagaaaatcgggtggctttcattgtctgtgaacgttctcacccatctcttggcctctcattcccaggagaaaagaaaaaggaaatcttaaacttgtcaatcagagatattttatttatttmtaatgtaaaaattacctaccaggtaaataggctatcaagttgtaatgagcatttgcttttagagaacattcatttccattactgaagacgagttgtaagacttactcatctttgataatagaaatattttcagttatgttaagtatagataacaggttagtttgtagggcatgtgtgtgctgaacacaggaagggatggaaggatccaacggtacctaataatcatgaggtgcctgagagctaaaagtttgttgcatactaagtattcaggaggtgttaactataaagaagcactaaacatacatgaagacttcatgaatatgagaccttaatttggctgcctattggagacactcattct

SEQ ID NO: 749913 - DNA, 577 bp, Homo sapiens
ccatcatcagtggggaagaccaatccttagagacaggcaggatatgtgaacatcatggatcccaggattcagatattgtggtccttgtttctcacctgcagcctctccaaagtcactttgaagtgttaatctacccagtcattctctccttgcttccttttgtgtgcttcratctattaaatgaagagtgtggttggatctgtgagtctttctgttcaatggcctccggaataggcggacagtgtattgcctggtcttggagtctatggcaacatcaggctaatttcccactcagtacaagtcaaggtttaaactaaccaagctatctctactgtctcaggaggtcactttttatctaccatctcattatatgctctgggtataggcaaagattgaggagcttcttggctgttgaggaagggtttcttgtccatacactgcttttgggtctgctctgcccaccttgtctggacatggagtgttctggtggctaaagaggcatggctgcccctgttcagtttctctggggttagcttggctcctaccaatggcaaacatgttccaagttaactatttg

SEQ ID NO: 749914 - DNA, 524 bp, Homo sapiens
gggagaagggtccagaggcacatctgttccccaaacaaggcaatcagctccacttccgccaaagtgaaggccctaggctggtgctgctgcccctccccaagcccttgctcctgccttctctacgaccctacaggcacatgctggtccccagcccctcacttgcccagctctggctctcctgtattgcctctttgggtggtgagtgcaaagaggatcgggrgaggatggaatttcctgattggccccacatgccttgactttggtccccattatccccaccatgctagactctgtcagttcctctgccccggccagggatcacctaggacccccaacccccagcatcaacatagagtgcagattaatagccccctgcacaggtgggagagagtgggtagaaagtaaggccatttacgaaggtcattaacacggaccacaatttttaagaaggtgttggccagatgaggcccacagctcccatccccatggtgggtccaggtgcggaggagctggcctagacggga

SEQ ID NO: 749915 - DNA, 585 bp, Homo sapiens
agctgagcttggtctgatctcaaccctccggcagcactgacctgatccaactggggaaagtaagcagtaaaacatgaactctgccatcatacacagagacaagggtgtctttattgaaggggtgggttgagctctcaaagattgtgccccctacaaaaaccatcaaaccactttataaacaattcccatgacttgacactcatgttgagaaatgaagaagactgcttcaggactgtcctggaacccaagccccccaagctcccagcccttccatgccatgcaaagctgagtggcccttccctgcaaggcccttccctgctctttgtctgcccacatcttcctccccsttcagtgccctctcagcactgcctcatccaggaaacctgcctcgataaggcaaacctacccccttctctggatttccctggtatcgtctgcagggctttcttgtctctcttgcctgccttctgctgctctcctgtatggggcctgttttgtttcatgctggttgtcagttccctgagggccagaaccttgccttggagacttatgctcctttctgtctgcagtgaggatccctcattg

SEQ ID NO: 749916 - DNA, 642 bp, Homo sapiens
cccggtttgtccttccctctcttcctttctgtctaggtttttccccatccctcagacccacacctgttcacctcacccctgttcttcatacccttcctgccatgtgctgctcaaagagggatgcctctcagaaggcctgcactttcattggctcaaagtctcaaactaaaagttgggagtcccagtgagggattcctgtgaagggaagggctttggcagtgttctggaatctgctatacctcagggagagacgattcttcatgaatccacactctaaaacctcctctgtgccttttatgattaaggttcttccctacttccttcccacctcgtggcctctcaataaaaaccccctggcttcctctgccacaccccagaccctctctctcctcacaccccttgctgatggttccccctgggcttcacttgtcctccccactcttccccaagcaggaaggggctgctcctccgyctctgccagtacagctggggcctggtgctccataagcctggtttaatgtggttttgctgagacctggagactcgagtttaagtcatcttgtagccctgcactgataatcccctcagcttcagtctcatcctgtgtttctgttagttgggcctcgattcttcacttagcac

SEQ ID NO: 749917 - DNA, 431 bp, Homo sapiens
ttttttctcagtgagccattgcaggtatttgacttgagtagcactctctgattttgaagaccagcccttttcttgctatgtctctccagtctcaactacatcttatcctagctgtctgtttgtttggtctgacttcaccagcccattttggtcttaaaataaaatgatctggatctgaattttgctctgccacatttgctggtgatttgcagtatgagtttgacaagttacttaacctstatgagcctccatttcatcaaatgtaaaaccaagttataatatccacctcattgcattgctgactattaacaataactcaagttaaacggccctctttaatttgtctttataactctgttagcaagttcttcatactccagtttaaccctcttttaaccatttcttatattggcttttctaccttatcaata

SEQ ID NO: 749918 - DNA, 589 bp, Homo sapiens
aattttagcaatgtcaggtgtgtacttcaatcatccatcagttgatccatccatgtatacttttttctacttaaagtttaagaaactcacaaaaatatatgtagaacaaggagaaagttaaatcaaaataggtaaaatacctaaggcaaaggaagacaaggtttggaaagtaaaatggatttaggagtgagcctagttcttaaaaatatttgtcataaaattttatgcatctgtagggggaggacattgtttggtgttaaggttactaggagccagtgaagaaagcaattggttatttgatttttagtatccataaaattaagatgtcagttgctcacatgaatcatagctattcctagaaccagratcaatgagaaaatcctctcatgggatatcagaaggagtttgctgtgtaatataaggaataacgtaaaaacatattcaacttatctttacaccaagcacagcaacatatttcagagagaaatttcttatatcagtcttggtttatatgatagtatccccactgtgacgacgtaacttaaataagaagtacagctgtagaaaggagtagacattggttcataaa

SEQ ID NO: 749919 - DNA, 592 bp, Homo sapiens
gagcttctttcatatattatagttactcctgttcctctctttacaataacaaccaaaataattagctcttaatgagcatctgctatgtgtgccaagcactgacaccatgagctttccacacattactcatgcgttcctcacacccaccctgcaaggtggtcaatctcactctcctaagagaggcgacaaagagtcagagtcagtcacagacagaggagaggttcgacacagtcagtgtgactccaaagaccacgtcctctctgcctcygacaacaccattctgcctatacacaagccatgatttatggcaataccatccttgtcaccaataaagagagagggggaaacagggcagttaacatgtgctgggaaaacccaaaagataattctttaagaaccaggagcatatctcttcccccacaaacgctctcttgattgggctagtcaggtggacaaaagaaaacatagaaaaatgggtggccacaggatggggcaagaatggagggagataatcacctgatagagaggccctggttgagatttctgcagagcttatttccagggcaaatcgtgaaggcaagctggctgtatg

SEQ ID NO: 749920 - DNA, 592 bp, Homo sapiens
gagcttctttcatatattatagttactcctgttcctctctttacaataacaaccaaaataattagctcttaatgagcatctgctatgtgtgccaagcactgacaccatgagctttccacacattactcatgcgttcctcacacccaccctgcaaggtggtcaatctcactctcctaagagaggcgacaaagagtcagagtcagtcacagacagaggagaggttcgacacagtcagtgtgactccaaagaccacgtcctctctgcctccgacaacaccattctgcctatacacaagccatgatttayggcaataccatccttgtcaccaataaagagagagggggaaacagggcagttaacatgtgctgggaaaacccaaaagataattctttaagaaccaggagcatatctcttcccccacaaacgctctcttgattgggctagtcaggtggacaaaagaaaacatagaaaaatgggtggccacaggatggggcaagaatggagggagataatcacctgatagagaggccctggttgagatttctgcagagcttatttccagggcaaatcgtgaaggcaagctggctgtatg

SEQ ID NO: 749921 - DNA, 581 bp, Homo sapiens
gttgattgccttttccctgtataaacatactttcttgtttctttgcatttgtttgccccaactgttatttaccacctcaggcagctgcaaaattaatcagtcatttctagttgttttttgaaagacttttcactgaacaagcttagaattaggtcaaataaagatagtcttgcaagtgagcttttccagggaatcactagactgggcatatgatgacagttttccagaaatgcagctttaaaggtgtttcaaacccattctgccccctccagtggctgccaggccactagttttcacgaagattgcaggctcttggtattcaagactactacagaactggagaagaggggattggaatggtacaagttaaaatgccatgaascttgctcttcttaccaagatttagcatttctcttgaataaatgcttcctgtattattgcaagtctttggttaattttcagagttctgaaaaagttggttctgacacttttggccagttttctggttattttgtagtggagggaattttcagatgttcttataccattacatttgctactgtctgcctgtggaatagtgt

SEQ ID NO: 749922 - DNA, 610 bp, Homo sapiens
ttttaactttgtttagttttggccacatttgagtccagattttagtcaagcagttgagcaaataatttagaaccatccccagctgcttgagttagcactgcgaatcaaaaatttctgatgaatatcttaattcagcccgatttaaattatgatcctttttctctctggtctagcatggttagaatctcttttaccatgtggtcccaaggttttcccctgtaaattaacaaaatcagccgttctttttgcatgttggtttatttttatgtctgaaggcartgagggatggaagggtacagtcattatggtgtctttaagcaaagtagcgctagtcttatcagatatactctgctggtacaggaaacttagtagatttggagaacttctgttatttaaatcctcccaaatgtctccatttaaattcttggatcctgctctttcataatcagtgccctcttctgctcctggccaggatgaagtaactgttactagacttaccctctttctttaaacaatggttgcagttcctattgctgtgtaacaaacccactcaaaacttagtggcttaaaacaacagcaatcatttgtttccctctcatggtttctgtag

SEQ ID NO: 749923 - DNA, 556 bp, Homo sapiens
agccgtgcattaggtaactgtcttagttctgttactacacatgataacttaagtaattctttcatcatgggatatcatggactaccagtgtttaaccctcttatgatcactgcagcctttctgtcttcaaacccaaccagatcagataccaatcacacatttccatttgccccaggagtacattrcctgaaatcatttctatacccaattactataatggtcattgtttaattacagaccactacagtacgctgtaactggctaaagcagaaaggaatttattaggtgaattggcctccagaatttctggggtgacgtgggtaccataccgtcagtatcgggctgtcaagagaaatgccttcaatcacgcagtgagatgatttcagcaaaaattctgctgcggctacagtttgtggttgaatacatctctttataggtgactagagttatagttaggtactttaatagctattgtattgatgtttgaagagaggaattacatggattatattctaaaactttatgtttattttgactgggacttaaaagtattttt

SEQ ID NO: 749924 - DNA, 602 bp, Homo sapiens
aactgctgagacttcctatccacaagccaacaaattcagttgaacactgtaatcaataacaaagaaataaccaaaatctatgagaataagaacgtggaaaatcaaccaaaggtatcaccaaatgaaccaaagatttcattactgttttagtcaaagaaaaaatttactaatcattgggttcaacgtcaaacttctataaaacacttaaaatgactcattttatacartttttaagaaaggtataatataaaataaaaatacaaatgtattttagtttacttttctaggtaaagaagttaatatacacctaaatccaactctaaaattatgtgagctacgaatcaatgacattataaaaatgtatgcaaataatgttcaaatgcaaaattaaaatattcagggataactgttttaaagttagatttttctctaactgaaaactgttaaaaaaaatacagaaaaccattgaatttacaataaattccttgcagtttaaacaattatagatgaatctgaaatcaaagatttgtgaacactttacaaaaatcagcatcactaacccttaaagaaccaagttttgggttttttttttttaatctttt

SEQ ID NO: 749925 - DNA, 617 bp, Homo sapiens
tataatataaaataaaaatacaaatgtattttagtttacttttctaggtaaagaagttaatatacacctaaatccaactctaaaattatgtgagctacgaatcaatgacattataaaaatgtatgcaaataatgttcaaatgcaaaattaaaatattcagggataactgttttaaagttagatttttctctaactgaaaactgttaaaaaaaatacagaaaaccattgaatttacaataaattccttgcagtttaaacaattatagatgaatctgaaatcaaagatttgtgaacactttacaaaaatcagcatcactaacccttaaagaaccaagttttgggttttttttttttaatcttttattttaggttcaggggtacacatgaaggtttgttataaaggtaaacttgtatcacgagggtttgttgtacagattatttcaccatccaggtattaagyctagcacccaagagtttttttttttgcttctctccttcctccctccaccctcaagtaaatcccagtgtctgttgttcccttcttcgtagaacaagtgtttttttaatttccacaaaaatctccatcactctctcatttgcttctaacgactgaaacc

SEQ ID NO: 749926 - DNA, 643 bp, Homo sapiens
gtccctgctccctcacactgagacacaggggaggcctttatatggcttcacaagtgagagagctggacataaaaaaaatctttccagccaggcatggtggctcacccctgtaatcccagcactttgggaggctgaggcgggtggatcacgaggtcaagagttggagaccagcttggccaacatggtgaaacccagtctctactaaaaatacaaaaattagcgggcatggtggtgygcgcctgtaatcccagctaccgggaggctgaggcaagagaattgcttgaacctgggaggaggaggttgcagtgagctgagattgagccactgcactccagcctgggagacagagcaagacgcagtctcagaacaaaacaaaaaacaaaagaaaacaaaaacccttccaaccaaggctgtctaacttgaggtttggagagacaccctggcccctcccagtgcctgcagcaagcagaaagcccctactccaggcctgcaaccgggcctggcaggggcaagaaaacccagcctggctcagggctggctcgaggtaggcaaccagggggctgaacccagggtcagagggtcccaggcctctctccctcatggttcagaaacagtacccaggttgctcgttcattcaacagac

SEQ ID NO: 749927 - DNA, 604 bp, Homo sapiens
accctggatccctccctgctaacaccagggccacaagagcacatcgcgcatgcagagccaattgtgttgatgttttctcaggttttctgttgtctgaccatccagccaaccagtttttttatgcagtcgttcatccagccctctacacagccaaccaayctccatgattgagtctctgccacgggacatactccctgctctcaagagactcatgcttcgaggcgggggaaagggggcataaataagaagcaattaaactggctctgccatgaggagtgggggcaagaggtgagctgaagggaagaacagtggagggaatgattgcctcaatctggaggtcagaaccgccctaccacggagatgacctgagttttgaaggatgcgtagaagtcaccatcagacaagagggagggcagctcaggcaggggaacagcaggggcaaaggtgtgggacagcactgggcacttggggactcactgtgactcagcctgtgactcagccctcctgtggcaccagggctgctggatggaaagggaagagcagggaaggccagagccaggcagtggggagcgagggcaggaggggagatgggaaagagggcctc

SEQ ID NO: 749928 - DNA, 506 bp, Homo sapiens
ccgagatagcaccactgtactccagcctgggcaactgagcaagactcaatctccaaaaaaaaagaaagaaagaaagacacaggacagtcagctgcatcacccactcacagaagaaccttagaaaagcagcagagctatattcaattccttccctatcttttttaaagaaatgcatcatgaattatgtcacattttagcaggagttgtccaatgttagcgtacgttttcagaagcaagttacttcacaacttttaagtatgaaccagtrcctttaaagagttaacaatacttattaaataataaccatggctgaaagtggtaatgaataaacagggaattcattacaacattgtttctgtatatgtttgaaaacttctacaaggttttcacattgaagctttgtatttttagttattaaatacgcatttaacagaaaagtcacagaattctcacttgaaagaattctatctttcaaaatccttagtacaaaatatagttttccatca

SEQ ID NO: 749929 - DNA, 523 bp, Homo sapiens
ccccactggggcactgcttagtagagctgtgagaagacagccaccatcctccagaccccctgatggtagatccactgacagcttgcaccgtgcacctgaaaaagccgcagacactcaaggccaaccagtgaaagcacatgggagaggggctgtaccatacaaagatagagagtcaggattgcccaaggatatgtgagcccctttgtatcaacacaacgtggatgtgagatatggagtcacaggagatcattttggaacattaaggtttaatgactgccctattggatttctgacttgcatgtggcctgtagcttctttattttggccaatttctctcatttgraatgggtgtatttacccaatgcctgtacccccactgtatctaggacgtaactaacttgctttcgactttacaggctcataggcagaagggacttgccttgtctcagatgagactttggacttggactcttgggttactgctggaaggatttaagaccttggtgggactgttggaaatgca

SEQ ID NO: 749930 - DNA, 500 bp, Homo sapiens
actgtatctaggacgtaactaacttgctttcgactttacaggctcataggcagaagggacttgccttgtctcagatgagactttggacttggactcttgggttactgctggaaggatttaagaccttggtgggactgttggaaatgcatgattctgttttgaaatgtgaggccatgagattggggaggggtcaggggtcgaatggtatggttcagctatgtctccacccacatttaatcttgaattrtagttcccataatccccacatgttgtggaagggacttggtgggaggtaattaaatcctgggggtggctacccccatgctgttcttgtgatagtgagttctcatgagatctgatggtcttataagagatttttcccccatttgcttggcacttctccttcctgccaccatgtgaagaaggatctgtttgcttcccttccaccatgagtgtagtttcctgaggcctccctagccctgcgaaactgtgagtcaatt

SEQ ID NO: 749931 - DNA, 388 bp, Homo sapiens
catgatctaacctagaccatggcaaatgccatgagagactgagagtgaagagactaaagggcttgagacataaaggagatgggattcattctggatctttaggagttactagggtgttgtaaggagtaggggatgggtcctctgggcagctggaacagcgtgtgcaaattatcaaggtgccccgagcctcagttggttagggcatggtggaaactgtgtgtgctaggagcatggggyccatgggctggagagaaagggaatgagatcccggctcacacacccatcactcttgaataggcgggacgcctgaccacccttgggaagaaaaatgtgagaataacaaggtttgaataacagtactggggctgaccacagactgctagagttc

SEQ ID NO: 749932 - DNA, 388 bp, Homo sapiens
catgatctaacctagaccatggcaaatgccatgagagactgagagtgaagagactaaagggcttgagacataaaggagatgggattcattctggatctttaggagttactagggtgttgtaaggagtaggggatgggtcctctgggcagctggaacagcgtgtgcaaattatcaaggtgccccgagcctcagttggttagggcatggtggaaactgtgtgtgctaggagcatggggtmcatgggctggagagaaagggaatgagatcccggctcacacacccatcactcttgaataggcgggacgcctgaccacccttgggaagaaaaatgtgagaataacaaggtttgaataacagtactggggctgaccacagactgctagagttc

SEQ ID NO: 749933 - DNA, 529 bp, Homo sapiens
aaattgaaagataaatttcaaccctgagcgcaaagattgacttcccaggcatgactctacacttgtgaaatccttatgtgttcattcattaaggcttgatcaatagcctagtgtgtccatagagtatgaaggtgtcatggatgacgattcgactcagcaagtcatgcaaagaaaagcttacatcacacaaaagacagacatttagcctgcgattgacccaatacagtatcttaattgaaggaagaataccttccgtgagcacacggactttgggagcactgagctggcctgggaggtgagaaaaggttccccctccacccaratcagaggcctgggagctggctcttgggggatggggagatggctgcctggcagagagagcacagaacatgcaaagcatgcagctctagaaagtcttggggtgttctggaaagggggagacattgaaatgacctgcagttgtgggtgaagagacagcagatgaaactgaaagataggatagtcagattgaatatttcatcctagcaaa

SEQ ID NO: 749934 - DNA, 609 bp, Homo sapiens
atcaataatgtgttccttcctatttgatgagcaggtgcctatatgtgaatgtacaacaatgcatttctccactatttttatgatggatatttgggttgtgtgctagttttgtattggttgaagttcctccaaagtaacagaaccagtaggagatgtatgaagggatttgttacagaaaagtggcttacaaaattgtgggggctggttccgtagctgtagagctgttatctctttgctttgcggcgctgtggtgaattccccgcagaccaaacctcccattctccttagcactgtcagctgaaaaccgcctattaaagcctcagtaatggcggatgcctctccccacaccaagctcaatctttccaggtggactccagactgctaggctggcagtgaggatttcaagccagtagttcttagcttgccgggctccctgggagtggractcactgagcgagatcacttggctccctggcttcagccccctttccaggggaatggatggttatcctctctctctggggttctacgtgccactggggtatgaacaaactagcttggtgcctgcccaaacagccgcccagttccgtgcttgaaacccggggccct

SEQ ID NO: 749935 - DNA, 588 bp, Homo sapiens
aaagtatagaggtgtcattattatacattttcttcctaagtgagtatgatgaactttatcggttgaaagattgctgctgagagtcagtggcactgagtcatattttaaccttttcaatatgacagaataaaccattagctgtaatcttattcatattgtttctgtggttgtcagagtctgccacaaagtcccagcactcccttcgtcattccaaagcatcacaattagtcttaatttctactcccacttcatctgagataggactcttttgtctgtgctaacactgacaggttttcaaactgtctttttaaacattakactttgtatttgtaaggcccctttccactgctagagccactggaattgcactttgaagtttgcatataatcctttattagtcttaatatgtgaggatcctaactatacactaaggcataaagaattccctccattcagacaatgcccccaatcctatgaagcagggagtgaacctggacatgaagcagggaggaggaagtagctggatggtcagatggagccattcctccatgatgtgttcaaaatgatttcttatacctccagtgaatt

SEQ ID NO: 749936 - DNA, 542 bp, Homo sapiens
gctgcaaaaaaaaaaaaaaaaaagaaaccccttaaacaaagcacgactactctatgggaccagattctttgtttgcaagtcacacaaacccaaaccaggataggcttaggggagaaagggagtcactgtccccaaaccatcagcctggacagaggagaccacaagtggcagccagcaccccgtggttctctgtgctccggaagaatatgaaattctatttggaagcggggaccacccacaccacacgcatcccgtgacccagagmaacacctgggttttccatcagtccagcgtgacacagatcgtcggaccacagcgtcggccacggaacaatggccacaggctgccagcagggctactgcattgaaaccctctctccccttccctttgtccacttccgtcaccctgagaaatcacaaagtggagaactgatttttgcctgtatctgtcgcattccttccagtgaagatcgggtagttttatgaaagggctttttcttccctttgtgttcaggggtattcactccatggggaaaatctctc

SEQ ID NO: 749937 - DNA, 616 bp, Homo sapiens
gtgcaccaccatgcatcctaccctgctaagttttattttccctcttgttagcatatgatcctttgctccctaaggccactttccaagaagttgcatgtagtaccccacaatatcccatttcctgaacttattatgttaacttgggttccctctaaaagtggaagctgataataagggcttgaatgcaggtaatttattttggaaatgtattcaaaggaagtggaatggggcaactgggaagaggaaacaggagaggagggaagaatgaatccaaggctgcatgacccaggtggttaccactgtaggccttgggattccctcctgctgagactgcttccaggagcagagtgaaacacacytcaggactgttcaccaaagacacggatgaggggagtatttactccgtctgccaaaccccattggtcaagggttgctctccaggatgttgaatcccttgcactcatggttttgagctgaacaggctcctgcagagactctgtgggggttgggggggcgggtaggaggtgcagtagaggtacttgggggctccacatgtgcccaacttcttacagcaagagccagggcaaaaagatggactgacagaaagtgagatgga

SEQ ID NO: 749938 - DNA, 616 bp, Homo sapiens
gtgcaccaccatgcatcctaccctgctaagttttattttccctcttgttagcatatgatcctttgctccctaaggccactttccaagaagttgcatgtagtaccccacaatatcccatttcctgaacttattatgttaacttgggttccctctaaaagtggaagctgataataagggcttgaatgcaggtaatttattttggaaatgtattcaaaggaagtggaatggggcaactgggaagaggaaacaggagaggagggaagaatgaatccaaggctgcatgacccaggtggttaccactgtaggccttgggattccctcctgctgagactgcttccaggagcagagtgaaacacacctcaggactgttcaccaaagacayggatgaggggagtatttactccgtctgccaaaccccattggtcaagggttgctctccaggatgttgaatcccttgcactcatggttttgagctgaacaggctcctgcagagactctgtgggggttgggggggcgggtaggaggtgcagtagaggtacttgggggctccacatgtgcccaacttcttacagcaagagccagggcaaaaagatggactgacagaaagtgagatgga

SEQ ID NO: 749939 - DNA, 628 bp, Homo sapiens
aggggccaagaatttctctcatgaaccccattttcttgatttcaaaatccacttgccttgggagaaacgcttgaacctgggaggtagagattgcagtgagcagagatcgtgccactccactccagcctggcaacagagattcagtcttgaaaaaaaaaaaaatccacctgccttggtacaagatgggaaagtctttgggtgtttattggctgtatgttcaagatgaatcacctgtgagctgtggcatccatgaaaatgtggagctccttaccatcctcaagaactttctcaccactcaacctctgcatgtgatattcctccacctaaacactacctccctacccccatactccaccctggttggccaacttctaatcatttttccaatcttagcctaactaccaccgccctgggargtcttcaccagcaactgtgccaggcacccttgtgcaccaagagcctttagtatcatttctagcatcatggtatatttatatataagaataattgcctgtttatctgtctccccagcctttttatagcatgaactatgtccttcaccactgtatccctagcaactagcacagagcctggcacctagctcacaatcaataaatatttgtggaat

SEQ ID NO: 749940 - DNA, 610 bp, Homo sapiens
tcccttgcacaattctacttcctgccttccctattttattttttcccaggtacttatgccctctcaataaacttcttgtgcccctaactccatctcagcatctgtttcctggaagatccaactggctcaccttggagagaacagaaactaaaagccacaacatgaagcgtatacaagaaccaggtaagttaagtaactcagagctatctcttgtcccaaaggatgaaaacctccgagcgccgtggaagagaacagtctgattaagttggctcaaactgccaggaagctttctgagcaacagcagatgttggggcttcgagaaagattgctcyctgcttttggccagaatccctggggtcatttaggtggtgatgttgccagttcttctcccctctggccaacacctctcaatccattatttgggataccaattataaacttgggacaagagcctaatctcccagcaaggaaaacctgggctgtcagtctactttaccaatccctgccttggaaattgctatatatctcaggctacaagaaagtagagggagacaagagaaaaagcatccctcacacaaccttcagatcttccgctggagagatagcccca

SEQ ID NO: 749941 - DNA, 610 bp, Homo sapiens
tcccttgcacaattctacttcctgccttccctattttattttttcccaggtacttatgccctctcaataaacttcttgtgcccctaactccatctcagcatctgtttcctggaagatccaactggctcaccttggagagaacagaaactaaaagccacaacatgaagcgtatacaagaaccaggtaagttaagtaactcagagctatctcttgtcccaaaggatgaaaacctccgagcgccgtggaagagaacagtctgattaagttggctcaaactgccaggaagctttctgagcaacagcagatgttggggcttcgagaaagattgctctctgcttttggccagaatccctggggtcatttaggyggtgatgttgccagttcttctcccctctggccaacacctctcaatccattatttgggataccaattataaacttgggacaagagcctaatctcccagcaaggaaaacctgggctgtcagtctactttaccaatccctgccttggaaattgctatatatctcaggctacaagaaagtagagggagacaagagaaaaagcatccctcacacaaccttcagatcttccgctggagagatagcccca

SEQ ID NO: 749942 - DNA, 579 bp, Homo sapiens
ggcatggtggttcatgcttgtaattccagcgcttaaggaggctgagttgaggtgggcagatctcctgaggttaggagtttgagatcagcctggccaacacggtgaaaccccatctctgctaaaaatacaaaaattagctgggcatggtggtgcgcacacgtaatcccagctacttgggaggctgaggcaggagaatggcttgaacccaggaggtgggggttgcagacagctaagatcgtgccactgcacgccagcctcggtgacaaggcaagactctatctccaaaaataataattytaaataaagcaaaataaaatgtatgcataaacatatatatgcaaaggtatatgtatatgcacatacatgcatacatgtgtatagatatatgtacagtatagcctgccagctatgttaaaagaagttttttgcaaagccaccttttgtgtatggaactgtgtgtgaaaaaagacttatagaactgtgagaaacttggataagatgaggcatgcgtacttccccatctgaaatagccaagatgatgaccattcttataagtgaaagagttttttttttttgttt

SEQ ID NO: 749943 - DNA, 579 bp, Homo sapiens
ggcatggtggttcatgcttgtaattccagcgcttaaggaggctgagttgaggtgggcagatctcctgaggttaggagtttgagatcagcctggccaacacggtgaaaccccatctctgctaaaaatacaaaaattagctgggcatggtggtgcgcacacgtaatcccagctacttgggaggctgaggcaggagaatggcttgaacccaggaggtgggggttgcagacagctaagatcgtgccactgcacgccagcctcggtgacaaggcaagactctatctccaaaaataataattctaaataaagcaaaataaaatgtatgcataaacatatatatgcaaaggtatatgtatatgcacatacatgcatacatgtgtatagatatatgtacagtatagcctgccagctatgttaaaagaagttttttgcaaagcyaccttttgtgtatggaactgtgtgtgaaaaaagacttatagaactgtgagaaacttggataagatgaggcatgcgtacttccccatctgaaatagccaagatgatgaccattcttataagtgaaagagttttttttttttgttt

SEQ ID NO: 749944 - DNA, 584 bp, Homo sapiens
acctgatgccaaaatgtcctgatgaaaagtgaaacattcagccagttgtgtgaattctttgtcccgaaatctaaaagctcagctatttggcaggatagcagaacaactgaacagtcaacatatttttactgtggatggaggagctttaggattgtgtagataggatcttctgcaaaaatcaaaatgcaaaggcccagtgtccctcattagtgaccaagtaaaattcagagcattaaaatcacagaagtttaaagcacaaaggaatcctgcccaactctctttgtttacagataaagaaattgaggtaactcctattcattctttagaacctagatcgaatgycattacctatgaggaggctttctccacctctccagcttattctctactctggctctcatagcagacaaccaacaacctattctaatacttaccccttcatatgaaatgtatttgtttgtacatctgtctcctcctctaatgctgtaaactacctaagtacaggaccatgagctctacacacccaacttctagcacatagaggatactcaaagagtgatttttggatagacttgagctgagta

SEQ ID NO: 749945 - DNA, 664 bp, Homo sapiens
agtcatagtgctggtgggttaaatcaaagaataaatgcagagcaaaaatgtcaaggataaatatctgccaccatgcaactcaaaaacaatcacacatatggcaggcttactgaacactttcgttttacatcgtttattgtggtagctctataggattatcacatcttttacaagtttttatttgacaataatttgtattcattcattcattctttcattcattcattttcctaccagcttactccagttcagggttgtgggtggctggagcttatccyggcactcagggtgcaaggcaggacccaatcctggccaggacaccattccatcacgggacacactcacacacacatacacacacatgcacacacgtacacacacacacacgctcactgagactgggacaatggagacacaccagttcatctaacatgcgcatctttgggatgtgggaggaaaccaaagtacccaaagaaaagccacgcagacacaaggaggatgtgcaaactccacccagatagtgggcctggctggaaatccatttctcccctcaatgttacaacgaaatgacgttgaacagaatggtgttattcaaggacatgctgtactaacaaatttgagctgcaattgaaattcatcgttatttgctgtgctggagatgatt

SEQ ID NO: 749946 - DNA, 515 bp, Homo sapiens
tgttgtcaggttttccttctgaaaggaaaagcttcattaaaattagatgaagagcacacagcttccagttgttaaactgtcaaccctggcaaaaacagtggtgaaggcaaaccaaagctttcaagagagcgtgttyttgaagagagcatgttcttgccggctgaactaatgaagtgcagaccccctgctgaagtctcaagtagattgccagttcacacaaatgagctgaaaaataccattcagttttaattgtgacatttctttcgcgaggcagttcctttcactgggtttttgcttttttcttgtttttgtttttgattttttacaaaaattcttgacgaataaaaaatgaaaccagcaggaatgttctttaaagagcccaagaaatggttttgagaatgcactgacacttgaaacatgggagaaatcattattttaaaatgcccaatccgcttccctcagttttgaacaaaatcaacgacaaagcaaaaccagttttcaagtgttatagtaat

SEQ ID NO: 749947 - DNA, 607 bp, Homo sapiens
tggcagggatccagttttaaatagggtagtcagggtaggcctcattgaaaggtgaaatgttggcaaagacttgcaggtatgagggagttagacaggaaaatgtcaacgggagcatattccagacagagagaagagcctgcagactagtcccaaggctgaagcaagtctggagtgttagaaagaccacaaggaggcaagaatggctcacttggagtgagcagggcaaagtaacaagtgatgaagtcaagagaaaagatgatgagattatctgggaccatgcaagtcactgtaattrtgaggtctcctttgactggtgttccaggcctgcagcttccttcaataccaaatgcaccatggttatctcagacttcatatatgctgtttctgaactttagataaccttcccccagatcaaggtgtggctcgctcttttcttcatgcagttctcaattttaatgccacctcctcagcaaggccttttctcatcattctggtccactgccacactattgcactttagtttataaaattataacagtcaacaataagaaaatccatgtattatgcaagtaactagtggcttccatgtaaagaaacctgctccctc

SEQ ID NO: 749948 - DNA, 657 bp, Homo sapiens
tgcattgggaacagagactagggaggcaccatgtgtaaaagaatgcctggacatcaggcacctcagaccgtttgcctattttgcaacaagaattatatagatcttgtaggatggaaaaattgaaagtgccattttccagctatttggaactactgtcgagtttgtattggggtcaagtggcattgcagaagaaaataagatgcttagattttaggtcaggtgagagttgaagaggttttaagttcttaagaacacaggctaagggagaagaaggaggaatggaaggtgtaagcttgcccatagtgaaggaggcaagcccagaggaaagagagtagagacacggagaaggggtgggggttcttgccttccagaaaagcagagaaggggtcggggcacagaaataaggggttggggtgcagagataagaggttggggtkcagaaataagggatcagggcgcagagataagaggtcggggttcctgtccctccctcagaaaagcaggacttgccgctaagggtgaaggagaaggggttgaggggttcttgcccctcccctagaaaagtggagaaggggtagagacacagagagaaggggttggggttcttgcccctcccccagaaaagcgggacttgctgctaagggtgaaggaccaagg

SEQ ID NO: 749949 - DNA, 662 bp, Homo sapiens
aactatcacctaccttaaaagaaactttttgacttttgacctccattccagctaccaaacccacttttctactactttgtaaatatcctctctctatacataaaagttttctacacttgctgccttcactttctcactttccattttcttcttaacccatatgaatcagaatttcagaccaatcattccaacaaaaccatttttagtccaaataaatgrccaccatgctaaatcaatggccaattctcaatcctcatctaaattaaactctgcaaatgcagctggcattttgagcactaactccttctaaaacatgcttatttaaataggtcctcccatttcacctgcatatccttctttatcttcttagcttccagcttctgtttttcttcctgacctctttatgttagagtaacttggagctcagtagctcaaccacatctttcttcacacacactcttcagatgatctgatacaagctcactgctttgaatgccctttacaaacagatgatttctgactcaaattgccagtccgaacctccccactaaattccaggcttacatttttaagtgcctactcaatatttccacttacatagcaaacatgcatctcgcacttgtgatatccaaaactaacctcttgattttcccccaagtcct

SEQ ID NO: 749950 - DNA, 631 bp, Homo sapiens
caggctgaaggttgtttactgcaggaattgtaagtgcaaaccattcacagtcttgctcagctaaagggatagtaaagaaacagtcttttaaatctatgatgattaaaggccaattttttggaatcaaagcaggagaaggcagtcctggctacaatgctcccataggttgtataactgaattaatggctctaagatatgtcaacattctccatttacctgattttttcttaattacaaaaactggakaattccaaggggaaaatgttggcgctatatgtcctttttctaattgtttaataagtaagtcctctaaagcctccagtttctctttgcctagcagccattgttctatccaaattggtttatctgttaaccattttaaaggtataggttctggaggcttaacaatggccaccataaaaaatgatatcctaaaccttggcaagaactttgtctttctgctttaagcggttctttcaaaccttgcaaattttttcctagtcccataccagggacatgccccatttcatgcatcatatgttgactttgagggctatataattgttctggaattagaacctgtgctccccattgctgtaataaatctcttccccataaatttataggtaca

SEQ ID NO: 749951 - DNA, 594 bp, Homo sapiens
aacttccccaactagacaaagagcactgatgaaatacctagagctaacatcatttttaacagcaaaatagtataagatcaggaacaagagaaaaatgcctgctctcaccacatctatacaaacgcatactggtctaggtaagaaatacagcaagaaaaagaaacaaaagcaatcagattgaaaaggaaaaaataaaaactgtttttattcatagatgtcataattgcctctgtagaaaatctaatggacactacagaagaagctactagaatgaataagtgagtttagcaaggttgcaaagtaaaagatcaatatatgaaaaataattgtatttttatgtactagcaatgaaaaccagaaattaaaatttaaaagactatgtataatactataaaaatataaaatcagactaaatctgtcaaaagatgtgctaaaactgaactytgaaaattacgaaacagtgctgagaaattgaggaggacctgaccaatgcagagaggcaccgtattcttggttgggagactccatattgtaaatatgtcaatttttccccaaattgatcaatagattcaatgcaatcacaggcaaaatccc

SEQ ID NO: 749952 - DNA, 591 bp, Homo sapiens
gattatttttgacaccctcctgggctgacatgctgtattagtccattttcacgctgctgataaagatatacccaagactcggtaatttataaagaaaaagaggtttaatggactcacagttccacgtggctggggaggcctcaggatcatggcagagggtgaaaggcacatcttacatggcagcagtcaagagagaacttttgcagggaactcctctttataaaaccatcagatcttgtgagacttactatcataagaatagcatgggaaagacccacctccrtgattcaattacctcccaccaggtccctcccacaacacatgggaattatgggagctacagttcaaggtgagatttggatggggacacagccaaaccgtatcacatgctatgaaaccaaagacagttaggaacctgccccaagtcacacagcaggtcagcaggagagcggctcctgccctcagtctcctgccccctgcttagggcctaggccttctcctgctgcctcagtcacacccacaccctgccaggacacctcctgagcattaatctaatggaaaggctatttttgtcactttgcaaggccaaaa

SEQ ID NO: 749953 - DNA, 492 bp, Homo sapiens
gaacttttgcagggaactcctctttataaaaccatcagatcttgtgagacttactatcataagaatagcatgggaaagacccacctccatgattcaattacctcccaccaggtccctcccacaacacatgggaattatgggagctacagttcaaggtgagatttggatggggacacagccaaaccrtatcacatgctatgaaaccaaagacagttaggaacctgccccaagtcacacagcaggtcagcaggagagcggctcctgccctcagtctcctgccccctgcttagggcctaggccttctcctgctgcctcagtcacacccacaccctgccaggacacctcctgagcattaatctaatggaaaggctatttttgtcactttgcaaggccaaaaacattgcctatgtcaggagatccccaccctgccctctcacccacccctcctcaaatctccaggtccagtccaaggccacactgccccagaagggc

SEQ ID NO: 749954 - DNA, 490 bp, Homo sapiens
gagatttataacacatgtgcaagtgcagcttatggcaacagtagcacaagggacaggaggaaggaaaggaaaatattctgttataacagtattcctctacaggtgaagaaatataatatcatatgaagtgggactgtaataagttaaagatggaaactgtatatgctagagcaatcattataaaaataaaaaaagagattactagtaagccaataatggagataaaatggaatcgtaaaaaatcacttaattgatacaaaagaaggctggaaaggagagacaacaaagaagagatgtracaaaaagacaataaaaagcaagctagtttatttaaatttaaccatgtaaataactctatcaaatgtaagtgctctaattctagaaaaggcaaaattggaggaattaaaagcagactgggggatgccaagggctgagggtcaggggagaggactcactacatgctgattctggtggtggtttcatgaatata

SEQ ID NO: 749955 - DNA, 639 bp, Homo sapiens
aagactcaactttgaaccttgagggaaaaattagactctcaaccttgctcctttctgatgaatgggaacaaaaccaattctcagagggtaaataggatggggaaatgcagacaggctcatcagtgcccaaggaaaccaagaagggccaccggagtgtcaaggctctccagggaaaatgtgggtttctacagcatgggagactccagagactttaacacgcaccaactgaaatcaaggctgctcggtgcatgtgttggtttcatggcatggatatttatacaagaaagataaaccctctaggaagtgattaagagaaaaatcaaaagaaagactgaaaagcctgggcctggagtgacgcccacctacccttagatacctcccctgtacctaatggacttgatattctttgcaaataggcataatcaytactgttttgcaatttcgtgaataatctacccttggagggaatgaagtttcttatcctattctgccagcctcctcagccaccctccctctcccccagcctataatctaaggactccacctctccccctcacacactattacagagtttgtttgaggagtgtacaagtgccttctagaaagaggcagactgggtattcgtttactctagtgcta

SEQ ID NO: 749956 - DNA, 606 bp, Homo sapiens
aaaatgtggagcgggccatattagtacccatatttgaccagacaaagtccaagctgctttatgtcacaacgaaaggcttaatatatgtgatgctgggctttctctctagcctcattgcctgcccttgctctttaaggaataacaatgtcatgccacttgtaattaccccaaacaatcaaggccaaatgttttctagctgtctgctcagagtgttccttctgcctgaaacatctctcttcctctttcctccaccatctcattgactacatcatctctgtagtctgttctcccagttggctgggcccggttggttatagatatgaggaagtaacttttgcaaaccaagcccaaccttttaagcagacagagtagatatctgcccacatggtttgaatggtggggcttgaggaagctgataactaattatcttttattatttaaaattatttcattatagggttattcctctrattttctttgcatttttgttcttggagaggtttctatatatttttctgagaagagtttaatcccctaaacctttgtgagctcccacacatgagaagggggccatgacaggtacagagggtgtacctgtccctctcg

SEQ ID NO: 749957 - DNA, 597 bp, Homo sapiens
aatgaggtacgaagtttcattaaaataattagtaacagaatagactctgaaaattctataaaatgtttagaaatgttttatgctttctcaagaactattcacaaatgtaaagcaaactgtctccaaaatgttaatggatgtcaacaatgtataaaacttatgaaaataattacagaaatgtttaggctgaaaactggtcttcttatgaaagtccaattctatgctaaacagtctcacaagtgctatctcatttaattatcycaattctgtaaagtagatattattaactttaccaatgaggaaactgaagcttaaagggattgtataacttggctacattttacacatttagtgaaagtatttagattcaaaatcttattctttgaatataaatgaaatgttttatatattatgattctaaataaacttaaatgaacctacagctattaggtttatgataaattattaagattgagagctatacatgtaaaaacattgttttcctcaaaaataaccttaatatcactgttttttgggtgtagaaattactgaattactggattaagtggtcataaatttgctagcaggacattaacc

SEQ ID NO: 749958 - DNA, 621 bp, Homo sapiens
gatatggaattgcattagtcagggttctctagagggacagtactaataggatagacgtatatataaaagggaacttactaaggagtattgactcacatgatcacaaggtgatgtcccacaataggccgtctgcaagctgaggagcaaggaagccagtctgagtcccaaaacctcaaaaatatggaagctaacagtgtagccctcagtctgtggccaaagcgcagggggccctggcaaaccactggtgtaggtcytagagtccaaaagttgaagaacttgcagtccgatgttcgagggcaggaagcatctggcatggaaggaagatggaagacagaagacttagctgccagtctaggccttccattttccttttcctcttttatcctagccacactggcagctgattagatgatacccacccagattgagggtgggtctgcctcttccagtccactgactcaaagttaatctcatttggcaacaccctcacagacatacccaggaacactactttgcatccttcaatccaatcaaattgacaatcaatattaaacatcacaggaatcgaggctcattctcatattatgttcacatagaagatgaaaagatagagaatcttcc

SEQ ID NO: 749959 - DNA, 635 bp, Homo sapiens
aagcgcagggggccctggcaaaccactggtgtaggtcctagagtccaaaagttgaagaacttgcagtccgatgttcgagggcaggaagcatctggcatggaaggaagatggaagacagaagacttagctgccagtctaggccttccattttccttttcctcttttatcctagccacactggcagctgattagatgatacccacccagattgagggtgggtctgcctcttccagtccactgactcaaagttaatctcatttggcaacaccctcacagacatacccaggaacactactttgcatccttcaatccaatcaaattgacaatcaatattaaacatcacaggaatcgaggctcattctcatattatgttcacatagaagatgaaaagatagagaatcttccaggaaaaaaaataccaaaagcaaaaatgcaaatgtgtgaggtactgtatagcaggggtcctcaamcccagggccacaaaccagtacacgcccatggcctgttaagaacccggcctcacagcaaagtaaatggcgggccagggagtattgcttcctgagctctgcctcctgtcagaacaggagcggcattcaattctcataggagtaggaatcttattgtgaactgcgaat

SEQ ID NO: 749960 - DNA, 666 bp, Homo sapiens
ctgtgtacctggctgttggacgtcatctgacgatgaaattgtgtgtccttcttaattacatattatcagaaccaatgagtcacaaaggttaataaattccaaaacactctacaatggtaataatacatttggtattggtcccraccagttccagatagcacaaataaattacacaaagaggtggacacagataccaatttcacttacccctgttgtactaatgcctctaactggcctcaataccttttgcttggcagaaggtttcatatgaccaggttgtaagacaggaaaaataccggcatggtttagagatgtgtttacttggaatttagatgtgggataaaaatgaaatgtagctacactagagtcctactctttgatgtctataaagaacagtcatgaatagaaaccattcaagcaaacagggatgtaagcagtacacgtggtacttctattttgtatggagaagaactagcctgaataaaggaaatatatacaacaaggatgacagtaaatggcttggctggttgatcaggcacctagaaggtacacgattagaagatcacaaacagtgctgggtaaaaagcaagtggatggacctatggaagcgagtaaaaaagcctgtgggttttttcatctcaccatcaaagctctccagagagcatc

SEQ ID NO: 749961 - DNA, 655 bp, Homo sapiens
tagtcaaagctctgccagtttcattagtgattatttctaacacagcttgtaaccatataatccagttgagcatgtaaatgggggttcggtatccccacgaaaagttttgtgcccatgtggcaggcccatagtactgtatcattctttcaagggaccactagtcaactttccaattgcctatgctatgcccctcttttcttaggaagcatagacagggaagcctaggagctcacctgtttttaccggcagcaggaaaaaaggatgttttaatggtgccaataacaaaaactgcctgcccattgatcaggtagcttggcatgggctctgtgtccacatatccagtatagcccagctggagctgtccagtcctgatkaaaccctggatgggcccaaacagtttgcaacttactaaacttactaaatgggtttttctcagtatggtttagacctcaccaggtgactgttcttgtgctgttatacagcttttgccctaggcaattgagtcttcctatggggatggtgaagtcttttcttctctagctatgcagtattgtccaataattgaggtttcgaagacccaaaagttaccagtgtgggccttctggactggaattatatcaggaactggatccatgggcactaattctcgggcctc

SEQ ID NO: 749962 - DNA, 598 bp, Homo sapiens
ttggccagtacttcaaagcttgggatccataacctgcagaaccccacatctcctaagaattctgttacctgcctcctggtcttaggttctggtagactggaaatgacctgctttcgttctgatcctaggctgcactccccrtgttggatagtgaatcccaggtagcgtacctgctgtctgcagatctgagctttcttcttggacacgttatatccacagtcctctaggtgccgaagcagggtgtccattcctttagcgcatccaactgccgtggggtgtcccagcagaaggtcataaatgttctggagcaagatgcagcctaggtctctagtggggaacttttggaggcctggaggtctcaagccagtgcctccccaaagatggtgggggagttcttgaacccttggggaagccgggtccaagtatactgagtggtgacacctgaccccaatcctcccactgaaaggcaaacagtttctagctctctgaagctaatctgatgctaaagaaggcatccttcgggtctaggcaggtgaaccagctgtcctcagctggcagtaaccccaacaatgtgtacgggttaggtactgttggatgt

SEQ ID NO: 749963 - DNA, 637 bp, Homo sapiens
gatttggccagtacttcaaagcttgggatccataacctgcagaaccccacatctcctaagaattctgttacctgcctcctggtcttaggttctggtagactggaaatgacctgctttcgttctgatcctaggctgcactccccgtgtyggatagtgaatcccaggtagcgtacctgctgtctgcagatctgagctttcttcttggacacgttatatccacagtcctctaggtgccgaagcagggtgtccattcctttagcgcatccaactgccgtggggtgtcccagcagaaggtcataaatgttctggagcaagatgcagcctaggtctctagtggggaacttttggaggcctggaggtctcaagccagtgcctccccaaagatggtgggggagttcttgaacccttggggaagccgggtccaagtatactgagtggtgacacctgaccccaatcctcccactgaaaggcaaacagtttctagctctctgaagctaatctgatgctaaagaaggcatccttcgggtctaggcaggtgaaccagctgtcctcagctggcagtaaccccaacaatgtgtacgggttaggtactgttggatgtaaagtcactgtggcttgattgaccaagtgcaagtcc

SEQ ID NO: 749964 - DNA, 637 bp, Homo sapiens
gatttggccagtacttcaaagcttgggatccataacctgcagaaccccacatctcctaagaattctgttacctgcctcctggtcttaggttctggtagactggaaatgacctgctttcgttctgatcctaggctgcactccccgtgttggatagtgaatcccaggtagcgtacctgctgtctgcagatctgagctytcttcttggacacgttatatccacagtcctctaggtgccgaagcagggtgtccattcctttagcgcatccaactgccgtggggtgtcccagcagaaggtcataaatgttctggagcaagatgcagcctaggtctctagtggggaacttttggaggcctggaggtctcaagccagtgcctccccaaagatggtgggggagttcttgaacccttggggaagccgggtccaagtatactgagtggtgacacctgaccccaatcctcccactgaaaggcaaacagtttctagctctctgaagctaatctgatgctaaagaaggcatccttcgggtctaggcaggtgaaccagctgtcctcagctggcagtaaccccaacaatgtgtacgggttaggtactgttggatgtaaagtcactgtggcttgattgaccaagtgcaagtcc

SEQ ID NO: 749965 - DNA, 637 bp, Homo sapiens
gatttggccagtacttcaaagcttgggatccataacctgcagaaccccacatctcctaagaattctgttacctgcctcctggtcttaggttctggtagactggaaatgacctgctttcgttctgatcctaggctgcactccccgtgttggatagtgaatcccaggtagcgtacctgctgtctgcagatctgagctttcttcttggacacgttatatccacagtcctctaggtgccgaagcagggtgtccattcctttagcgcatccaactgccgtggggtgtcccagcagaaggtcataaatgttctggagcaagatgcagcctaggtctctagtggggaacttttggaggcctggaggtctcaagccagtgcctccccaaagatggtgggggagttcttgaacccttggggaagccgggtccaagtatactgagtggtgacacctgaccccaatcctcccactgaaaggcaaacagtttctagctctctgaagctaatctgatgctaaagaaggcatccttcgggtctagkcaggtgaaccagctgtcctcagctggcagtaaccccaacaatgtgtacgggttaggtactgttggatgtaaagtcactgtggcttgattgaccaagtgcaagtcc

SEQ ID NO: 749966 - DNA, 647 bp, Homo sapiens
ccagattgaacaagcttccttcgtccttgtctggggacttttgctccaagccacgttgcttttcttttagctgagggcacttatctttccaatgtcctatttctttacaataggcacactggttacattgcaagcatggacagtcagactgggtattcttcccggagccccccttcccttgtccttttggggagacccctcyaatagctgcagctagtaggtcagcattttgtcgggcttggcgttcaccttctttgcggctctttctgcggctcgctgcatctctgtttacaaacacttggctagctatttccagtaattgcgacacattcatacccacaaacccagcctgtttctgcagctttctcctaatatcctatgcactttggctaactaaggccatgttaatcatgagctgactctcatggctgtcaaagggagtgtacatgcagtaggcctcacacagtcactcacaaaattgcgttggactttcttcctttccttggataacctcagagaccttgtttaagtttgcgtccttttgggctcctctccccaacccttctaagagtgcttccctataccgatttagcctttgcatgccctctgtcttgtttggatcccactgagggtcagttcctggtagc

SEQ ID NO: 749967 - DNA, 642 bp, Homo sapiens
agaaccgtaggagctgacttcccttggcgggcagagtaagatttttccttggctgtctgtccctttgctactagcactgctgctgcctgtactcttagccactgtgggggttctaaaaccagctgcaaccaagtatctatgtatagaaactgatctgagtgtcctgatttaccmgttactttgtgccatacctttgaaactagggacctgtctaggcttccttctgatggccatcccacttctaatgctggccaatttatctcacacaaagccttaagctttccaggtgtcatagcagttccatagtctccattgaatcctttcttgaaactctttaacgtagttcctaatggggtaggcttactctgtgttttacccattttcctctctcaggggacaaaacaacactcttaccacaaagagggaagggaaaaggggtaaaaagtcactcactcaccaagcaattcacaccagatcaaaattaaaactaaaaccaaacgacggataaggagttactcattcatcaagcaatttgagccaaatcagaaccgaaatcaaaaccaaaacaattcaaatccaaaagtcagaactgaaatcaaaaccaaaacagtgcaaatccagtcaaaatcaaaaccaaaacca

SEQ ID NO: 749968 - DNA, 601 bp, Homo sapiens
ctctgatgtggagtcagacagaaccgtaggagctgacttcccttggcgggcagagtaagatttttccttggctgtctgtccctttgctactagcactgctgctgcctgtactcttagccactgtgggggttctaaaaccagctgcaaccaagtatctatgtatagaaactgatctgagtgtcctgatttacccgttactttgtgccatacctttgaaactagggacctgtctaggcttccttctgatggccatcccacttctaatgctggccaatttatctcacacaaagccttaagctttccaggtgtcatagcagttccatagtctccattgaatcctttcttgaaactctttaacgtagttcctaatggggtaggcttactctgtgttttacccattttcctctctcaggggacaaaacaacactcttaycacaaagagggaagggaaaaggggtaaaaagtcactcactcaccaagcaattcacaccagatcaaaattaaaactaaaaccaaacgacggataaggagttactcattcatcaagcaatttgagccaaatcagaaccgaaatcaaaaccaaaacaattcaaatccaaaa

SEQ ID NO: 749969 - DNA, 653 bp, Homo sapiens
gaaccgaaatcaaaaccaaaacaattcaaatccaaaagtcagaactgaaatcaaaaccaaaacagtgcaaatccagtcaaaatcaaaaccaaaaccaaagtgccggtaaaggcatgctgtgggtgatcaggccacacttccactaagatggagtgggcaaattccaagaccagccttaccgtgttccagatgtccagactctaagcacyaattcttcccagtgttcagctgctgtgttaatcctctgcgggggtctgccgcacactcctctggcaaggcattccagggaggcaattgcctatgctggagcactctcaggaaccatgtcgcttaagctggccggagtcccctccagagatgctccacagggcaggcttaagctgcctaaggggctgcctccactctccattaatcaccttgcttcccggccagggagccaagaaatgtagcaggaccagtggcagacaaaacctctcagacactggttttaggaaggaagaggctttaatcagctgggagcattggtagactcacatctcaagatccaggctccccaaagtaaagattcctgtcctttttaagggcttacaacactgaggggtccacaagaaagggtcatgatacattgtgcaagcgggggctacgtgactgag

SEQ ID NO: 749970 - DNA, 619 bp, Homo sapiens
agtcagaactgaaatcaaaaccaaaacagtgcaaatccagtcaaaatcaaaaccaaaaccaaagtgccggtaaaggcatgctgtgggtgatcaggccacacttccactaagatggagtgggcaaattccaagaccagccttaccgtgttccagatgtccagactctaagcaccrattcttcccagtgttcagctgctgtgttaatcctctgcgggggtctgccgcacactcctctggcaaggcattccagggaggcaattgcctatgctggagcactctcaggaaccatgtcgcttaagctggccggagtcccctccagagatgctccacagggcaggcttaagctgcctaaggggctgcctccactctccattaatcaccttgcttcccggccagggagccaagaaatgtagcaggaccagtggcagacaaaacctctcagacactggttttaggaaggaagaggctttaatcagctgggagcattggtagactcacatctcaagatccaggctccccaaagtaaagattcctgtcctttttaagggcttacaacactgaggggtccacaagaaagggtcatgatacattgtgcaagcgggggctacgtgactgaggg

SEQ ID NO: 749971 - DNA, 658 bp, Homo sapiens
ccagggaaggctagctaaaatttttacttatttataatttcatctgcatcattatattattgctagcataaaaacaagtaccaggttcctactttataaacactgtttaatgaagtggcctagcctctatgacatcaccaaataaatatatcatgcttcattttaggattcttatgaaggacagactctgtgagttaacctgtgtgagaagctttaggcccaaagttttatagactttcattacacacacacacaaacacacacacacacaaaacaaaacaaaaaaaacaaaatctttttcttccatatacagtttttaaaatcttcaaataaagattttwatatattttaaaatgatatttattcaaattcttatttgaattctggactataagttgttttagaactgagtttcattcatcattaaatgccttgcagtaaacagtacctggcccatggtaaacatcaataagtgcttatgaaacgaatgaatacaaagcaaagctaagtaggaatcaagcacagatttcatgctgatctttttataatacaattagttgtggctcataaactattaagtcacaaaatcaactcataattttataaaagataagtaaaaattgtatgtgtaaataatttttctgatactgtatagtcc

SEQ ID NO: 749972 - DNA, 583 bp, Homo sapiens
atataatgcaaatattattagaactaaagagaaagactccaaaagaagaatagtttaagagtttgacactttattttctacattgcacaaatcgtccacacagaaaatacatcatccagacagaaaatcaccaaagraatgatgtttcttaacctgcagtatagaccaaataggcctaacagatatttataaaatatttcatagtaatgactacagaatacgcattcttctcctcagcacatatatcactctcaaggatagcttatgtgttaggttataatataagtcttaaaacattccaaaaaattgaactaatatcaataatcttttctgaccacaatggaataaaaaatctgattaaaaaataggcaaaaaaaatctcaatagacaattctccaaagaagctgtacaactggcaaccaggtatatgaaaaggtgataaatatcattgacaatcagagaaatgcatatcaaaactacaatgagatatgatctttccccagttaaaatggctcttatctagaaggcaggcagtaacaatttctggagaggatgtggagaaaagggaacccttatacatgtt

SEQ ID NO: 749973 - DNA, 583 bp, Homo sapiens
atataatgcaaatattattagaactaaagagaaagactccaaaagaagaatagtttaagagtttgacactttattttctacattgcacaaatcgtccacacagaaaatacatcatccagacagaaaatcaccaaaggaatgatgtttcttaacctgcagtatagaccaaataggcctaacagatatttataaaatatttcatagtaatgactacagaatacgcattcttctcctcagcacatatatcactctcaaggatagcttatgtgttaggttataatataagtcttaaaacattccaaaaaattgaactaatatcaataatcttttctgaccacaatggaataaaaaatctgattaaaaaataggcaaaaaaaatctcaatagacaattctccaaagaagctgtacaactsgcaaccaggtatatgaaaaggtgataaatatcattgacaatcagagaaatgcatatcaaaactacaatgagatatgatctttccccagttaaaatggctcttatctagaaggcaggcagtaacaatttctggagaggatgtggagaaaagggaacccttatacatgtt

SEQ ID NO: 749974 - DNA, 583 bp, Homo sapiens
atataatgcaaatattattagaactaaagagaaagactccaaaagaagaatagtttaagagtttgacactttattttctacattgcacaaatcgtccacacagaaaatacatcatccagacagaaaatcaccaaaggaatgatgtttcttaacctgcagtatagaccaaataggcctaacagatatttataaaatatttcatagtaatgactacagaatacgcattcttctcctcagcacatatatcactctcaaggatagcttatgtgttaggttataatataagtcttaaaacattccaaaaaattgaactaatatcaataatcttttctgaccacaatggaataaaaaatctgattaaaaaataggcaaaaaaaatctcaatagacaattctccaaagaagctgtacaactggcaaccaggtatatgaaaaggtgataaayatcattgacaatcagagaaatgcatatcaaaactacaatgagatatgatctttccccagttaaaatggctcttatctagaaggcaggcagtaacaatttctggagaggatgtggagaaaagggaacccttatacatgtt

SEQ ID NO: 749975 - DNA, 600 bp, Homo sapiens
taagatactctgatttgagcataagtcatgctttctctttattgatcaattattaattgtattgctaacctactttattcctatgggtctgatacaatattgtctctggatatggaatcttaattttaaatagtttttaaaatgaagaatttttatattaaattttcaaacccaagatgaatgaagagcaaagcaaacacatttttcttccccagtatagaagaaaaagatgaatactaggctaatacccataaattctgttacttttcctagttaagtcacaaatccttagcatgcctttggaatttagcatttttctttaaaatcaaatgktttttttatttaataatatcaaatatttcttcagtgtctgttgtacactgtagcagtattctgacttcaaaattaaatatggtaagaacaggctacagaatcaagataaaaataaattctgtgacagatatattttaaaaaatctcaggaggaattgaatcaaatggaaaaattaaaatctattggaggtaaatggaaacttcagaatgggctgatatctacagtgaatattgaaagtgtgttgcatatcaacagaaaaagaaggaa

SEQ ID NO: 749976 - DNA, 662 bp, Homo sapiens
cagcactactttagatatgtcccacaaatgctgatatcttgcatttttcattcagttttatgtattttttttttacttccctcaagatatcttctttgacctatgcaatattgagaagtatgttatttaatttctaagtgtttggagagtttcctgttttctttctattattgacttctggtttgattccattttgatcaaagaatatactttgtatgatttcaaatctgttacatttttcaggttagttttgtggcccaraatatggcctgtttttgtatatgtttcctatggaaatatgcattctgctgttggccgaagtgttctaaaatgtcaatcatgcactgttggttaatggcattgtccaatgaaatggatatacctgaaccacgcatttcagtaggagtctttgcaatgcatattggttgaattaagaaggtttatataccttgctttgttttacaatgcaaatctgatatatagtttatgacagcaatgcaatttaccatgattgttatattcaggctcttgtttgaaatatgtaacatcaatatacactttattttgctgcttccttaggatatcccttcttctgtatttaatacagctattgaggagataaaataaaaggcaacagtcaaggctgcataggttaacaaatc

SEQ ID NO: 749977 - DNA, 629 bp, Homo sapiens
ggggtaattggtgacctttgagagaatagttttagaaagagaaccaagggtggagttaaaattccaaggatctgaggaatgagtgggtggtaggaaaaatggaagctatgatggtagcctactttttaaagatgttttccaaagaagagaagaaacaacagagggcagtaacttgagagggcagcaagtcaaaggraggatatttataaggagagagaatatttttagaaactcaaacagagagcaaattaaaacaccatcaagagaggcccttggtggaataagatcctaaaggaagtgaagaagaatgggaacagagcccaggttgaacctcgtaaagggaggacttccatcatcattagaggcatgagtaaaggaaaggggcgaacagactaaaattaacaagatatactgagatggagagaatgaagctgcacaaagtctacatctgatatcttgaatcttactgggaaatgagaaagtgattggtatattctgagaaattaccagaaatagggtgggagctgaaggacaggagggctacatggaaggttgagagttgactgtacctgaatataataatttctgggcagtaatgagagcttagttaaaattagacatattaattg

SEQ ID NO: 749978 - DNA, 629 bp, Homo sapiens
ggggtaattggtgacctttgagagaatagttttagaaagagaaccaagggtggagttaaaattccaaggatctgaggaatgagtgggtggtaggaaaaatggaagctatgatggtagcctactttttaaagatgttttccaaagaagagaagaaacaacagagggcagtaacttgagagggcagcaagtcaaaggaaggatatttataaggagagagaatatttttagaaactcaaacagagagcaaattaaaacaccatcaagagaggcccttggtggaataagatcctaaaggaagtgaagaagaatgggaayagagcccaggttgaacctcgtaaagggaggacttccatcatcattagaggcatgagtaaaggaaaggggcgaacagactaaaattaacaagatatactgagatggagagaatgaagctgcacaaagtctacatctgatatcttgaatcttactgggaaatgagaaagtgattggtatattctgagaaattaccagaaatagggtgggagctgaaggacaggagggctacatggaaggttgagagttgactgtacctgaatataataatttctgggcagtaatgagagcttagttaaaattagacatattaattg

SEQ ID NO: 749979 - DNA, 645 bp, Homo sapiens
aatggctctccagtataatactggagtgctgtctagcacttcttagtaccagaaggctgtgatgagccttggaggcaaaatacaagtgttaggtaagctttgtttagacatgagttacagtgctattgtctgtgatttcaatgttgttgaaccaataatatataaaataaacatggtgtctttaaacagaaacacacataaaacaagttttatattgatctgttgacaaaaatcttgtgaygagaggttcacaggaacctaacttgtatttcctctaggaggaatggttcagtatttgctaattcaacgtttacggttacttaatggaacattcactaccgagaaaaatgagaagtgattgcatataacatgcattttgttttgtttttaatttttttctttttatcttcagatgagcatcatgatctagaaattttatatacatataagatacatataaacaaaacagaacaatcatatacaagtttaacaaaataaataacagttaacatttaccgaagacttcctctgggctgaaattcaaagtatttcacatgttattttattttgttagctcctttaggttctactatttctccccctatacagttgaggaaactgaggcctagaatctcatgtaaatta

SEQ ID NO: 749980 - DNA, 643 bp, Homo sapiens
gtattgttgtcattcatttacttggcttagtgtaatgtttcttaatttccttttgtccaagttgccttagctaggaaatggatacactattttgtatgtgctattggtaaagtttgctttgaaatacttacctggaagagtctaaaaccatgaaagstatgtgtggtcatgaaatgcagtcctgcattattgaacaacaaggacattttctgagaaatgcgtcattaggtgattttgtcattctgtgaacatcatagagtgtacttacacaagcctaaatggtacagctgactacacgcctattctgtatagcatagcctatcactcctaggcaacaaatctgtacagcatgtgactatactgaatactgtaggcacttgtaacacaattttaagtacttgtgtatctaaacatagaaaaggcaaagtaaaaatggtattatactcttatgagaccaccattgtcatatatgtggtctgttgaccaaaacattaattgctatataactgtgtgagcgtaagaaaacagctctgtttgctttgaagattctgtttggagatgcctctttaattggcgttttgcatcagcacaattcacatgtccaagacatatcagattctgtgccatttaattttttttcttt

SEQ ID NO: 749981 - DNA, 682 bp, Homo sapiens
agtaggggctgtgggagatgaagacatcttaggtgccaccaggtttttcacatgcgtaatatgggtaactaatggagtcaggcactggcatgagaaacttgaaaggtgagtagatgacgagtttcatttttaatatgctgagtttgaagattcttaaactgtccagtttgtgatgtctagtaggcagtggatacacagaacatagatctgagctgaaacacagattacagaagaacaacagagttacaargggtcaggaatttgggggatctctggaatgtggtgtaaccaacacaaggttgatggagatttccggatgtatggagtgggtaaagatgaggaaacagaaggtgtcattaaattacactgtcatttaaaatatttaaatagaaagtggagttctataaaaggggcctaggaatcagagatgtgaggcaaaaaccaggatttcatcacagcagccaagagaggagcgcacttccaaaaggagggcatgattaaccccgtctaaggagacattccaccagtgaagtaaaatgaaagctgcttcagtggagtcctggaggcactggcagactgctgtaaggctgaagagaaaacctgaggatggacagaaaagaacagaaacacttccatctgagaatctggttttggaggggaggaaaaaagaagcaaagggcaa

SEQ ID NO: 749982 - DNA, 580 bp, Homo sapiens
tttatttgcatagaggtgtttatagcattctctgatggtagtttgtacttctgtgggattggtgttgacatcccctttgtcattttttattgcatctatttgattcttctctcttttcttctttattagtcttgctagcggtctatcaattttgttgatcttttcaaaataacagctcctgkattcattgattttttgaaaggttttttgtgtctctatttccttcagttcttatctgatcttagttatttcttgccttctgctagcttttgaatgtgtttgctcttgcttctctagttcttttaattgtgatgttagggtgtcaattttggatctttcctgctttctcttgttggcatttagtgctataaatttccctctacacactgctttgaatgtgtcccagagattctggtattttgtgtctttgttctcattggtatcaaagaaaatctttatttatgccttcatttcattatgtacccagtagtcattcaggagcaggttgttcagtttccatgtagttgagcgattttgagtgagtttcttaatcctgagctctagtttgattacactgtgt

SEQ ID NO: 749983 - DNA, 636 bp, Homo sapiens
tggccttgaaaaacacagcagcttccactgtattgagcatagttttgagcaaattaaatatctggagaatgcaaaacattatatttatgtctaatatatcttcttgttaagagctaggaggaggatctttggagtttcccagtagccatctgagaaacccagagatattgtattcataaataacatctcagtagttttactattttgaatttgagggttaaatttggggaatatggtatcaaaaagagtgtcacaggtgggggctgcagatgtgaagggcctgctatcaatcaggtgaccctggakggactacctgctccctgtgtcagtccaggatcccagctgtagtgggttcctctctgcaacagcacatgtttctaaagggcaagaatctgggctcccggtaactgacatctgtctcctccatcctagattgtcatggtagacctgaaccaccctcccactgaatttgggcccttgtggctcatagccacaagggaaattggaagctcacatgtgaaaggcagaattatgttattgcaccttcttccaaagtcttgagtttgtttgtagcccaggtgcccctgttttcaacaggggtattagcagtaccaggcagccactccctagggtttg

SEQ ID NO: 749984 - DNA, 614 bp, Homo sapiens
catctcgggtcactataacctctgccttccaatttcaagcaattctcctgcctcagcctcccaagtagctgggattacaggtgtgcgccaccacgcccagctaatttttgtatttttagtagagacggggtttcaccatgttagtcaggctggtcttgaactcctgacctcacgtgatccgcctgcctcggcctcccaaactgctgggattacaggtgtcagtcaccgtgtccggccggtgtgccctcatttctgaagtgacactttcacattgctgttgctatgtaatttcataaggacgttcccattttcctctaaattgtatttytctaaatgtaaccactcccccagacagtgcacatttgtaaaagttcgctaacacaaactgaccacaagagtcggttctgggcttccagcgctggctcagcttggtccagacagaaacccaaatcgcaagagccggtggcctctcccaaaaggtgagaaaggggaagtgacttctgtttccactccatctacctgactctgggagtgaggcatggattttcactgcagtcacggtggctacatcacgtgatggggatgtgtgtttgggaactgtgggggtgggacag

SEQ ID NO: 749985 - DNA, 647 bp, Homo sapiens
gcaggtgccttcatccttctgccagaagcaattctgatggagacacaggctggctcctccaacttaaacatcctgagagtcagctgcaggtgaagcggctctcagagccggaacgctttaactcttaggggccgggtttacagaggggacaggcgtgcacctggcaccagtgtggagggcggtttctttgtgggcctgatgcaatgtccagcrgccagcgaggaaagaacccattgatgtagcatcagagaatgcacgcaatatcgccgtgggacagggcgggcaggcagaactgcagagagaaggaggcacctgcttccagctgctctgccctgaaatcctaaagtgacaccaaaggaaatattaaagaggataaagacaagaggacaaaaactaaagtgcagaaggaaggggctggagaaaaagttgagaattgtcagaagggggaataaaaggataaaaagatgaaaaatgggagtgcaaaggtcgtacaacaaattactggaaacgccaggagaagagagaatcagcagggtggagaaatcatgagcagcaattccaggcctacttgtccagctgaagaggagctggacacggaggccaagaatcccccacctgcgggatcccaaactgcttcagagctctgg

SEQ ID NO: 749986 - DNA, 627 bp, Homo sapiens
gaacgcatttcagaatttccttcttagcaacctccaaacgtttggttatgtgtttcacctaacagctgggccgaagtaggaaccactattacttaacagtaacagttgaaatatttaaaaatagaaaccattggagaagaagagagggcaccaaggacgaggcctgaaggaggtagcccctctctctggggcgagccggcctcttccaggcagcaacgtacattccgccggggctttctggagaccggcgtgggctgcagcatctttcaagggcgctgcgggtcactgggggtggaataatccagcaggcaggtggaaatgcagaaggcagggggctggttcagacttctgtccagaaaaatcacctgggcagcttgataaaaagtgacttacgcctcccagcctcagttcctgaaccagtaactactgtgtgatgtccccaggggcattaaatgccaatgaacacacggtacgyagctgagtgacagatgggtggccttggtaaggggacctgtggccatcagtgtcctcatcattgctgtaattaggagcaaccacgagtcccactttgagcaggaccttgctgctggctgtggaggctgtgcgctcacactctctgcccagcaa

SEQ ID NO: 749987 - DNA, 636 bp, Homo sapiens
ctgccaggaccttctgtgacaatgagaacattcaggggacagccgtgggccgtgcactggatgtggtgcacatgtgactgagaaactgaattctaattctgacttatttatttaacagctccccgtggctggtggctcctgacctggccagtactgctctagacagcgtgggggcctccaggccttcaaggagagtccggtggatacaggaggacagaccggaggggaggaacctgcacaggaggcttcttcccacaagaagatggggcaatcccagcgggttccaaatgagggccctgctcatggcggggctgggggagggcccctgagacactgaggacggacaggggctggctgggggagtgagagagcatgggaggtggcaggttaagaacaaggcaatgactacaacaatgatgccaacacctgcaggggcacatgagtgyacagcccacttaaccctcatcaggctcacgggggcggaccgcttagtatccccacttcctagatgggaaaacaaggcacacagagcataagcggcttcccagggtcatggagcaggagaaagctgggacagaggcggctgtgtggctgcactacgctgcacacgtgacactggctccgaggctccctgcc

SEQ ID NO: 749988 - DNA, 615 bp, Homo sapiens
gccaaagaagtaaaataatattaattaaaccaaaatggcactgaactaaatgtcttatcaaaagttggttaaaccaaactaactctcgctgatatttctatcatttaaaggcattttcaccagattttctacacaatgcaattgtccttaaagctaggaagttctcaaaatggagyaacgctaagatcaaagtaaagtattttaaataaaaattatcttaggccaggcacagtggctcatgcctgtaattccaacactttggaaggcttaggcgggagaatcgcttgagcccaggagtttgagaataccctgggcaacactgtgagatgcagtctccacaaaaaaattttttaaataaaagcagctgggcatggtggccctcgcctgtagtcccagcttctcagggggctgaggcaggaggatcacttgagcccaggaggttgaggctgcagttagctgtgatcatgccattgccctcccgtcgaggtgacagagtgagaccccatctaccaaaaagaaaaaaaaaatatgagtaaggctgtaaggctcccacctcatttttgtcctaccctttcttccaatctttaacatctgttgcaataacaagggaaaccg

SEQ ID NO: 749989 - DNA, 561 bp, Homo sapiens
ttaaaacaatggataagaaaatgtgcagcagtctggtttgtgtctataaagtggcagttatttaagtggttattcagaatctgaataaaaaagcatagttataatcccgttgattaaaataaaagtgaacaatctcatgctccaaatggtaaatacgaggaatgacttttagttttaagaacacaggaggcaaagtttctttcataatgaacctcagcactatgcccaaactgggcgaggtgcctcaaaagcagaatgaagaaaaactcctggggagttcacttggaaaatacctacttcatgtcagcactttaaaggcatcatctcacttaataaaacaacmtaagctggtcagtgttagtcttatttgcagatgagtaaactgagtctcagagagattaagtaaatttcccaagtcataaagataatcacagatgacagaattggtcttcaaacccgggtctaattccaaagaaagtgatttccagtatatcctagaaatgtgatagaaagagtattaaaaaatataatcatttgcaagattagccctgtgtgtgagag

SEQ ID NO: 749990 - DNA, 571 bp, Homo sapiens
ctatgaaaataaatacagcattcagtttctagccaaatgtttctccataaacctaaagtttaatgtgtggcttttgtaatctcatcagaatttctgagatgaggtataaacatgttaattagaagaagacaacttcaatcattttctgttctagcctgaaatctcacatatctaaggaaagcattttaatycctatcaagagacagaagtactgcagggttgacagcatcgtgagagtacaacagtggtgttctgaggaaagtaagaagtgcccatggttctagatgctacattacagcctgtgatgctctagcaaccaagatataacactaaccaaaagaacaagacaggatgtgttcttgattctaagatctacttctagcatttcaattctcctaaaatcacaatgaattttacaaatggcatagatggaatatgatggcatttttttcactaagatactaacttctggtatggcttaaaatcgattgatgtcagtaggtggtagtctactcagatggtgttagctagaggcacattttctagctcaatctctctataatggatttta

SEQ ID NO: 749991 - DNA, 571 bp, Homo sapiens
ctatgaaaataaatacagcattcagtttctagccaaatgtttctccataaacctaaagtttaatgtgtggcttttgtaatctcatcagaatttctgagatgaggtataaacatgttaattagaagaagacaacttcaatcattttctgttctagcctgaaatctcacatatctaaggaaagcattttaattcctatcaagagacagaagtactgcagggttgacagcatcgtgagagtacaacagtggtgttctgaggaaagtaagaagtgcccatggttctagatgctacattacagcctgtgatgctctagcaaccaagatataacactaaccaraagaacaagacaggatgtgttcttgattctaagatctacttctagcatttcaattctcctaaaatcacaatgaattttacaaatggcatagatggaatatgatggcatttttttcactaagatactaacttctggtatggcttaaaatcgattgatgtcagtaggtggtagtctactcagatggtgttagctagaggcacattttctagctcaatctctctataatggatttta

SEQ ID NO: 749992 - DNA, 618 bp, Homo sapiens
aactgagattcagattaaatgaggtgtccaaaatgacaatgcaaataaaggctagattatgattcaaatccagtcattatctaggttgagtaaactgtgtgtggggaaggtacaaacttctaggcagactagcagtatgtcactccttgccttcccagctggacctctgctgtcagaaagctaatcccacctctgaattctcattcatatcctaacctgaagggtgatattgtatcaaacccctaacctcaatagggaagccaccaggctcaagagaccaaagaagagacccagagctagtaaacgagacatgcggctttatcagatgctaacatataggggagagggtccagtggcaacaggctggtcaggaaaactgcaactgcctgtaaacatcatgcagtttatagcattttcacttaacacccccyccaacgacctccacctggcattcttcatttaactgaaaactcagggcttcaatctcctgtatggcccatgttccatgggatgggatggggctcagatgtttatcatagataagggatgaatctctgggttggccactaccagattatctagcttagaaaacactttcaggtgcatctgccatagaga

SEQ ID NO: 749993 - DNA, 634 bp, Homo sapiens
ctataatcctagcactttgggaggttgaggcgggtggatcacatgaggccaggatttcgagaccagcctggccaacatggtgatacccagtctctactaaaaatacaaaaattagccatgcacagtggtgggaacctggaatcccagctacttgggaggctgaggcaggagaattgcttgaacctggggtggaggcttcagtgagccgggatcatgccactgcactgcagcatgggcgacgagcgagactcagtctaagcaaaaacaaaacacaaaaaacccaacattagccaggtgtgatggctcgtgcctgtgggtcccagctacttgggaggcttagtggggaggattgcttgaacctgggacatcgaggctgcagtgagacatgatttgccgctgtactccagcctgggcaasagagtgagacccagtcacaaaaagaaaaaaaaaaaataaataaaaggaggcaaccaggtaggtatctcccatggcatggtgaggtaggggtgagctatggtctcaatgtctgtgtcccccaaattgatatgttgaagcttaatcctcaacgttgacagtgttaaaagatgtgaggcatttggggaagtaattaagtcagaagggctatgtcctcacc

SEQ ID NO: 749994 - DNA, 606 bp, Homo sapiens
gagtcttgggaaatgccaagaaataaaggtactatcaccaggcaagctggagtggtgagcgacttgatagtctcagaatgatatcgccagctgttggaaatcttgtagaactggctaacacccactgaacagttgctacgtaccaagcactgcattaatgcacttaatcctgacaatagccctgtgggctgatgggccagggttttgtttttgttcttgttgttgttttgagatggagtctcgctctctcacccaggctggagtgcaacggtgtgatctcagctcactgcagcctccacctcccaggttcaagcaattctccttcttcagtctctggagtagctgggattacaggcatgcactaccacccccggctaatttttgtatttttagtagaaatggggtttcaccatgttgaccaggctggtctcgaactcctgacctcaggtgatccrcccgccttggcctcccaaagtgctgggatgacaggcgtgagccaccgtgcccggcctaatgggctgttttaacaccgcctcactgtagcagtccctctggtgccgcaagtcccctctctgcatctgcaggagacagttccctgtgagacct

SEQ ID NO: 749995 - DNA, 520 bp, Homo sapiens
gggccacagctcagtgaccacacccagggtggcgccagctccagcaccctggggcaaggcgtcgctggagcgtgactcagccgtgcccagcatgcggcgcccttctctgcccagggattctcacccacacccactgccctccgmtcaacatccttcccaggcgaccggccctaaaggacacaccttccccagacacacctccgtgtccacccaggacaccaggagggaagaaggcggccaggggcgaagtgtacacttctctccgtcccatttccaaatgcttcccatttatagatagaataattaaggctcagagattcagactggggcttaaggtcatggaataagtcttaaaaaaaaaaaaaaaaaaaaaagccaggcctgactgtggcctaaaacacatccaacgtggaaaacagaggttacaggaaggagttttctcaagatcacccaaggttcctggcgccgttattcatggaggacagaatcccccacccagctttccaaggtgaagggcaaa

SEQ ID NO: 749996 - DNA, 557 bp, Homo sapiens
ctcagcctccaaaagtgctggcgttacaggcatcagccactgtacccagcttatttttgtatttattagtagagatggggtttcaccatgttggccagactggtctctaactcctggcctcaagtaatcctcccacctcaacctctcaaactgctggcattacaggcatgasccactgtgccagtcaaatgttttaattaatgaattttattttattttactttatttattttttaatttttgagacagggtctcacttactctgttgtccaggctggagtgcagtggcatgatcatagctcattgcaacttctgcctcctgggctcaagtgattatcccacctcaacctcctgagtagtgggaccacagacgtgtaccatcacactgagctaatttttgcattttcagtagagatgggtttttgccttgttgctcaggctggtcttgaattcctgggctcgagcaatctgcctgtctcagcatcctgaagcactaggattacaggtgtaagccaccacacccggccagattttttatgattacattttatttccac

SEQ ID NO: 749997 - DNA, 585 bp, Homo sapiens
aggtaaactttctgtccttgcctgtctagaaatgagttgattttgtcctcatctttattcagtagttttgctgggcatacgattctccttgaatccttcctttttgagacagggtcttcctctgtcacccaggttggagtgtagtggtgcaatcacagctcattggagtcttgacctcctggattcaagtgatcctcccacctcagcttcccaagtagctgggactgcaggagcatgccaccatgcctggctaatttttgtatttttttgcagagattgagtttcaacatrttgcccaggctggtcttgaactgttgagttcaagtaattcacctgtcttggccccccaaagtggtggaattacaggcgtgagccaccatgcctgacctctcaaatccttaaaggcattgttctgtttcttccaatatctgttgttgctgaaaatgttgttccttggtaggctgcacatttttgctttcttttagggcttttcaggaacttttatttttggtgttttaaaatttcacagtgatttacctctatatagtctatatttatatgcctttaaaaattctgctcaggact

SEQ ID NO: 749998 - DNA, 687 bp, Homo sapiens
cataaacaaaaagcacaaatgctacaggtcacggatgatagatgccacccgtagacattcaacgccggcctgtctacacagacaggagcaaggcccgcttccaggcacatccgtctttccccaaatgctgacgcagggagaagccagcatgcgtagggctctgcgcacagacgggggctgcggctgatgggtgagctgcastgttttgtgacaactttcagtgtttctccaaaccctcaccatcctactttgactactggtgcttttgattattagtataacttttttccctcttgctacaggcccagaaatttttctctttggaaaataaagtttcataacacccagccgatttttgaaaagggccggccagccagttgagaagacagaccaaagccaaggcaaacaggggctctcacacagacccacggagcccgcacagaccgggctctgttggctgggaggggtggttctgaaaaggaggcaccaggcggttgaacaccgtcactctggccagctgtgtgcagccgggagcctctggggtgaggaggaggcaggagttggattgttcccctgtgaccaaagtcctagaagatgagcaaaccccatggaaccagacccccaggacttgggggcagcagattatccctggagcaggttcccgacatggggatctggccacaacat

SEQ ID NO: 749999 - DNA, 581 bp, Homo sapiens
gtgaggaggaggcaggagttggattgttcccctgtgaccaaagtcctagaagatgagcaaaccccatggaaccagacccccaggacttgggggcagcagattatccctggagcaggttcccgacatggggatctggccacaacatgggtgttctaggcaagagggtgcagtctcctggctgtctccccacaaagatgattgtgagaaggtatggaaatgttctctgtcgttacgaactctgcaaacaagagagattttatgtcggtccatttcacartgatagagaggagagctcagatgctctgtggacacaggttcggtcagatgaggaggctcggggagcctgtggttgctggagggatgttcccagcccagcctcaggtgggaaggtcaaaaacattctgtaggcattcaaaagcggaccaaaatgtagactgcagagccctgggttccccaagactgcctcaaggggtctgcaaagtcaaaactatctctatactaatacattatttgtgtttttcactcttcttctctcttgaatagacactgtgggtgtccagaggctgctatgcaacagaccc

SEQ ID NO: 750000 - DNA, 584 bp, Homo sapiens
aagaggtctgtcaaattgaaaagtaatgccatctttcacatttttgttgttgttctgggaaatattttccataaaaattggttgttttcattaacatgaaatgggtctattactattaggtttaaataagtttaaaatatcttttaaatttctcagttttaatttctagaacagtaaataccaataaatacacactacaaaaacaaaagctctttgaagctaccaataatttttgagggtataaaggggtcctgagaccaaaaagtttgagactgcaactgcagaaaaacttgaacggaaaggcatcagtaatgacagtatccattctcargtggaaaggttacgaggtagcaagcacaatataatcccattttgtaaaaagcaggcaggtatgtgtgtgtgaataattgtgcacacactatatacaacacagaagactgcaagcatatattccaaaatcttaactctggctctccctgggtggtacactgagggtagcctctttcgtgtctgtcactcacatttattactattgccatcaaatgaagtgactaattaatgtttcgagtttagcctgtcacgtt

SEQ ID NO: 750001 - DNA, 625 bp, Homo sapiens
cctctcgtctttctaataaacagaggggaggtgcctgtgcatagacttggggactattacattgactcagaaagaccctcttttcccttttgccccaaccagtgctttacgaggttgcctaagcctgtgctgcgacccccagaggcaggtgcaaccccattttacagatggggatgctgaggctcttcaccagggacgcccagctggatggcagtggggtgggtcacaccgagcctcctttcccctgggctgggctgccacccgaggcccccactatgtgttcctgtttgcctttgactccacgggggccgggagaaagtggcaytggggatgccaccaggctgcttgtcaactggcctttgctgtgttccacacctctgacatggaggtgaggctgtggtggctaagaccgggcggtgggccgagttcatgttcctgctatgccagtgatagctggacgagacctagagcaaggctgtgaactcttgtggccttggagttcttgtctgtgcagcatcctttcgggtgcaaggattgttacaagggttgagtgagctgttatcagcgaagcactgaacagtgtctggaaggtgataaactcaacaaagtgtctctggagttagag

SEQ ID NO: 750002 - DNA, 550 bp, Homo sapiens
gtaccatatccagtgggactgaactctctctgctttggggaccaaggaaggcttcccatttgaatttgtcttgaagaataactgtaactgccaggtagagaagggtaaagggctctgatgtgccgcctccccgctccccttcctgcttctttgtcctttgtcctttgctagttaagaccatcttaacactgtaattccaggatttggggaggctgaggtgggaggattgctggagttcaggagttcgaggccagcctgggcaacatagcgataccctgtctctacaaaaaaatwaaaataaaaaaagaaatcatcttaagagccagtcattaaataccggcctatgaaggtgaccctggtgtagaaagttgggccagaggactacccagataactgttaggaagactttcttatatataccatccttcccggctgtttccctctggaagaagctaaggaagagcacaagagtgatggatggctgcaatataaagataattagcccgaaccccttggagttatccccagggactgggagacccagtcactc

SEQ ID NO: 750003 - DNA, 694 bp, Homo sapiens
agggttagaggtaaaagagttagtatgagacaattacctggcgcatagtaagcacacagtacatcttggttgttattattaaaaaggcagtctgtgtgggcacgatatatttggcagctaccactctactgactcatttgggctctcgttaggcaaagtcctcattctcatttagcacgcgctgctggtttacaccatagttcccatcttgctgggccttaacaacraaagacatcctggcagggagcagagcctgcccttcccagaacttggatacttctgtgctcttttctgtggccaggaaaggggtccgatgtttaccagggagcacttctaagatgtgcctggtacagcattttacctttccaccttcatgctgctggaggctgcactgggccccagggggatgccccggtaccgcctgcctctaccttgctctgcagaggcctctccaaagcgggccttccagccagatccctccggaagccaggatggtggcccccaactctgctccagctgtggagactgttgccggttggaaaaggtacacgtggcctcctgagggtactgactgtgtggctcccacagggccagccccctgtagctactcaatgtgaattctgaaggacaggacagctggaaagggccccggaaggatcccttgcccaaaattggccttttcccatctttaccc

SEQ ID NO: 750004 - DNA, 657 bp, Homo sapiens
ctcgttttcagcagtgatatttgagaggaagtttgggtttggtatggagccgggcagtggacaccgctttgcaccttctattatccctgcaattctagaaatggaaggacgtccaggagaagccccttgcagggccaagcatgtggtctctgtgtggtgtgatggtggccagggtggggaagtccctgcccccgccgagtgctgcaatcccaccattaggtgtttacccccttgctgtcaccttacctctgggtttgtgcaaaggcccctgttgtccatcatcctcctgtgacctctccccagtggctcctggatcagctggagagggccaggcttctgagcactggagtacctgtgcctgrggaagctcacccaggagagaagagggtcagggagggaagaaaaacttgccaacgacacactttgctgactgggtgagttgctgaggctcgatgtcagcgagatctttgtcctgttgccagtccccagactgtgaggtttccacgctggagtcaatggccctctacgccatgttggtgacaagaaaagcaacaggcaccttcacttagaggacagacaagtgtgagttcacatctaggtgtaggagcaggggccacccttgccttgtctgtctgtgaaatgggggtgacaaggctc

SEQ ID NO: 750005 - DNA, 520 bp, Homo sapiens
agtctggctgaactgggccttccattcaccaataactagtacaagtgaaagatgctctgctgagaaatctggcagctttgggtgcatttgaggtaaagactgcatcccctccctgctgtttttgtaaataactgctttattgagatgtaattcgcgtaccataaaattcaccctcttaaagtgtacaattcactgctttttagaatattaacaaagctgaataaccaccaccactatctaaaccactatcaccacatatctaagttctacacatttttatcaccctctcaaaaaaccctatacccattagcagtcgctccccatccctggcagccactaatttactatctmagatgacaccttttcatgtgtatttatttgcacaaattcctagacaggaagtggaaaattggtaacccgtggcctggtcatcaccaggctgttttactatacaggaaaattgaaataaaacccctgttcttgacttttttgagggtttggtttactgagtcctcatcct

SEQ ID NO: 750006 - DNA, 525 bp, Homo sapiens
tgggtggtccaggaagcatcctccatgtccatctctacacttggaaatgctgccccttgccaggactggtcgacatagggacgtgggtatgccgggaccttgttgtcttgcccactttcctacctatcacctccccttctgtgacagctcctccactccacactaatttaagctttgtgtagatatgggcccgctcagcatttcaagccatttaacctgctgtgattgaagctgtggcaattaaattttaattgagatgcacgctgcttaagcagacacaagacagctacagctattgctaattaattttcttccgaaatgacaacatttaataattatgcttcgtgacgcgtrtgttatttatgtagcctcacctctcccggtgccgttcagtggtgtccatcaggggtagttggtggtggtgtcacgtgtgcctgctggatggcttctgatgcgaacagtgcgctaatgctccggaggtgctgagacgcccttcctggcgtttgaaagagccccccagtgcct

SEQ ID NO: 750007 - DNA, 609 bp, Homo sapiens
aacctggcacacccatggcctctggcctgcttgtcttgctcctgaagctgcgacagggaagccaccaggttggcttgcaaatacaagaggctttgtaaaatatgcttccggctttgccagtggaagtgctgggttgaaccagaggaaggtgtaaccctgggttgatttggtcacttgggccaccaggcttgcccggcaaatgggattggggatgcttcaggggaaattggacaggggaaaatttgggttaagaggccccatcatggctgactcaggagccaggctctcagggaagcacaaagaaggaagagcataaacttcccctccctatatacccacacccttcccatgtaaagtaaaaaccaaggtaatatccgctgtgcactgtcatgagcccgcactgcccagagtacttacrcgcatcagctcatgtgaaacatttacagacagactatcatccttccattttacagatcaggaaactgtggctcaggaggcttgagctgttatttcaaggtcccatctggaaggccagcaggtcccattgcctcctaagacaggctgtgacatttgaaatcctgctgacgaaggatcttacaccagggtgtg

SEQ ID NO: 750008 - DNA, 619 bp, Homo sapiens
ccttgtctagagatgccccaggtgaccaagcaaggctttcatgagtcacagcaaactgtatttcccagggcaagaggtaaaggtgtgctattaaaggcagaggtgggggcaaacagatgcaagaatcggtaggaatctcagtggtcacaagcaaacacacaattctgggaattctgataagcacttttgttctggaatttcaaagacaccattcattcattttattcatttatagagatgggggtctcactatcttgcccaggctggccttgaacacttggactcaaaccatcctctcgcttcagcctcccaagtgctgggatgacagtactgggccacccaccacacatggccagtttttatacaggagtaaayactaaagaccatatgcacctaggtcctgttgggctcctgcactacagccacactgctgggacatccacaggcaaagagagggctggtgaagactttcacggactgaaaagggttggatgagaaatccgacctggaaaagagtctggcctggtgaggctgaggagagtagcagcctgcagtgtgtggtcaatgatcactgcagagaaacgcagagggtagtcagtgtgtctctggcttagcctca

SEQ ID NO: 750009 - DNA, 535 bp, Homo sapiens
gcatcttcaccatgaaatctttgtccacgcctatgtccagaatgatattgcctaggttatcaacaagaatttttatagttttaggttttaaatgtaagtctttaacccatcttgagttaatttttgtatatggtgtaaggaaggggtctagtttcagtctcctgcatatggctagccagttagcccagcaccatttattgaatagggaatacattccccatttcttgtttttgtcaggtttgtcaaagatcagatagttgtaggaatgcwgacttatttctgggttctctattctgttccattggtatatgtgtctgtttctgtaccagtactatgctgttttggttactataaccctatagtatagtttgaagtcaggtagtgtgatgcctctagttttgttcattttgcttagaattaccttggatattcatgcttttttttttggttccgtatgaattttaaaatagatttttctagttttgtgaaaaaaaagtcaatggttgtttaataggagtggcactgagtctgtaaa

SEQ ID NO: 750010 - DNA, 577 bp, Homo sapiens
ttctgtgaacacactggagatcattttggaaggcattgtatacactgcacagttatgattatctgtctgcaccaaaggcttcccaataagaggtttgcaattaacacaggtatggattaatactgtgcaactgacatttgggaatggtctccaggaaaaggattaccctctctcccaactctgtatatgggtccagcagagctccccagataaacaataaacaacataaacaatgtttcattctacttagttttctctacagctgtctctgtcatccagcctctaagatctttaagaacagggatcttaagtacaaatattwgctgggtatggtggtgtgtgcctgtagtcttagccacttgggaggctgaggcaggaggatcacttgatcccaagaggttgaggctgcaatgagccaagatcgtgccacttgcactccagcctgggcaacagaccaagaccctgtcttaaaaacacaacaaaaagcagaaatcttatcccattgatcattataagcccagtaaagatcaaccaactatgccagcaagggaacagtaaagaatcaaccaagaaaccg

SEQ ID NO: 750011 - DNA, 559 bp, Homo sapiens
gcagctaggacacagggcaccaagtcctgagtctgcacagagcagcgggaccaagctctggcccaagaaaccatttttccctcctaagcttccaggcatgtgatgggaggggctgttatgaaggtctctgacatgccctggagacattttttcccattgtcttggctattaacattcagctcctccttgcttatgcaaatttctgcagccggcttgaatttcttcccagaaaaatgggyttttcttttctaccatatggtcatgctgcaaattttccaaacatttatgctctgcttcccttttaaacataagtttcagtttcagataaactctttgtgaacacacacgactgaatgctttcagaatcagccaggttacctcttgaatgctttgatgcttaaaaattcttctgccagataccctaaattggtggggagtggtggctcacacctgtaatcccagcactttgggaggctgaagcgggtggatcacttgaggtcaggagttcaagaccagtctgaccaacaaggtgaaaccctatctctactaaaaatacaaa

SEQ ID NO: 750012 - DNA, 553 bp, Homo sapiens
tggaaaagagtctgggctcctcaaaaaattaaaaatggaattactggccaggtgcggtggctcgcactgtaatcctagcactttgggaggccgaggcaggtggattgcctgagctcagcagttcgagaccagcctgggcaacgtggtgaaatcctgtctctactaaaatmcaaaaaaaaaaaaaaaaaaatagctagacgtggcggcttgcacctgtagtcccagctactcaggaggctgaggcaggagaatcacttgaactcaggaagtggaggttgcagtgagccgagattgcgccactgcactccagcctgatgacagagtgagactctgtctcaaaaaaaaaaaaattaaaaatggaattaccacatgctctaccaatttcacttctatgtatatactccgatgaagtacaagcagtgattcagatttttctttgtagacagagtgtcactcccgtcgcgcaaactagcagtgcagtggcatgatcttggctcactccagtctcaactctctgaactcacgtgatcctcccacctcagcctcatgagta

SEQ ID NO: 750013 - DNA, 640 bp, Homo sapiens
cagtttggatgttgtactctctaaatttcatactgaatgtcattccccaatgttggaagtggagcctggtaggagatgattggattatggtggcaggtttctcattaattgcttagtgccatatccttggtgctgtcctcatgatagtgagatcttacaatatctggctatttaaatatgtgtggcatcttacccctaacttttttgcttctactctggccatgtgatgcattggctctctgtatttgcttgttcttgtactgctacaaataaatacctgagactggatgatttgtaaagaaaagaggtttaattgtctcatagttctataggctgtacaggaagtatagtkgcttctacttttggagaggcctcaggaagcttacaattatggtggaaggcaaagggggagcaggcatgtcttacacggctgcagaatgagggaaagtggagaggtaccacacgcttttaaaacatcagatctcatgagaactcactcattatcacaaaacaacatcgaaaggaaaatctgccctgttgatccaatcacctcaaatcaggctttaggtccagcattggagattacaattccacatgagatttgggtatggacacaaatccaagccatattattcaaccc

SEQ ID NO: 750014 - DNA, 514 bp, Homo sapiens
ttctgaataaatgaaaataactcttaattccccagagtaatttttttttagtatgaaaacctgacatacataatccacttaagtagaatatactataatgagtacagttttgtatgttctacatcgcttaggaaggtcagtacttttcasactgtggtatagagaccacccagttcaggatgcccctgattgcttgttaaaattcatcctcattacttattcattaaatcctaattcctgagattggtaatagcattttagcaaacgctgaaatgtactcttgggtaccctgaagttttaaagtctctgaccaatggttttcattaataactgctcgtgccattgttcaatgacggcattgaatgagatcttcaggagtccttgcaatgtacagagctaccttctctcatagttctaaattatgtgcagatcttctatttcatacactatggcacatggaaaagcattacttagatctccttcaagagatcctgttatggagagcggctgacca

SEQ ID NO: 750015 - DNA, 540 bp, Homo sapiens
caaaatttaaatgtgtatagttttaacatcaatgaaatccagaagagatagttgaaggaaaggtttctgaggtttttaggatggaaggaagcataggtaaaagatcataaaactgtcagcagctttttaaatatatagagtgttacataaacacatatctgtccataagtagtgatgccataaaattgtctatccttcacctcaaatacacaaagtgtaatttattttttctttaayggatttggtcttccttatgtgatgagtattgggatatcatactttattttggtccatttgcgtctaatctcacattagtctataatgctgtagattcaagtatccctttaggcagtgctgactttcttggttaaaaatcctgtctctcaaccagtacctctctacctccttaccctaaagtggcatctgagggaagggttgacttcctaacctcttagtgctgagataagatccctgcattgtgatgccctgcgacaaatgtgaattccttttctttttttctcctatattcctgcagttgct

SEQ ID NO: 750016 - DNA, 621 bp, Homo sapiens
cccccactctcttgttaatagaattgtctcaataactaagatcaagtagactctagactcctcatttttgtttatccccttagcatatgtttctctgatatttttttctaatggaaagcaacatcagcaatcttactgttttattaacatttccaatagtaacatggtcaactggccagatctcatggctctctcacagtatatcttgcatcaaatgttttccaaaatttattaacttatttagaaaatatatttatcaggttacaattatagtttaaaaatgtacaatttttttgcgtaaatcaaacttaaagtggaggagttarttttatctcaaatacatgggttactttgctgaaaagttcagcatttctttttcttttatatgaaaatcccttcaaaatatttaatgaagtttttttattcatttattcattcaacaaatatttattgagtgtcttctatttggccagaactattctaggtatgagagaccacaagttaaaacaaatgaactcactgaccacatggtgcttattctctagtgaaggacagaaaaatagtaaaacctcaaatgatatgtgctatgaagaaagtgatagggagaactttttcaaacaa

SEQ ID NO: 750017 - DNA, 420 bp, Homo sapiens
attctttctcttaaaatattattgtttactgaagtcacatgatccatcctcatctcctcttcctgtacatactctcacatttatcttgtggatcaacaaagttttatttatcacctataggtaggttgcatctgaatttactcctaaaaccctggcttctctctctcaagcttttttttttttttttttttgagatggagcccttcactctgtgtctagcaggctggagtgcagtggcgcaatctcagctcaccacaacctccacctcccagattcaagcarttctcctgtttaagccacccgagtaactgagattacaagctcccaccaccacatccagctaatttttgtatttttagcagagacggggttttgccgtgttggtcaggctggtctcaaactcctgacctcaggtgatcc

SEQ ID NO: 750018 - DNA, 622 bp, Homo sapiens
ctctatatgggtgtggagacacataaaacaggcttggtccctcgtgtggtgctaggagcctcaggagagtggtgggtgagtgaccagcacgggttggtgtggggaactgcagaaagccccaggtggctgcccagctgtgttgggtccttggaggtttcttgaaggaggtggtgtcggggtggactagaaggcctaggaatgagggaagcagctctggtgggcatcagaggtgacgtggagagaagggcccagggcagggctgctgagggcactgaggggtgtggtcttcagcctgaaggtggtggcaggagctggggccacagtgccagatgactgatgtgtcactgagaagggctgccctggaggctgcagaccagcgtcctgtgcttccatacctgcagaacttgaggcrctgcggagcccacacaccagtcacttccatgctataccccagcctggaaggggtgacatgctctgggcttggcagtccagcaacctggtgcccttggtactcgggctcctcagcacccaccagggctgtgcagctccacccagctcctgctgagccactggctggcaggtgcctgcaggagcagactgtgcccatcacacttgcctctgt

SEQ ID NO: 750019 - DNA, 616 bp, Homo sapiens
acgttcactacgcagaagtggctcagcataaaggtctttgcccttgtcatcatcaactcgagtaggctgaggaggaggaaaaggagtggttggtcctgctctctcaggggtggcagaggtggaagaaaagtcacctgtaagtggacctgtgcagttcaaacctgtgttgtttgaaggtcaactgtatgatgattgcctacatagaacccggtagctttctacagcacttggaaggaaatccacactccttatcaacacttcaccttgactttcagtctgtgtgatctggccctgcttgcctctcctacctcttctctctctactcacacattatttctctttctttttccctcctaatacaccartggcatttcccctcaaggccttcgcctctttgcctgaaatgctctggatttcatgactctggaaatcatgactggattttttttttttcagcgtgcaagtcatggccgaaatgtcacctccttggatagtccctccatcttcacgcacactaaactagtccatcttgcatgcctttcttcatggcattgtgtgccatgctcagaaattatcttgtgtattcttaagtccatatatgtattacctgtctttc

SEQ ID NO: 750020 - DNA, 594 bp, Homo sapiens
aggtaacagtttgtacagccaggcctttctgaccccaaatctcattctcttatctcaaatcctagaggagagtacggccatttaacttacgtgaattttgctatacacatttgcgggggtggtgggaaaggaaattttaagaacatgggccattcttctcatcatgatctatgccatggagtaaacgtggggcagagcctgaatctaaaaaggttgccttcactcctctcagttcctttgggcctctcatggccaatatgtctaggtgtccacatgatttccatacaacaaagttcctaaatgcaagccccctactttacttgggctcartcaaagaaacagtgatgtatctggtccaaccatggacattaaacaatcactcttcctgtatcatgcacattgatagacaagttaggaaatttttgaagatgatttttacaatatcaatgcagtccgtgttgtctttggaatgtactggccccaggaaggtgcaattatgcccagggcagcctccaggttaggaatggccagctggtctgtgggttaaagacccttgccttggcagccatctttgtgcccctttgtgcttggaat

SEQ ID NO: 750021 - DNA, 625 bp, Homo sapiens
tttctagtctccggaactaggaggcaatagatgtctgtggtttaagcatcccagactgtggtattttgtcgtggcagctggagcaagctagcacaggaggcacgaaacctgcccttccattcccccagccctcccatcccatgcagaggtgttagagagcatgatctactgtcactgaaacagtctaggtcctagaagctgccttgaggtggccttcctttccatctcgggggagcagagctagctgttctacctgccttgctctatgactckctgctggttgtggaggccactcacggaggacccactgggcatgtccagaacagcatcacagacatctgcatcctgacaggcagaggccaagaccccattcttccttccacttagtagttgtgtgaccttgagtgggttacaccttccaagcctcagtttctatatctgtgcaataaggggaagtgaaggttcctccctcctgggggggaccggggaaccaaatgagtgaccgtgtgagaaacactcagcccagcccagaacacagatgaggttagcaaccctttcatcccatgtagcatttgtctttacaatgagtctgagggggagacgttatccccattttatgcaagaa

SEQ ID NO: 750022 - DNA, 585 bp, Homo sapiens
tcatcatcatggcattcataaatgtcacaaatgggacagtgttgtgttcagactcctgaagtctccatcagagacctgccccatcccagtctctatggttgcactgaccagcacttttcatgtcttgacccaaggacaagaaagaatccagtgaaaatatcttcactcccgccccctgccaccaaacttcttcaacttgtccgagtgggtattaygcaaaaccattgtggtgggcattggtggttttcaacctacgtttatttcttgtttggggttaacattttatttactttggggaatagaatagattggaatattgctttcgattcttcattcccctttaagagaattagacatccatgcccttcatcacatgacttttcagtatctctccattgaaggggagaatttgtctctccaagggactgaagtcgagcttggccatgtgactcttgtgaaccggtggcacatgagtgtttgcgagctgagcagaggctctaaatgtgtttgtgtgatttggtcttctgtgcccctattatctggtgagaaaaacatgtgtcctggtctatacaggatgagagggac

SEQ ID NO: 750023 - DNA, 585 bp, Homo sapiens
tcatcatcatggcattcataaatgtcacaaatgggacagtgttgtgttcagactcctgaagtctccatcagagacctgccccatcccagtctctatggttgcactgaccagcacttttcatgtcttgacccaaggacaagaaagaatccagtgaaaatatcttcactcccgccccctgccaccaaacttcttcaacttgtccgagtgggtattacgcaaaaccattgtggtgggcattggtggttttcaacctacgtttatttcttgtttggggttaacattttatttactttggggaatagaatagattggaatattgctttcgattcttcattcccctttaagagaattagacatccatgcccttcatcacatgacttttcagtatctctccattgaaggggagaatttgtctctccaagggactgaagtygagcttggccatgtgactcttgtgaaccggtggcacatgagtgtttgcgagctgagcagaggctctaaatgtgtttgtgtgatttggtcttctgtgcccctattatctggtgagaaaaacatgtgtcctggtctatacaggatgagagggac

SEQ ID NO: 750024 - DNA, 597 bp, Homo sapiens
ccactttccactagatcctgatattcaggagaactgaagtcatctctttttcatctttgtatttcatagcctatcacaccgtctggaagaagggtctccaaaaatatttgttgaacaactgaattttaccaagtagttcaacaaatcttttgtgcacctaccatgtcccatgaccctcagccttcttatgttatctcaaataatgctaatgatacatactctggggagatcagccaaggttttgtctttatctgaaaaaaaaaattatatacgtttgggaatgggggataggaaaggtattctaagaggtaaatggaatacaggcaggttttgtaaacaagacatacataaaggacagaatacatttatagaatctatatcttgcaataataaattacaagtttgkgatcttttaaagaatattccattcatatttaagatatgttatatttataatgagcaagattctgctgaaaagttaaactgagtttgcacttcctgaacaaagctaatttctggaactcccctaggctgtgacatttgtagtaatgtgttcagagaaatgaatacagtttaagtaaatagccaaataactgt

SEQ ID NO: 750025 - DNA, 599 bp, Homo sapiens
gaagtgctatggaataagacaatgcagtgattttgccatgcatttgattgcaaagcaatacaaagccaatcagcccattctgtaattagcccatctttcatgagagtcttacctctcagtagcgggtagggacattttcatttcttttaggtagccaaaggcatgcttctctaatccaaacatgcaaagagctatctscccataacttccattagccagccccagaagtacatttcctatctagttattacaaccaaagctctctcatagtgtgaagtaatttctgctaaccccaaaagtcaaaaccattagataaggcaatgcaaaatacaacagagctttagattttgagaaggatttatctgctttcaattccaggggtttcatgaggaaaacagaggtttttcccaaaacagggtctgtggtgcctcctctgtttttcccagggagtcccataaaacttgaatatccacttttaaaaagctgacttttaaccatagtactctttaaaaaatctttttaagtctcttattacatgactttagccaggccaaacagccaatatttttgtgctcagagaaaggaaaattcaagacagt

SEQ ID NO: 750026 - DNA, 627 bp, Homo sapiens
aaacaagtaaaataaaacaagtaagggtggtttcttccaggaatgcaggcacagttcaatattaggaagcattcacataattcactaaattatgaaatcaaaggagtaaggccatttggctagcatcctgggtgatgaatacacattcaataaaatttgtcaccwttcctggtttttaaaaatccttataaaacaaaaatatattaatataaatttaatttttctcgcacgcctataatcccagcactgtgggaggctaaggtgggtggatcacatgagtccagggatcgagacaaacatgatagaatcctgtctctactaaaaatacaaaaattagctgggcgtggcagcacacgcctataatcccagctacttaggaggttgaggcatgagaatcacttgaacctaggaggcaggggttgcagtgacccaagacagggctactgcactccacctgggcaacacagtgagactctgtctcaaaaaatacatatatttttcttaatatggaaaaaaaagcctgtatcatgtttagtgatcaggtactagaaggctttcactaaaatcagaaataaaaataaggattcccactaaccaggacaagcccccaaaataacccatatgtaa

SEQ ID NO: 750027 - DNA, 585 bp, Homo sapiens
ttaatttttaatatctgcatagcatttcttacctataagaatgtgtcttcttgttctaaaagaatttttacatgaatatttcatgtgatggtattgtatagtattgtaagtcacttttcttcttttctcattagaataacctgtagcatagaaactcttccatatgtaagaaattggtcttagcttttaatgargggatttttaaaaatagtgcagtgtgctggctatttgtcaagaaaacattacatttaacatgatgcctgcagataagtttaaactctctcctttccctttattcagcttccctgtgaatccaagtcatagctcccgttctcatttcctttcgcctctgaacctttgtggagataccgtcctgccggagcagcaacaagggaagccagcccacagtgcattgttcagctccctcgctcgctccaaaatccacccgacccagccccaggaggaccagagcagggcccactgcagcagattcaggtggacggggcagaagtgagcagtgctgttggctgggagcgctgggggacagagaaagactcccgaccatgctggggcctaagagaacca

SEQ ID NO: 750028 - DNA, 626 bp, Homo sapiens
tcaccttgctctgatgactgctgtggcacctcctactgtgcttgctctggccttcttgcatgcctcagaatttttagttagaagtcatacacatcctgtaggatagtagatacagaggccagtggtgtttaagcttggagatgagcatgccttgacttctgcaggcattagttggagggttcatgtaaatctagtgagaatctggctgtgttgaggtttgcggttgctgtggcaactgcggtgcactagacactcagaattaccgggygccctgccagctgtctgccagaccttgctctatgcccacccctcccactggggtaagagctactttttcccctcctaccttctcatggctgcaggaattcccactgcgccctctggctgccagattagatgcgcttcccaagcaaatgaaggcctttgctccttaggggagatagaggcagcgggagagggtgaagcttggcatcactgggggatgctttcccgggatcttccccaggcttcctgtcttcctggggagcgtccgctggggttcctggaggaaaagcctgcaagaaaatgtgaacacctccatctgtggctctcagaggctcccacgctcaagcgagcccacacttgac

SEQ ID NO: 750029 - DNA, 639 bp, Homo sapiens
gggagataaatcagcatctacagttgctaaaatacattatctaaaatttctaattttttacaaaaattataagatatgcaaaaaataaaggaaagtgtgacccctgctctggggtaaaaactgccaatagaaactatctgtgaggggagcctggatgctgaagttaggaaagacttcaaagcagaattttaaatatgtttagagaattaaagaatcatgctttaaaaattgaaaaatgataacaatgatgcattaagtagagaatatcacaaggaaataaaaattatttttaagacaacagaatrgaaattctggaattgaacaatacaagtgaaataaaaaattcacttacatgagggactcaatataatatttgagatgacataaaattgagatgacataaaaattactcatcaaaaattaaaatagatcaatagaaattactcaatctgaagaacatagaagaaaaaagaatgaagaaaaatgaataaagtgtcaaaacctatgggacgcaatcaagcaaaccaacatgtctgtaataggaatcccagaaaaggaagagaataattttttttaaaaaaagagagaataatatatgtgaaaaatagtaaccaaaaactatccaaatacccaaaatta

SEQ ID NO: 750030 - DNA, 561 bp, Homo sapiens
tcagctttatcctatggaatcagaaagagaaattaaactaaaagtaagcagaagaaaaaaatatatacagactagaaaaatagggaacatcaacgaaagcaaaagctggttctttgacaagatcaataatattgataaacatctcgccaagctgatgaggaaaatgagacagaagattcaagttactaatatcaagaataagagttgttatattacaacagagcatacagacattaatactattcttagagaagatcatggacaactctatgtaaactatttgacaacttagataaaataaacaattttttggaaacacacactctttaaaacttcactcaagaagaagtaggtaacctgagtagccctgtatctatagaagaatcaaatatgtagttaaaaaccttcccacaaaraacaaaacaaacataaacaaacaactcaggctaagatagcttctttggtgaattctcccaaatagttaaggaaaaaataatgttataataccaattctatacaaagctttacagtaaattgaagaggtgagaatatttcccaatt

SEQ ID NO: 750031 - DNA, 661 bp, Homo sapiens
ccacatgtagaagaatgaaactggatccctatctctcacgatatacaatataactgaagatggattaaagacttaaatctaagacttgaaaccataaaaattctagaagaaaacctatgaaaaactcctttggacactgacccaggcaaagaatttaggacaaagaccccaaaaacaaatgctgcagaaacaaaaataaatgggatctaattaaactgaaaagctaatgcagactgggcatggtggctcaygcctgtaatcccagcactttgggaggccaaggtgggaggatcacttcaggtcaggagttagagaccagcctggccaacacggtgaaaccccatctctactaaaaataaaataaaaaaatagctgggcgtggtggtgcatgcttgtaatcccagctactcgggaggctgaggcaggagaatcacttgaaccagggaggcagaggttgcagtgagccgagattgcaccactgcactccagcttgggtgagaaagagagactctgtcacaaaaataaaataaaataaaataaaataaaataaaataaaataaaataaaataaaataaaataaccatcaaagtaaacagaaaacctacagaatgggagacaatgtttgcaaactatgaatctgacaaaggactaatatccagaa

SEQ ID NO: 750032 - DNA, 582 bp, Homo sapiens
tccacagaatgtaaattttctccacaagagacagctttgcagggccattttaaaatacataaaaaatattttggggtaaaatacttttactttagtgtccactatctgtcatgtgatgtatcttactacatcacctgtaaattagccaagtgaagaaaaaaatgattgctatggtgtattagtcagggttttctaaagggacaggactaatacgatagatatatacacgaaagagagcttattaagaagtattgactcacacgatcacraggtgaagtcccacaataggtcatctgcaagctgaggagcaaggaagccagtccgagtcccaaaaactcaaaagtacagaagccaacagtacagccttcagtctgtggtcgatgaccctgctaaagcactggtgtaggtccaagagtccaaaagctggagaaattggagtccaatgttcaaggtcaggaagcatccagcacaggggaaagatggaggccaaaagactcagccagcctagtccttccacgttcttctgcctgcttttattctagccacactggcacctgatgagatggtgcccaccagattgag

SEQ ID NO: 750033 - DNA, 582 bp, Homo sapiens
tccacagaatgtaaattttctccacaagagacagctttgcagggccattttaaaatacataaaaaatattttggggtaaaatacttttactttagtgtccactatctgtcatgtgatgtatcttactacatcacctgtaaattagccaagtgaagaaaaaaatgattgctatggtgtattagtcagggttttctaaagggacaggactaatacgatagatatatacacgaaagagagcttattaagaagtattgactcacacgatcacaaggtgaagtcccacaataggtcatctgcaagctgaggagcaaggaagccagtccgagtcccaaaaactcaaaagtacagaagccaacagtacagccttcagtctgtggtcgatgaccctgctaaagcactggtgtaggtccaagagtccaaaagctgragaaattggagtccaatgttcaaggtcaggaagcatccagcacaggggaaagatggaggccaaaagactcagccagcctagtccttccacgttcttctgcctgcttttattctagccacactggcacctgatgagatggtgcccaccagattgag

SEQ ID NO: 750034 - DNA, 625 bp, Homo sapiens
ttaaaataaaatcaaattgtcttttataattagaaggaaaccacagaattcttatttgtttttcatgtgttctgggagtcaacagaatagttgaatcacggaaccaagtcagggaaagctttctagcccaaagaattggattcaattgaatgccaacattttcctttactacatttaggattcttgttcaatgtaacagcgacaatatcaagttgttaacagacattatagaactaaaaccaaacttcttcgtgttttctgtttgagcatatcatacacagtataattagactagtcaaattttatgtaattacaaacattagaaattgttttgaaattgaacattaaattactttaatttccaatatyttatgtagacactaattaatttttgaaatttaagtagaaaatgtaatctggaaaataaaccctaccattgtgtttaaaaatataaacaaaagtataaatattatttttattatttaaaatacaatctattataattattacctagtagttttgacaattatatgttttcatcaatatcacacttttaaaagttaaggtaatacaatcttaaaatagatgttaatgagacttttctgacaattttgtaagaacagtt

SEQ ID NO: 750035 - DNA, 636 bp, Homo sapiens
tagtattttagccagatttgagagaagcaagaagaaaagttaaaatgaaacagatctcaatgtgtgcagactgtcaaatctgtctctaggagaactgattcactctggacagacaaaaatagtaagcacatagagtacaagtgaaattttcttggggtccttacagctctgggaacactgagcccatccctgcctcagcatttcacccaccatgtccccttactgaaaatgttcttttcttccatccacagccactcatccttcacaaatacagttgcagtctacttcctctggagaactctttctgtcctcattggtatttctttcctttgatttcctaaagcactaaggtgcacaccatgcaacttagctcttaatggtctaccttactgaataatctgataccttagtaacccaagtagaatgttctttcctgactaacaaagactccataccccacccacctcctcactacctaccaggttcttccaaaatgtaycaaataatttaggtccagagtattgaatataacctggcagtctgcaatcttagaatgactcttcaaagactcacactttataaatgagaacatctggacatgagtaggtcagcagggaaagccaggagaactaggct

SEQ ID NO: 750036 - DNA, 664 bp, Homo sapiens
cagatgtaactatatgagcattagttcatccctcaagaattattaggaaggcaggccatggggagcatttttttgctggagttacacaaactaaaaagcatgttttaccaacaagctgagttgctcatttcaatgctttgatttggaaatgtgtgcaatgagatgcagaaagtaactgattaaggatacactgtcttttgatggcgaattaataataatcataamcacaacaataaacacataccaaaaaaatagtttcattcccaggggatacagaaggcagactcaaagctataactggaaaaggttctttatgctgatgtttaggaaaccttagtggctaagggaatgctgaaaaggataaccaaatccaaagaactttagagaatgtctcataccatgagggagcaaaagatctgctagatccaaatattttaacatgcccttttattgagagcctgctgtgtcccacatactatatatatatttttataacttaatctcattaagtcctctcaagaatacacaaaaaagatactttttacccattttagtgactgaagtgtacagaggctatataaagtgctccagtttacagcactgatttagtagagctgggattcaagcctaggtctaacttaccccagaactgctactccttcct

SEQ ID NO: 750037 - DNA, 610 bp, Homo sapiens
cctgcgctgggcggctgctgtggacagaagcgccgctgtggggaggggcaggccgtgtcccggccatcggcggaagctgctccaggcagtctgcagctcaggccgtgcagctgggcccaatccccaggaggggagcagctgtgaggccgggagagccgggtcctcgttccctttgcagcaagagtagccgccccgttggcaatctgagtctccttcaacctttccagccggtcctcrcactgttggggctgccgcctcgctctcagcccgcagcaccggccccgcacaaggcccagtccccaggcaacggctgcgttggtatcccctgcgcaccggccaccgagggaatggcgacagagacacgggaaacagcgacatgtacacgggaggaaaatccaaaacaaaggttgcggagagtgtcagagggagggccaaagaggacggagaaggactccaccccacaggctcctgagcgcccggttggccacagacgtgccctggaggaggcacacacaggtcgtccttcgggagaactctgcagctgggtgcctgtggactgctggagaagagagagtaaaccacgaatttcaatagaagaccgaataggtcc

SEQ ID NO: 750038 - DNA, 614 bp, Homo sapiens
taggtagacccagagcacattcataaactccccttaccagagatgtaatttgtaggaactgctaattcagatgttttgggaatcagagggtggaccacatgatccccagagctcttttagacaggacagaccctttagtccgtgagcctctcatgtcctgccattatctgcagttatgagagatgcaccttgtcaagtaaaagtaaactttgcctgttgcccatttgcacatttcctttattttcgctgggcaggaaagccctttcaagggctcactgaagcacggtgtgtcaaacttggtaatattgacgttgatagtttaagattcacagcaggaaacaaatggcattggcatgaagcaatcagaaacgaggtggctcaatctgagtaaaaaacatctttccaactgtgcagttaaagggcaacgctatacsccataacctcctggccgaagttgtgatccaaaagagagattatatgtacatagttgatggaaaagaatgctgtcctatgaactggaatacctttttatacgttaaaatgtttttgaactttgtatctaccagttagcctattagccttgatcagggagctattaaaacccaggttataag

SEQ ID NO: 750039 - DNA, 471 bp, Homo sapiens
caaaatcaccaccttgttcatcattatcactgaacatagctgcaggccagaggttgtgccaggtatgcacaactgtgtcttcagttagaactatgttccaacagttggcaatagcatacatggcatccttcatgctaaactccttttgaaaaccttccacattcatgcctctgttcactgctgctagcatgctgttcaagaaagtgtttttatatttactctttattgatttaaggataccctggtcacatgactgaatgagtgaagyaacatttggggaaaagtacatggcatacacagtgttttttgatgagaatttcagctggaggatgaacagagcagttgtcaaggaataacagtctcgtagttgtcatttactccagcttccctgtagtgagcaccagcaaaatgtttgtaaaaccaatcagaaaagatgtccctggcgatccatgcttttttgctagtgtaaaa

SEQ ID NO: 750040 - DNA, 565 bp, Homo sapiens
acctctagtattttgccatctgagtctaacccaaccctttatttggaaagtgccaatgtcaaacaatataactccttctcagttcatttctattaaccttgtaacaagggtacaaaaaaaaaatctcccaaactccccagctgagtataaccaacaaaatctcgaatacttagccttgccagttaaagccagccaatttttgcaaaatatgcaatctttatcccaaagccaggttggggaaccaagaagaaagattaaagacatggtcacaccctttgagtatcatcaggtgctgcccagcatactcctcactcctatatgacactttttatttctccagcttgcttaaaagactaggtggctttatayagatacagaacagaggtagaaaaacagcctgcgattcaatatatgtcttataaactattctgttgttttgtcttacctgtttacaatacactatttacttatttatatttgtacaagacatcccgtaatacactttagtccaggcttttgtggtgtgagaacttaatatataaaaataaaactcaatattttcata

SEQ ID NO: 750041 - DNA, 506 bp, Homo sapiens
gtagcttggtctcacctttttatttatttatttatttttatatttatttatttatttatttattttgagatggagtctcactctgttacccaggctggagtgcaatggcgctatctcggctcactgcaagctccacccsctgggttcatgccattctcctgcctcagcctcccaagtagctgagactacaggcacccagctaattttctgcatttttagtagagacagggtttcaccatgttagccaggatggtctcgatctcctgaccttgtgatccactcgtgttggcctcccaaagttctgggattacaagtgtgagccaccgcccccagccctcatctcttttttgactgcatcaaaaacaaatctggatcattaaagacagatcatctatttcattagagacagatgatcatctagatcattaaagacagatcacctatttcattcaaaagtctcaaattacacataactccaaaatcatatcctccctttaaagacagtc

SEQ ID NO: 750042 - DNA, 506 bp, Homo sapiens
gtagcttggtctcacctttttatttatttatttatttttatatttatttatttatttatttattttgagatggagtctcactctgttacccaggctggagtgcaatggcgctatctcggctcactgcaagctccaccccctgggttcatgccattctcctgcctcagcctcccaagtagctgagactacaggcacccagctaattttctgcatttttagtagagacagggtttcaccatgttagccaggatggtctcgatctcctgaccttgtgatccrctcgtgttggcctcccaaagttctgggattacaagtgtgagccaccgcccccagccctcatctcttttttgactgcatcaaaaacaaatctggatcattaaagacagatcatctatttcattagagacagatgatcatctagatcattaaagacagatcacctatttcattcaaaagtctcaaattacacataactccaaaatcatatcctccctttaaagacagtc

SEQ ID NO: 750043 - DNA, 506 bp, Homo sapiens
gtagcttggtctcacctttttatttatttatttatttttatatttatttatttatttatttattttgagatggagtctcactctgttacccaggctggagtgcaatggcgctatctcggctcactgcaagctccaccccctgggttcatgccattctcctgcctcagcctcccaagtagctgagactacaggcacccagctaattttctgcatttttagtagagacagggtttcaccatgttagccaggatggtctcgatctcctgaccttgtgatccactcgtgttggcctcccaaagttctgggattacaagtgtgagccaccgcccccagccctcatctcttttttractgcatcaaaaacaaatctggatcattaaagacagatcatctatttcattagagacagatgatcatctagatcattaaagacagatcacctatttcattcaaaagtctcaaattacacataactccaaaatcatatcctccctttaaagacagtc

SEQ ID NO: 750044 - DNA, 506 bp, Homo sapiens
gtagcttggtctcacctttttatttatttatttatttttatatttatttatttatttatttattttgagatggagtctcactctgttacccaggctggagtgcaatggcgctatctcggctcactgcaagctccaccccctgggttcatgccattctcctgcctcagcctcccaagtagctgagactacaggcacccagctaattttctgcatttttagtagagacagggtttcaccatgttagccaggatggtctcgatctcctgaccttgtgatccactcgtgttggcctcccaaagttctgggattacaagtgtgagccaccgcccccagccctcatctcttttttgactgcawcaaaaacaaatctggatcattaaagacagatcatctatttcattagagacagatgatcatctagatcattaaagacagatcacctatttcattcaaaagtctcaaattacacataactccaaaatcatatcctccctttaaagacagtc

SEQ ID NO: 750045 - DNA, 660 bp, Homo sapiens
acaagacaacacttgtctgtggatgtcaaaatgtcctagggtagacacagtcagaaacacaattgacaaagaaattcggtcacctctgtgacatgcaaaagcctgacacaataaccttaattatgattgataacagaaactcagacaacagaactctagaaatccctgtcaatctggaacacacattaacatttttctctaaaatataacctgaagatcatacactaccttatttcaacaatcytgtgtagctaaacatgtcaaataatcctgtttacttctcctttgaacactcaagggaccctgtgtagcattcaaatttaggggttaggaaagacaattttgactgaaaaggctcaaaacacttaacagaatttcatgttatcataagatattcatttagccaatgatggctcaaatttattttaaaaagcaaaaacctttactcattaagagggaagacctagttttccaaataacctgtctcttgtcctccacttcattttttggtagtttgcacacaaaaatctttcactgcacaaaagttttgttcaagagggagccaaatttcacccttacattagtctattaatgccacccccatttttttaagtaataccttacagagaaatcctcaataaatgcttgttgtgcttttat

SEQ ID NO: 750046 - DNA, 607 bp, Homo sapiens
ggatcccccagcacatcaccctttggtattcaatcttggactgtcagacatctctgaccttaggtggacacatgtgccacttcatgctttcacttcagaggcaatggcctactatgagctttataagtccatgctttcccatgcttcctgttccactagagtgataaccatgaattaaaaggcattacagctttatttttctttcaaaacatttgatctaagcacttattttctttaagccaatcagagctcttgtatagaaacatgacacacatgacacatatatatctacacagagaaacagacagaggtccagrtctacttaatttcaggaggaggtccatcctccttcccttgatccctggggctcctagatggtgatggcagtctgaatcaccaaagccagggaaaggaaacacaggacccatcagtcctgctgcaccattagggagaccggccctagacccaccaacttgtgtcttgggaacagtccgccctccaatggcccacgtttgcagcagtcaacaggtgcatcttaggaactctggggtttgtgagcctgtaaggtgactattagagcctttttctttaagtcaatcagttagag

SEQ ID NO: 750047 - DNA, 789 bp, Homo sapiens
tttttaaaaccatcagatctcatgagattcattcactatcacgagaacagtgcaggaaagacctgcccccataattcaatcacctcccactgggtttctcccacaacacctgggaattgtggagttacaattcaagatgagatttgtgtggagatacagccaaatcatattattccacctcggctcctcctaaatctcatgtccttacatttcaaaaccaaaccaatatgccttcccaacagtcccccaaagtcttaactcatttcagcattaactcaaaagtccacagtccaacatctcatctgagacaaagcaaattccttccacctataagcctgtaaaatccaaagcaagttagttacttcctagatacaaagggggtacagacattagrtaaatatagctgttccaaatgggagaaattggccagaacaaaggggccacaggccccatgaaaagccaaaatccatcagagcagtcaaatcttaaaacatcaaaatgatctcctttgactccatgtctcacataaggtcacactgatgcaagaggtgtgcttccatagccttgggcagctctgtccctgtggctttgcagggtatagccgccctcctggctgctttcactggctgctgtcaagagtctgtgggttttacaggcacacagtacaagctgttggtggattctatcattctggtgtctggatgatggtggccctcttctcacagctccactaggtgatgccctagtagggacactgtgtgggggatccaaccacacatttcccttctg

SEQ ID NO: 750048 - DNA, 789 bp, Homo sapiens
tttttaaaaccatcagatctcatgagattcattcactatcacgagaacagtgcaggaaagacctgcccccataattcaatcacctcccactgggtttctcccacaacacctgggaattgtggagttacaattcaagatgagatttgtgtggagatacagccaaatcatattattccacctcggctcctcctaaatctcatgtccttacatttcaaaaccaaaccaatatgccttcccaacagtcccccaaagtcttaactcatttcagcattaactcaaaagtccacagtccaacatctcatctgagacaaagcaaattccttccacctataagcctgtaaaatccaaagcaagttagttacttcctagatacaaagggggtacagacattaggtaaatatagctgttccaaatggkagaaattggccagaacaaaggggccacaggccccatgaaaagccaaaatccatcagagcagtcaaatcttaaaacatcaaaatgatctcctttgactccatgtctcacataaggtcacactgatgcaagaggtgtgcttccatagccttgggcagctctgtccctgtggctttgcagggtatagccgccctcctggctgctttcactggctgctgtcaagagtctgtgggttttacaggcacacagtacaagctgttggtggattctatcattctggtgtctggatgatggtggccctcttctcacagctccactaggtgatgccctagtagggacactgtgtgggggatccaaccacacatttcccttctg

SEQ ID NO: 750049 - DNA, 789 bp, Homo sapiens
tttttaaaaccatcagatctcatgagattcattcactatcacgagaacagtgcaggaaagacctgcccccataattcaatcacctcccactgggtttctcccacaacacctgggaattgtggagttacaattcaagatgagatttgtgtggagatacagccaaatcatattattccacctcggctcctcctaaatctcatgtccttacatttcaaaaccaaaccaatatgccttcccaacagtcccccaaagtcttaactcatttcagcattaactcaaaagtccacagtccaacatctcatctgagacaaagcaaattccttccacctataagcctgtaaaatccaaagcaagttagttacttcctagatacaaagggggtacagacattaggtaaatatagctgttccaaatgggagaaattggccagaacaaagkggccacaggccccatgaaaagccaaaatccatcagagcagtcaaatcttaaaacatcaaaatgatctcctttgactccatgtctcacataaggtcacactgatgcaagaggtgtgcttccatagccttgggcagctctgtccctgtggctttgcagggtatagccgccctcctggctgctttcactggctgctgtcaagagtctgtgggttttacaggcacacagtacaagctgttggtggattctatcattctggtgtctggatgatggtggccctcttctcacagctccactaggtgatgccctagtagggacactgtgtgggggatccaaccacacatttcccttctg

SEQ ID NO: 750050 - DNA, 789 bp, Homo sapiens
tttttaaaaccatcagatctcatgagattcattcactatcacgagaacagtgcaggaaagacctgcccccataattcaatcacctcccactgggtttctcccacaacacctgggaattgtggagttacaattcaagatgagatttgtgtggagatacagccaaatcatattattccacctcggctcctcctaaatctcatgtccttacatttcaaaaccaaaccaatatgccttcccaacagtcccccaaagtcttaactcatttcagcattaactcaaaagtccacagtccaacatctcatctgagacaaagcaaattccttccacctataagcctgtaaaatccaaagcaagttagttacttcctagatacaaagggggtacagacattaggtaaatatagctgttccaaatgggagaaattggccagaacaaaggggccacaggccccatgaaaagccaaaatccatcagagcagtcaaatcttaaaacatcaaaatgatctcctttgactccatgtctcacataaggtcacactgatgcaagaggtgtgcttccatagccttgggcagctctgtccctgtggctttgcagggtatagcygccctcctggctgctttcactggctgctgtcaagagtctgtgggttttacaggcacacagtacaagctgttggtggattctatcattctggtgtctggatgatggtggccctcttctcacagctccactaggtgatgccctagtagggacactgtgtgggggatccaaccacacatttcccttctg

SEQ ID NO: 750051 - DNA, 471 bp, Homo sapiens
tgcaggaaagatccaccctcataattcaatcacctccctccaagttcctcccacaacaggtgggaattgtgggagttacaattcaagatgagatttgggtggggacacagcaaaaccatatcaatgtacattcaactattgatactgcagaggatgactttagggaaaawgcttctgcagttggttgacaccatgatgacacagacaactgaaagatacagaatatctaaaaatattttagttaggaacctatgcctttaagagtaattacatgggattgagtgaaacttgaaatggaaattgatttgtttatttatctgagaccactgttgtcattactttcaatggtctattttctagtggtaaaaagcccaccttccttttttccgtaatttacattatctttcaacatcatttttcaaggtttacttatgcaatctagaattaacactctgttgaaaacccaagcct

SEQ ID NO: 750052 - DNA, 640 bp, Homo sapiens
gccttctggggctgaggtggttttattgatcacttcagctaatgtcagggataaatttcataccaccttttctaatgggaccattcccatttaggtcatttattaactcccctgcataaacaaaggtaatctcattttggagacatttttgcctacatctgagaactgcataatctataatgaagtttccttctatagttgaaagtcttttgtgattattcacayggcgtaagacaccaagttttttgaaagaaaggcacattgcaagttaatgcttggctttcacacaaaaagcaaagttcctgagggtacataggtgaccctggaaagaaaatacaatttacaattgtattctccctgaatgacttctagcaatcacggttaatggtcccccgagaatggcctcctggccactggttggccaggtctagttcttgtttttaaagtaactacccacattcagtccaacctgccttgtttattcacactgccaatctaggtggcattcatctacctcatgaaattattgagcaatggctatgggattgggtcaaggagaaacatccagaggtgttgaaatgtaatttttctcagtgatttggagcttccttgtctcagcagacactactaaattgcctct

SEQ ID NO: 750053 - DNA, 640 bp, Homo sapiens
gccttctggggctgaggtggttttattgatcacttcagctaatgtcagggataaatttcataccaccttttctaatgggaccattcccatttaggtcatttattaactcccctgcataaacaaaggtaatctcattttggagacatttttgcctacatctgagaactgcataatctataatgaagtttccttctatagttgaaagtcttttgtgattattcacatggcgtaagacaccaagttttttgaaagaaaggcacattgcaagttaatgcttggctttcacacaaaaagcaaagttcctgagggtacataggtraccctggaaagaaaatacaatttacaattgtattctccctgaatgacttctagcaatcacggttaatggtcccccgagaatggcctcctggccactggttggccaggtctagttcttgtttttaaagtaactacccacattcagtccaacctgccttgtttattcacactgccaatctaggtggcattcatctacctcatgaaattattgagcaatggctatgggattgggtcaaggagaaacatccagaggtgttgaaatgtaatttttctcagtgatttggagcttccttgtctcagcagacactactaaattgcctct

SEQ ID NO: 750054 - DNA, 561 bp, Homo sapiens
  misc_feature 77: n = A,T,C or G
cggaatcagtgagtccctggaggaggaaggaccacccagaaactggcagaggaggatcctgagacttgctgtgaacntcccctccctgcgagctcgccccttgactccagcctccaaaaccggcccagcaagaccccactayaccctcgcccgcgcggctcacttaccgccgctcaacttccggcaaccacagctctctctgagcgcgcgccccgatgacgcaagcggtcctgcccgcgcctgccactgggaagcggcgcgcgtgcgcaaaggagcagaggcatgccggggaaatgcgcccctagcaccgagctaagtgggaggaacttgagtcgtgaggagggcggggcatcagggggcggtgacgcccctgggggaagcgatggagagcgtctcccttaccagatgtcggaatgtctacattcccttcaggcttttaagaaagtgcccacgttctctcttttgatttcagaggatgacaggaatgatcaccatggtcattctccaggagaggcggcatcaaacgcagcacaggggccatcagggtggcaggtgtggaga

SEQ ID NO: 750055 - DNA, 593 bp, Homo sapiens
ctggtcctgctctccccgtgggccctgcggggcggcggcatgcatgtacatgagggtgaatcccacagctaaggaagaccttctttccttgatttccagggcatctttttgtgccgtttgcctttccatgttctaggctggaaatttctttttttttttttaagaaggagtctcgctctgtcgcccaggctggagtgcagtggtgcgatctcggctcactgcaagcttaggctggaaatttcaaataagcttgtgatgaaacccacagtaggaaagcttgctttttttttttttttttttttttttaaagcactggccatcttattcccatggcaggtccttgctgctcagagaggcaggccgtggtgactggtccttggtgctcagagaggcaggcggtgtgayggtttttgccatttctccatgcctgggacctcctaaggtcaggcattgtgtctcattcactgctgcatctccagtgcccggcacagtaaatgaacagagccagtgctcaggcagagggtgccaagtcaaaacaggattaaaagtcccccagtcttggccatagctggcccccaccttccacctccaac

SEQ ID NO: 750056 - DNA, 611 bp, Homo sapiens
ttcagttgtatcattgaaaaaaaaatgatttatctactcaatgataagtattttggggaaatatagtacacacatatacacacagtcatatccacacatctatgtatatgtgtatgtatataaatgtatattttatatgtataaaatatatgataaatataaatatattatttattatcacatgtaagtatattttaaatacagaaatatatacacattgatatggtttggctatgtgtccccacccaaatctcatcttgacttgttgtcatccccatgtgtcaaaggcaggaccaggtggaggtaattgatcatgggggcagttcccccatgctgtactcatgctagtgagtgagtctcatgagatctgatggttttataaacttctggcatttcccctgcttgmactcactcagtcctgccaccctgagaagaagatgcctgcttctcctttgccttctgccatgactgtaacttccctgaggcctccccctccagctctgctgaactatgagtcaattaagcctctttcttttgcagaggaaccctagttattgctgttcttcagtttgggattttgtgtctgtggcagcagagttgaatgtccacaa

SEQ ID NO: 750057 - DNA, 632 bp, Homo sapiens
cacacaaatatacgtacacacaaatatattgtttgtgtttcattcactgctatacatctacctcttagaagagatctcagcattgaatttgaactcatttacataggacaaaatggtgttattgtatccacaatgcgtaggaggaagcttaggcttattaaagctaaacatgttgcccaacatcagagcaacagagagaaaatgtgatctcatcagggccccaggcttcagtctctttactccccacaacctgtacagtctattgtctagagagctactgtctagagagctactgtctagagagccaggtttcaaatccctactcagttcatatttctatgtgacatgggccacttttctctgctcyttctataaatatttctcatatacgcataaggtaaaaagtactgctttagtctatgaggatgcaaaaatgcaaagtggacttgcttttaattttttttcatttaatagaaggagatgtatagaaagaaataactacaataccaagagggaagcaagatccaggtgagctcagaaacagcaggtgccaacacaaggcagagtgaaagggccaggaaagtatagggattgttaagtaatgctccaggcagagaatacacagcacttag

SEQ ID NO: 750058 - DNA, 632 bp, Homo sapiens
cacacaaatatacgtacacacaaatatattgtttgtgtttcattcactgctatacatctacctcttagaagagatctcagcattgaatttgaactcatttacataggacaaaatggtgttattgtatccacaatgcgtaggaggaagcttaggcttattaaagctaaacatgttgcccaacatcagagcaacagagagaaaatgtgatctcatcagggccccaggcttcagtctctttactccccacaacctgtacagtctattgtctagagagctactgtctagagagctactgtctagagagccaggtttcaaatccctactcagttcatatttctatgtgacatgggccacttttctctgctctttctataaatatttctcatatacgcataaggtaaaaagtactgctttagtctatgaggatgcaaaaatgcaaagtggacttgcttttaattttttttcatttaatagaaggakatgtatagaaagaaataactacaataccaagagggaagcaagatccaggtgagctcagaaacagcaggtgccaacacaaggcagagtgaaagggccaggaaagtatagggattgttaagtaatgctccaggcagagaatacacagcacttag

SEQ ID NO: 750059 - DNA, 646 bp, Homo sapiens
gaacaaggtactagcaggacttttctacctaatacctagaagctttgttattgattgaaaccgtatatacctcttaacatcagtttgctttcagcagaagcttgttttcatttttgtaatgaaagtatgttatctaattatatacattaatgttcagaacaaagtgtaattattaacctttggtatactattagaacccatttggcctcattttagagttatttcttttatgaatatcgcctcccctttataacaattaayatttaataacttattttttctcagtttacaaagaaaattcacttttttttccattggagtgaaatattttctgtcttaaaattactatttgggtcctttaggtcactttataaatctaagataagctgtaaaatcttagtgctcttattttttccatatcaaatattttgctcttctttattcttagaaattacatcacattattcatcaatgggggcacatatacatgtgtagagttgctcttccgtatccatgggggattggttccaggattccttcagataccagcatgtacagatgctcaagtccctcaggtaaaatggtgcagtatttgcatgtaacctaggcacctccttccgtatactttaaaacatttctaggttac

SEQ ID NO: 750060 - DNA, 656 bp, Homo sapiens
taataatacatgtgcagagctttatgtgtgtccatatacttcaagccaaactgatttttggtgaatttgtctctttataaaatacacagaaatagaaagaaaagcactgaaaattgtggactcctagtaataatcaattaagcaattagcattacattacattttcctgtcagtttggcgagcgtatttttcaccaccgaagataataaaaaaaaatcttaatttataatkagaaattataaaatctgtcagatgatctagaatatatttacgtaagatatgaagattttctttcaacaataatgacataggagaaaaaatcagttatacatttccatatttattaaatatcttcctattacaaaaatttcaatttctgctttaaaaatattaaatttctcataatagcataacccagaggcaaacattgtcattattttaattaatatttctaagaacgtggactttggaatctaagagagttaaatcctggctttggccctttaaagctatgataaatgtttcaggtgatggatatcccaattactctgatttgatcattacacgtgatacacacatatcaaaatatcacatgtatgccttaaatatgtgcaactactatgtattctcaaagaataaacattaagaaaagttat

SEQ ID NO: 750061 - DNA, 581 bp, Homo sapiens
taatctgagtaaacttttttcttttaagttcattttcacacttttcctattcgtctcttatgatgtagaagctctatgtaaggaacttgtttatttgctagctaattggatgcatcagttggtacaaggatattgtcatttatcttttaaggaatcaatatgtggcttatagtgcttttattattttattttatttttttttagacagagtctcagtctgttaccctggctggagtgcagtggcacaatctcggctcactkccagctctgcctcccgggttcatgccagtctccctcctcagcctcccaagtagctgggtctacaggcacctgccaccacgcccggctaattatttttttgtatttttttttagtagagacggggtttcaccgtgttagccaggatggtcttgatctcctgacctcatgatccacctgcctcagcctcccaaagtgctggcattacaggtgtgagccacactgcccggcttatagtgcttttaataagaaaatacactgaatactttttgttgttacaggtttgtggtattttcaatatttcgtgctagaaaatttcattg

SEQ ID NO: 750062 - DNA, 698 bp, Homo sapiens
gggatccctggagaatctccaactggcctgagtacttaaaagatggagtggggcatcagaaagtttacaccatttgcaggggggaggagcctggcccctcttgatctcgtgtggtcacgtgggattcaatctgtgagatgggggcctgttaacaagaacctctctcactttgctgtattgtttttcctttttcgtttttgtccaataaattccataagcccctcacccttcaaaatgtctgagagcctaatctttcctgttcatgtcacaagaacctagtttttagctgaactaagaagaaagtcctgcaacacttttggcacccaacgtggggcttgagaaagggtgagtaagagacaaaacaaaaaattgttttttctttcactcctaagcacttttttcctcaaacttctgaaggtagatgaaactgtgcccccactccctgttgctcctggggattggaaatgtttgcctcagtccaacccagccttttcctggscttttccttctttttttcagcatggtagagcaagcaagctgtggtttcctgccaccttccctgcaccccaagcagggctaggatgcatggcccaagggccccacatggctggctagttatctctacctcctatccatggagtctcttcctccctagccagggagtccagctccatcccacagcaaattaatgtctcttg

SEQ ID NO: 750063 - DNA, 644 bp, Homo sapiens
ggccttttccttctttttttcagcatggtagagcaagcaagctgtggtttcctgccaccttccctgcaccccaagcagggctaggatgcatggcccaagggccccacatggctggctagttatctctacctcctatccatggagtctcttcctccctagccagggagtccagctccatcccacagcaaattaatgtctcttgctagtggaggaactatttgcataagaataagaggttcttccccctgaccccggcatccttttatcttctccaccttgtcagcagttaactttgaaaggaggttttttccttttagaagatgtttagctgggccaggaatgttggggagcattgtttatatcatctgtagagttttaattgtgagaaaggattygtgaggctgatcttaaactgtagccaatctgacgtgctttgtgtgtctttctgtatggtccatagcaaattttgctgcaggcctccatcttgttttacgtccttgggagtaagacctataaccatgtggcaatattttgttctagcttctggcagtttacaataatggcctgggattcaatcctagcttagggaatgagttctttctggtttttcttttcttggatcctgttttgctggaaaaaggttt

SEQ ID NO: 750064 - DNA, 659 bp, Homo sapiens
aaataatgaatgaatgtgccgttttgctagtaagccatacctgtctgtttttcacatgtctagctatataatattcaaaatagtaaaactgtatctttgggcacttattctctacagttgtataaggcacatttacctaaatgtacttataaagatgaaaataaattatattgttacataaatttacttgcaccattgtagctaaggcatagacttgaagtaaatggatatcaaagtaaaatgacctgtactttattaatwtggaaaggaaacataaatatatcatgaaaatttaaaattaatgttgtgtttcttacaactaattccaatatattttcacttatattagaaaataccaacagtaggaacttatttcccccaagagcatgcattctgagattctgtccgctttaaattaaaactgaaaatatttctgaactaatattgttatcgaaattgattgctattactaatgtatcttttgtagagattcttgagctcataaaatgaagacaaaataaagaattacaaaaaaattaaaaaacaaggcagagtacaaaggacgctattatcttccaagatacttagtttataatttctttaaattaaaaaatttccttagccctatcgttaaatctcatggcttattcctaaatcta

SEQ ID NO: 750065 - DNA, 577 bp, Homo sapiens
ttcagtaatgaattaaccttagtttactttcatttttttactttatgaaatttttatttttaaacttcgtttttttgtgataatgcttagtttaaaacacacattatacaactgtaccaaaaaattcctatttaatattcttattctataagcatatttctgcttaaagataaatttattttaatttttactctttcagctttttgttaaaagctaagacgcaagcacatacgttagcctaggcctacaggggttygggatcatcagtatcaccatcttctacctccacatcttgtcctactggacagtcttcaggggcagtagcatacaaggagttgtcatatcctatgataataccttcttctggaatgcctactgaatgacatgcctaaggctatttaactttttttttttttaacaagtagaaggagtacattcttaaataatgaaaaacagaatagtataataaatacataagccagtaagatagttatttcttatcagtttcaagtattatgtagtgtacataattgtatgggtgatatttttatacaactgggagcacagtaggttgttt

SEQ ID NO: 750066 - DNA, 611 bp, Homo sapiens
tcagttttgaaatttccatttggttcttactgatgtcatatttctctactgagacaatattttattgctaaaagtttctgttttttaatttgtttccagtatgtgcatatttgcttgttgtagcgtttttatgatggctgcttgccatagtcttaatrtttgtggttccccaaaattcatatgttgaatggatggctgacagtacttagaggtggagcctttggaagttggttagatcatgaggttggagtgcacatgatgagattagtgcctttgtaaaagagaccccagagagctgcgttgcccattctgttgtgtatgatgcagtgtgcaggtgccatttattgggaatagaacatctccagacactgaatctatcaatgtcatgatcttggactttgcagcctccagaattattagaagcaaatgtttgttggttagaagccactatagcaaactgaactgactacgatactgctttaaaatctttgtcagataattctaacatctctttcttatctacactttggtgtcttttttattcaactcgcaattttctttgtttctagtatgatagataattttttattctggatattatgttacaaaac

SEQ ID NO: 750067 - DNA, 578 bp, Homo sapiens
cctggcaggtgttgaaaggcacttcttacatggcagcggcaaaagaaaatgaggaagaaacaaaagcggaaactccagataaacccgtcagatttcatgagtcttattcactatcacaagaatagcatgggaaaaactggccccatgattcaattacctccccctgggtccctctcacagcacatgggaattctgagagagaaaagtccagttgagatttgggtggggacacagccaaaccatatcagatagacaatgtaaaaaatgtaaagtgtgatattaaaggcctcatattaactacaaagcaaaaacctataaatgatacactaaaaagaaaaagaawaaaaaacatactactagagaaaatcacataactacaaaggaagactgaaagagaaaatgaaaggagaaaagcatttctaaaactagacaacaaataagaaaatggcagtagttaagcccttgcctgtaaataattaccttgaatataaattgattaagtcatacaattaaaagacatagcgtggcttaaagaattaaaaaaacacaacagcacgactccactaaatcctagctac

SEQ ID NO: 750068 - DNA, 576 bp, Homo sapiens
aagtgaggaaaatggagagatactgttcgaagggtacaaagttgcatttaaacagaaagaaaaagtatttgaagagataaatatgttcattattttaattccatcattccaggctgtgtatctttgtgtgtgtatatatgtctataamaatgtaattatatacaattataagttgttaaatgaaaaattatttttaaaaattaacatttaaaaattggcctattgggaccattttcttttatttaatattttctaatttgtaatatataaattgatttggtattttcattattaattacatttaaataaggccatatatttgaatctgaatctctacttctgtatcttcatactaagaagttatttttattgccttattctctgcttaaataattcacttgactaaatagtaacccccaggtcatatttcctccttcattaagtttttctttgttaaattttagatggttagactcagtttttcccacttgtcctatgtttattatggaaattattatattagtttacatagattacctaatcatacataaatattttgatcctattagttccttt

SEQ ID NO: 750069 - DNA, 570 bp, Homo sapiens
tgattttcttcagttatttttctgtatttataaatactaaatgttttttcaccctctcttcaggagatatttcttcactattcatacaaaataatacaatttagaaatacctacttctaaataaatatttgtaatgtgccattttaaattgtgtgagcatgaaaattacaaattaggttaggtattctacatttcctgatttattatttccctgcaggctcttgtgagccacccttggaaacagcagtaagcaagcattttgcagctctggtgaaatgtaggaggtagcgttattttagtaccaaagtgtgggtatttttaagaatcaaktctcctggttttacaccttttaatgttgagactagcaagtggactgaagtacaaatggaaagtagggaggtgaaatactgagtgattgctttgagttttccatatcactcactttcacattttagaaagaagggtagtagtttagaaagaatagcagcagtgcaaatctatacataatatattgcatttggactttcaaagtcccatcaaatacacatagtccacccttcttttaatggt

SEQ ID NO: 750070 - DNA, 495 bp, Homo sapiens
atgcggcgtgtggggaagaagtgagagctgaggccaccatcacgttaacagctctaacgtggtcacacgcagccaggaaaagccatggaacgcggccataaaatgagtggctgcagcttttcaccttgccttgctcgtgggagcagaatgtgtgtcccagtccttgccttggcccagaggcaaatgggtggaagtggccgtgctctgagcttgcttcagcctgcwgtctcctgcatctctgttctccggagcctctgccttgccctgtggaacaaagcactgttaactgcgtggcttaaaacagcaggagtgtgctccctcccagtcctggacacaagaagttcaaatcaaggcatctgcagggcctgctcactcactgacgggggcacccttctctgggtccctgccttctggcgtcagtcccgtctccgccttcgtccttacagagtgctctccttcccgagtgtcagtctctctcctcttctgaggacatca

SEQ ID NO: 750071 - DNA, 631 bp, Homo sapiens
cttgcatctgagtcggcctgactcccacactagcacagtttcccacacggctgccccgctcttccagcaggagagacaagattcactgatctctgtgatcatcgtcgaagatgcctgatcacccctgtacatatgaagccctgtcagcatctaaaggtgctcaataaagatccagatccccgggggaatacaggataggaatcaatgtccaggcttgtgcaggtagagagcaggtgcctactgtggtctcagccatctcatggctacagggactttgtgccccatagctgcaggtgcaaatgacagcacctctctccataaattccttgctgattaaaacagagatgtgacctcggggtgatccccctcccattcaggttctctgattctgttactgttgacgcagagagaaaggaaattaatgactgtgctggaggaaggggcacggcagagagcaactggaccctcccccatcctcctgggacacagyggtgatggtgaagactggtcctccaggtgggtccactctggccttccgcgttatcctcaggtcagtgtgcactgaggacactcaggcctggcacacagaccagaagctccatggcagaagagagtgccgtcttcagcacgt

SEQ ID NO: 750072 - DNA, 516 bp, Homo sapiens
ggccaggctggtctcgaactcctgacctcaagtgatccacccacctcagtctcccaaagtgctgggattacaagcgtgagccaccacacctggccaaattgctttcatatttatttaagtagaatgtattgatttataattgacataccacagaattcatccatcaaacgtgtacaatrtcataatcaatggcaaaaatctgaaagcatttcctttaagatctggtataaggcaaagatgtctgttctcaccacttctgtttaacacagtattaaaagtactagcaagagaatcagacaagaaaaggaataaaatgcatccaaataagcaaaagtaaaattattcctgtttgtagatgacaaaatcctacatgtaaaaaacccttaagactccacaaataactgataaaattaataaatgaatttagtaaagttgcagtatataaaattaacatatattaacatataaaaatcagttttatttctttacaccaatctattcaaaaaagaaataaag

SEQ ID NO: 750073 - DNA, 574 bp, Homo sapiens
cagtaatgaaactagggaatacagaaagatcaggtttctggagggcagagaaaatacgttcaatttaatattcctgacttgcctccaaagtctttctctcatgtcaaatcagagttctcccagttctgtccctccgtgcaaatacacgaactcctcgacttctcaacagccgctcatcttccagctatcttactttcttyttttttgagacggagtttcactcttgttgcccaggctggagtgcaatggcgtgatctcggctcactgcaacctccgcctccctggttcaagtgattctcctgtctcagtctcctgagtagctgggattacaggtgcatgccaccatgcctggctaattttttatttttagtagagatggggtttcatcatattggtcaggctggtcttgaactcctgacctcaggtgatctgcctgccgtggcctcccaaagtgctgggattacaggtgtgagccactgtgcccagcccagctatcttattttcttcaatggtacgaccacctttgagtccttcctctcttttaatcattgtctgaagactcttggttaattct

SEQ ID NO: 750074 - DNA, 605 bp, Homo sapiens
ttggattgcatcttttagaaacaccacagttgtgcttattaaattgaacaagttaacaaatataaagtacttagaatagctcctggaacattgtaagttctcagtaaatattaattatattgtaggtccccaaacccttctcttaaacctttggagtcagatgtatttttgggattcagaattttttggattttggaacagtatgcatagtatctctagcaccccaaartcaaacacattgaaatttctgcattgaaacacatgaatattcacacaaagtatagtatatactatataacaaatagtctcatgttaattcaggtcagattttaccactgaatacattatttgaaaacttagggcttttggccgggtgtggtggctcatgcctgtaatcccagcactttgggaggccgaggcaggtggatcacttgaggtcaggcgttcaagaccagtctggccaacacggtgaaaccccgtttccactaaaaatacaaaaactagccaagcttggtggcatacgtctgtaatcccagctacttgggtagctgaggcatgagaatcgcttgaacccaggaggtggaggttgcagtgagctgagagca

SEQ ID NO: 750075 - DNA, 658 bp, Homo sapiens
agcaagtggaaatacttctcatgctcatggattggaagaattcatatcattaaagtgtccataccatccaaagttacctgtatattcaatgcaatctctactaaaatcctaatgacaatttttacagaagcagaaaaaacaaacctaaaatttgtgtggaacgacaaaggtcccgaaatagccaaaataatcttgagaaataaaaacaagactgaaacaccacacttcctgatttcaaaatatgttacaaaggccccttctttgaaaataaaaaaaaaattacaaagctgtagtcattaaaacagtatgatactgaaataaagatagacatatagaccaatggaacaaaatagaaagccctgaaataaacccatgcatatgcagtgaactaatctttgacaagggtgctaagaatatgcaatggagaaaggatagtctcttcaacaaatggtgctggcaaaactatgcaaaawaatgaaattagacccttatctcacaccatacactaaaaacaactcaaaatgaattagagactgaaatataagacctggaactgtaaaactcataggcaaaaacataggaaaaaattttcagaacattggtcttgacaatgatttcttggatatgacactaaaggcacaggcaacaaaagcaaaaa

SEQ ID NO: 750076 - DNA, 587 bp, Homo sapiens
aacaagatcttgtaaaccatgagcagtctttcaaaacttctgtttcaggagaacacacatcatttccatctagtttctttagaaaaagtaagttcatggccactcttgagttcaacatggtaaggatgtacacacttcctccaggaagagatcacaggtcttcaagccaatgtaataacttatcacaaaaatccaaaatctaggaactgttgataaccatagtaaacagatggttatcattttctaaaattgttaaaaatacagttgaccctagaacaacatgggtttgaactgtgtgggtccacttacacgggacyttttttcaaaacagttacacccagcaagactgcttctcctgcctccccttccaccttctccacttcttctgccttttccacccctgagacagcaagaccaacccttctccttcctcttcctcagcctactcaatgtgaagatgatgaggatgaagatctttatgatgatccagtttcatttaatgaatagtaaatacattttttcttcttcatagttttcttaatgacattttcttttctctagcttactttatcataggaatacagtat

SEQ ID NO: 750077 - DNA, 612 bp, Homo sapiens
aaagacctagaaatggaaataacattcgacccagcaatgtcattactgatacccaaaagaatataaattattttattataaagacacatgtacatatatgttcattgcagcactattcacaatagcaaacacatggaattaacctaaatgctcaccaatagtagattggataaagagaatgtggtacctatataccatgaaatactatgcagccataaaaaagaataagatcatgccatttgcaggaacatgggtagagctggaggccattatccttagcaaactaatgcaggaacagaaagccaaatactgcatgttctaacttacaagtgggagctaaatgatgagaaaacatggacacatcatgggggaacaacacacactgrggcatatcagaagctggagggtaggagcaggaacagaaagaggaagaacaactaatgggtactaggcttaatatctgggtgacaaaataatctgtataacaaactcccataacacaagtgtacctatataacaaacctgcacatgtatccctgaacttaacataaaagttaaaaaaacaaacaaacaaaacagaaatgattaaacaggagccatgcatttttggga

SEQ ID NO: 750078 - DNA, 594 bp, Homo sapiens
ttataaggtaattgcccagtagattctccttgtctgctgcctagatagagcgaatttctcaagacagggggattgcaatagaaaaagagtttaattcatgcagagctgctgtacaggagactcaaattttattattattcaaattaatctccctgataatttggggatcagcatttttcaggataatttggtgggtagggagtcagaaagtggagaatgctgattagtgaggttggagaaatcacagggggtaaaagtgagtttttcttgccctcttctgttcctggatgggatcacagaactggatgagccagattattggtcccaatggcatcagctggtgcatcggaaccagggtctgccagacktctcaagcactgatcttacgttttacaacagtggtgtttttcccaggagcactttgggggaggttcgaaatcttgcagccagttgctgcatgattcctaaaccacaatttctaattttttttcttttttcttttttttaagataaggtctcactttgtcacccaggctggagtgcagtggtgcgatctcggtttactacagcctggacctcctgggctcaagggat

SEQ ID NO: 750079 - DNA, 654 bp, Homo sapiens
attacatgttataatggtaacttttaaacatttctaattttctaatcttgtaagttattttaattatgttctaattacagataaggtctaactcctaacagcatagttggggtgtggttaactccgcatgtcccaggccttaccaaactttaaagcaggcaagtcaaataatttgcaaaagctgaagaagcagtttatgaccttaaagcatttagtgaacctaatacctgacctgaataatttaagccacatgtctacattttgaagatgcttttattttaccaataatctttaaagctgtctttatttctcaaacgttaaagtcacatgaactaaaaggaattatagctttcatttttcttttaaaaatacttaatctaagtgcttatttttctttaagccaatcaactagagctcttttatgttaacatcacacacataatatatatatatatacacacasacacacatatatatatataactacacagacagaagaagatgcaatagttgtaagattttttatttgccagtttattaattggattatagaccttagggtggcatccttcaagaaacaaggcagttagtatggcttaataagcagccacagctggaagacaaaaacggatccccaaaattaagggtcccatt

SEQ ID NO: 750080 - DNA, 625 bp, Homo sapiens
catgagactctttttgccttctaggtcttaataggtcttaatcctctgtcccatctagccctggaagatccagaggcacatcaccaccatgacatctttcatgtcagaaggatatggaacaagaaagagaggagagactcaccacacctcttgcccaaccttctaggtcaggcccaaaagaaagggaaaagctttaaacttgatatcacaagtttagtttagaccagactgcgcttttaatacctgaaaaaaatgaaactgaaagtgaccataaaatatcatgaggaaaaaggaaggaatatctaacagagaggtttgcaaaagtggtaggagaaaaatgaagctattttctaattttatactgcggagtctagcccattaggttgttgatccagttgggattttactttctaatatctttttagtgaacaaagcaggtaatattaggcattgctcaagtgaaaaatatattgcgggggggaggatwtttttgtccatgttcaaaattcaggaaaatatcataaagggtatatctatattaaagtctatttaccttgcttatttatagttgcaaatttacataaaccccatttaaaattttcttccacatcatgtagaattttgc

SEQ ID NO: 750081 - DNA, 608 bp, Homo sapiens
ctgaatgagaaggcaaactgaagcatatctgaaactctgcatgtagttgtgcttcctgtcctcaggggagatggcataaggatagagatagagagcttcttgacagggacaacacacagcctgaaagagacgcctgagaaggtgctgggagtagtctcctctatggaataaggcaggcagcaaggtcaacaggtgccaccttactagggaagaaaatgtaggaagagtgaaaggaacttatgaattcagacaatgggtatcagcttacaggaatcattagcctgacaggtagtagtaggtgattcacaaaaatttaaataaattaaaaagttgacagaggtacaaaggaagcaacatttcaaacatatttctcgtctctgaggagggtatttggaataaattcaattctcttcataaactatgcttttsttgccaaaacaaaatagatcacagctcttatccacgcaggaattcctttggtttgtatgtagaaaggtagctcatcctttcaacattatccagaattaaatgtagcctttataacccttggaaataacaatgtaacacttcttcataggtgagtaataaatgactttttccaaaatcaa

SEQ ID NO: 750082 - DNA, 627 bp, Homo sapiens
aatttactcatttgcatatttactccttccttaagactcaaaacaccttctggtatgaaatcatttattttatatccccattgcctgtcacattgccctgtataataagctccccatgaatgtaggaggctgatccttaaatagctaaaggaaacatcacttctttctacctagttccaggaagggtgaccctgattacccatgtcatttcatttaaaaaggtcagcatraggtgaatgaaaattgtgtgatatgttgactttgttacatcatttgacctaaaaactatgacctccttcctttcatgtcatgtatctccaaatctttctggaattaatctcaagttttcaacaatggacttagaactctaaatatatacagttgataaaatgcccaatcaatgaagtcaggcctgaagtctaagctttaatatttattagcatgtgacctttgttggttaaccatcctgaaccttagtttcatcttctgtaaaatgagggtagtacaactcacctgtcagggtagttgtgatacagctgcaatgactggaggagccccagggtccttggtctcacactgatttagctaaaacaacacagacacacatggagtagttttaaggagcag

SEQ ID NO: 750083 - DNA, 532 bp, Homo sapiens
cgatgacaccctcttgaagtgctattgactctaatcccccataggttgttgaagagagtgatgaattgatgggttaggcatatgaggaaaagatgtttacctaagattgaatattgtggggattgattgatttccasacaataaaatagctcactcttatcattttcctccatcacaaataatattgattactaattgttcaaaatgtcttcccaactactaccttgaattttcaatatatttcagagtaatatcaagttacatttttgagtagctaaaataataacccacttattgagtaagcttccttaggtatcatgaccataggcaagagaatttttaatttaacttttaaaagtaacaatagaaaacagtggctttatggtgataaaatctatttaatatactcaatttttacatttttaatacaaaactagtgttaactaggattatgaatgcattttccaactctttagaaaaaatttcaaatgcacacacattttagaaaccttggtcaacttgaattgaatga

SEQ ID NO: 750084 - DNA, 558 bp, Homo sapiens
tatattaaataattattttctatgaaaagtagagtttgttaattttcctgtaataatttttatggcttcactgcttcatgggttagtgtcacgaatttgggtgagtataaaacattcatgtaattatattgactgaaatgatgtggggcattgactaaggtctagaaaacttytggtaatatttaaaaactatatgacagtgagatgcaatatgttttcaacatgccagaagaaagattagaaggaaaagtgccccagttggtcctactgaactgatttacgctctgggtttcgccatacacatgtatccttgtccaacacaggagaccatcttctttgatcagttcctgattcagtttctcctctgcgcactctgccatgttttgtacctccgtcataaccattcactgcatcctgacttactgtattcaagcaaaataggatgcttcctagacaattacagttttcttagggaacataaaggcaataaacatgaaataggggcaaaacatgtagccaagatgaaatgcaaaattgtggaaagcaaatgtaagggat

SEQ ID NO: 750085 - DNA, 588 bp, Homo sapiens
aaagtctatttttgtaaataaaagtatattggaacacagctatgtccatttgtttacatattatcaatggctactttaccactaaatgggcagagttctgtagctccaacagagatggtatggttcatgaagctcaaactatctagtatcagtatcatgccctttacagaaaaaawatatatatttatttctgcatccatttaatggctgttacatgatgctatgtcctcaataactagaataaattagaataaatgggtataggaaccatgggtgtcctttgacactcttggctactataagcatcaattgaagtagttataacctgctcaaagactaggaattaggggattaaacttctctgggatgaacatctgggtcactaggcaagcaatccagaacagacaaggggctgtccaaggataaggaaaatcttgaaagggtcatagaagagagagatgatgaatatcaactatggctccaagatcagctgttaggacatgagcttacaggggctagtgtcctaaacctggggagtaggtacagtccctgggtttgctaatcctaattaagtattttgaggagatt

SEQ ID NO: 750086 - DNA, 588 bp, Homo sapiens
aaagtctatttttgtaaataaaagtatattggaacacagctatgtccatttgtttacatattatcaatggctactttaccactaaatgggcagagttctgtagctccaacagagatggtatggttcatgaagctcaaactatctagtatcagtatcatgccctttacagaaaaaatatatatatttatttctgcatccatttaatggctgttacatgatgctatgtcctcaataactagaataaattagaataaatgggtataggaaccatgggtgtcctttgacactcttggctactataagcatcaattgaagtagttataacctgctcaaagactaggaattaggggattaaacttctctgggatgaacatctgggtcactaggcaagcaayccagaacagacaaggggctgtccaaggataaggaaaatcttgaaagggtcatagaagagagagatgatgaatatcaactatggctccaagatcagctgttaggacatgagcttacaggggctagtgtcctaaacctggggagtaggtacagtccctgggtttgctaatcctaattaagtattttgaggagatt

SEQ ID NO: 750087 - DNA, 648 bp, Homo sapiens
ttatggtgataagcatgtcaatgaccttgttgtataatatggcttgcatggcaagacaggaatcagccccaccacaaggagagagcctgccatcattcttcaccttgacaatgaccttgttctcccactcttttttacctgtaccctcttgagctgccttcatcaaacactccctccactgccttactttttttgggaaactctatgaagcagaagsaatcatactaagacagagaagtgagctagtgttcagagtagagtgacaagggctagcaacgcaaggtgaactgagccgtgaactgcatcacaccggctcatgcatatgttgcacacttgtaggcagatgtcatatgtgctccttccagtgtgagccaagctgggatgccagactcataaagccatgccatgtcgcaccttcacaaccttccaaatgcattcagatgtcactattcatgccatgtgcttgggtggccaaaccttcaatgctgcagaagggctgtgacattagaagtttggtctctgtggagtctcctgcatggacctcctctcccaacacactatgcttagttagcatatgctcagggaacctataaacagggactcaaaaaatgagaagattttggcttcaatatagtttttatagaatag

SEQ ID NO: 750088 - DNA, 612 bp, Homo sapiens
tccctctgtgccccaggtgctgattttttatgccttgtctcagttaagtcccacaacagatatgtgtgctaacctttcccaccacaagtgttcaccgcaagtcaaggaattggagattcagtgagggtacttttcttagattatatagctagaaaatggctgagctgggattcaagtccaatttatccgatccctttgttatagcaaaactgccatgctcctacaagtcagaaacattgatttttcttcctttcctttcattttctgacctcatatcctttactgtgccagtttgcttttgacacttttaggtagcaataatttaattcacttttttttttttcaggcacaaagccactgcaatagctggggaagttccaaatcccaggaaatctgaatggtggytcagtcccagtacttctgtgactacggcccacacttaggatgtttctcatggctgagatgacttaggagacacatggggatggatagagagatataggaatttgagagtgggccagaatttgagagggatctgggaagaaaaattctcacacttccattatgtgtctggataagacctgtgttttaaaatagctccccatttcagaa

SEQ ID NO: 750089 - DNA, 520 bp, Homo sapiens
acttaggttgctttctgtttacctgttttttaataatgttttatttacatttcatttgtctcagttgacacatgaaaagctgttggaatataacattttaccaccaattatatgcccctaatttggagtctcacaccccagtggataatctgggatgattgagaattgagatttctataatttatggatacytaataatgtatgctttaatttaagatttgaaaaaagtcaggaaaaccatgtcacctttaggataggtcaacaataatggtttgattataattgttctttccagttaaacaatgacaaagcaacccaggtaaaccatacgtagatttcctagcaatggaactgaacggagtaaaaggagcttaggttctcttctataaactcccaagctaaatgagctggaataaaaatctaaacctctgtttccccacttgtcaaagaaggaggttggacgaaagactcattttgtttctctcgcttgctcagtatctttggcccttgtcacaggcca

SEQ ID NO: 750090 - DNA, 586 bp, Homo sapiens
aatttttgttgtctttgttgttgtagttgttcaattttgttggggaagggggtttaacaacagaatttatgtttaatttatgatgccatgtagccagaacaaaacattccaccccattgttggttgcattttttgtgtgtgtgagtgacaaatttaaaggyataaaagacatgaaaaatgagtattttactacttgatgttgatgtatatagtttagaaaattactgtaagtgtagaaattagaaaaaaatgtatccgtggaaaagaatagagaacccaaatacaaatcacactgtatatgagaattttgcacataaaaaggtagtaccataagtttggggaaaaaatattatttaataaatgctgaaggacaacctgcaattttggaagaaaataaaaatagatattaattttatgtcacaaagaaaaacagaattcatatatattaaatttttaatgtgaaaaagaataacttacttcacgataatctaagcgatcacatgagcattttaatggcgatccacttgaacaattctaaaaactcaaaatgtatgaaagaaatgtcagacatttcacaaaatatttt

SEQ ID NO: 750091 - DNA, 586 bp, Homo sapiens
aatttttgttgtctttgttgttgtagttgttcaattttgttggggaagggggtttaacaacagaatttatgtttaatttatgatgccatgtagccagaacaaaacattccaccccattgttggttgcattttttgtgtgtgtgagtgacaaatttaaaggtrtaaaagacatgaaaaatgagtattttactacttgatgttgatgtatatagtttagaaaattactgtaagtgtagaaattagaaaaaaatgtatccgtggaaaagaatagagaacccaaatacaaatcacactgtatatgagaattttgcacataaaaaggtagtaccataagtttggggaaaaaatattatttaataaatgctgaaggacaacctgcaattttggaagaaaataaaaatagatattaattttatgtcacaaagaaaaacagaattcatatatattaaatttttaatgtgaaaaagaataacttacttcacgataatctaagcgatcacatgagcattttaatggcgatccacttgaacaattctaaaaactcaaaatgtatgaaagaaatgtcagacatttcacaaaatatttt

SEQ ID NO: 750092 - DNA, 630 bp, Homo sapiens
ttcagaagtaagactgaacccatcaaaacagctcacttatcaagactaatggcttgctcttcacagctcacttcaaggtcctctctttgctatgcccactgtctaaagctattatttcactatctctgtccatcccagaaatattttgagccttttaagaaycgccttaaatatcacacatcccagaccctgggataatgtattaataaatatcttttcctgacatccctcttcagctaaacagtactaatattatgtcaaagtagtgttctcttttacttcagtcagtgtaaggaacttagctttttttgtaataaatttttctggttgtatttggaagagtcggtggtcagcagttgagtatgcagcatctgaacatatgtctacttctatttgtaataacgatggtggtagcaatagtagctgtggtagtagcagacgtggaattagaagccactttgacaatagcaagtacttcacatgctttcctgttaaattaggagtatgaaactcatgattcacacaattataaaaatattgactcatgtatgttttcagattctcaaaatataatacattgaaataattttcttctggactcacaagaaactgttactattaaaatactaa

SEQ ID NO: 750093 - DNA, 630 bp, Homo sapiens
ttcagaagtaagactgaacccatcaaaacagctcacttatcaagactaatggcttgctcttcacagctcacttcaaggtcctctctttgctatgcccactgtctaaagctattatttcactatctctgtccatcccagaaatattttgagccttttaagaatcgccttaaatatcacacatcccagaccctgggayaatgtattaataaatatcttttcctgacatccctcttcagctaaacagtactaatattatgtcaaagtagtgttctcttttacttcagtcagtgtaaggaacttagctttttttgtaataaatttttctggttgtatttggaagagtcggtggtcagcagttgagtatgcagcatctgaacatatgtctacttctatttgtaataacgatggtggtagcaatagtagctgtggtagtagcagacgtggaattagaagccactttgacaatagcaagtacttcacatgctttcctgttaaattaggagtatgaaactcatgattcacacaattataaaaatattgactcatgtatgttttcagattctcaaaatataatacattgaaataattttcttctggactcacaagaaactgttactattaaaatactaa

SEQ ID NO: 750094 - DNA, 634 bp, Homo sapiens
aaaaatatgaaaatcaaaggattagaatctttaatatatgacgagtacattccagtggatgaaataacatcaaaggcgatggacagacaatttgggaatgagggaaaagtgaaagcctccgagtaacaaggaggggtactgggcaggttcagactcactcaacatccaaaaaaggtatgatattcatctagtcaactagcaaaataatacaatcataaaaacataaaaatcaaaatgaaaaagtcgaaataataaaattttcaacctaagaaatttaaaccgaaattgatattcccagccactgcaaggcagagtgggaaaattttccattttggcgaaatctatttggtaaaatctgccactaccacctgctgggcaccaaggaaggtcagaaaagaagacacacacttcccagagasacttctgggaagacagaaaacaaggtgattgttaaaatgggggacatttactgcaggttagagggatgtaatctagccttaaaaaaagaagttcagatactttcacatagcaattatactcatagggatttattaatggtaaacctgcaaacaaagttttatgcattaagggcttttattgcacaaatgtgttaattattcacagagtcaaaaat

SEQ ID NO: 750095 - DNA, 530 bp, Homo sapiens
ggtgctctggagctgtcctgcttggatttgctgccctctacacatttccatatgctgaatagttaatgagaattaatgttgtttaatttccaaatgttgaaggatttttttctgtcatgctgaaaaaatcctatattgaccttttttgtccccccagcactgggaacatgttgctccgtctttttctggcttaatttttttctgatgaagcaactactaytatttaaaaatctttcttccttttcatctatgatttcaagattttgtctttatatctgtattcccagcaattttttacataatctttgatgtggttttacttgtgtttatactcaatgacattccatggacttcttggacctgtagctttataccattatcaaatgtgtaaatatttctatatatcttaaatattttttctaatttgtatattcttctatgctaattctcaagtatttttatctctttctggaacttcagttatcgtaagttgctaatattaaactacaggtcatttaggttttgcacat

SEQ ID NO: 750096 - DNA, 615 bp, Homo sapiens
gacatcagacagacgagtgggtaaggtctgatacttctcagcatagctaggcagcatggctctccatatgtccccaggccttatttagaatctactgctccaaagtaggtaaattgaacaatctttaaaagtcaaaaaagcagttcatgaccttaaagcattgagcaaatctgaccttaatttagatgaaatgtttaaattttaaatacagttttattttagtaataatttttaaagctgtctttatttccaaaaaaattagtaaagtcacatgaacaaaaagaattaaagtttcaatttttctgacaaaatatgatttaagtgcttattttgctaagccaattaatcagagctctttttatgtaamcatcatgtacacaacacacataaatacaaagacaggcagacagaagatttagcacttgtaagatttttcattggccagtttcttaattggattactggcttcaggatggagcccttggaggaacaggaccaggaaagcatgcaactcctagggcctaataagcaggtacagctggaaggcaaagacagatccccaaaattaagggtaccgctttatattggaccccgggtccccaaaaaggaggcaaa

SEQ ID NO: 750097 - DNA, 517 bp, Homo sapiens
agtgcttctatcatgcatttcattgcaaggcaacccaaagccagtcagcccattaggtaatcagctcatcccccatgggggtctcatctatcagcataggctggggatgtttccatatcttccaggtgaccgagagcatgcttctctgatccaagtgtgcaaagagtccagtatccccccataactactattagcaatccctaaaagtatatttcctacctaataattatacaccaaaattccttcataatgcgaagtaatttcttgtacccacaaaagtcaaaactgtcagctaacacaatacaaaacagaacagagccttagattttgagaaagatctattttctttcaattcatgggcttctgtgaggaaaayagaggtttttcccagaaaggggtctgtggtgcatctctgcttttccccaggagtctgttagaatttatgttaggttctctcatgtgtgcatcaagaatggcaaggagacaaaaaggttgtatgattatgagttaatttatt

SEQ ID NO: 750098 - DNA, 604 bp, Homo sapiens
ccagttgaaatgtcattccctttatgaatctttccatgattttcaaggacactttacctcttccacatctgtgtttacttctagtgtgctttcattctgtaatttatgtacattctgagttgtttcactttgtagtttatggtgggggaagcagattctctttcagagtctcactgcccaagattggcatttggctaaatgcagtgcctcagtgtttgtggaataaatcaataacgaatccaatcttacatagtcacaaactatagtcattacctgtgatttattccctcattctaacactccaaattgcaaattattacaaattgtggcaaaaaccaagggaatgaagtgagaagaaaactccagagaaggactagaagatttgggtgaataaataactgcttctttgaggagataactttagatagccattatcaggmaaatgaagactaaacattacaggaaagagcaataaagacaaataagaaatatttgtagatattgtcaaaaagggtatttcacatttattgtaaaaataagtgtaaaaacctggaagtaacaaaaatcaagaatccagtggtacaagtacagcaggcaaaaggaa

SEQ ID NO: 750099 - DNA, 550 bp, Homo sapiens
cccacatggaaagttgctaaagtcttgaaagaagtagcccctacagaactactttgtccttcaatttaagcatatctcactttatataattgttttcctaaaatttaaattgaaattcatttaaaaattactttattcttcttttaaaaattcaaataaacccctgttacatgcaagacatcatcrtgggcatcttgatgtctttcaaaagggtgaaaaaacaagctctactattgtaaatcaggaaagacataccttaaataaaagccccaaagtataatgtaattttaagaagggaagtattgctgcttccagaaacatatcacagggggtgtcattcaatgtaggggtcaaggaaacatatttaggttcactgctgctgcagtgtctcgaaaagtctttatgctgatcaaacaaggtagaatattccaaatggaatgaacacagttcataaagaacttatgaataattgaaaaaaattaaggatagctgaaatatggaatatgcaatgcaacaacagaacaagaagtctatatgtgcatcatctggc

SEQ ID NO: 750100 - DNA, 440 bp, Homo sapiens
taaagaaaaacagtttcatttactgggaagtgaaggaagagcagagagaaaaaaactgaaaagcaatttaccagggagcaggaaacaaggagaaaatgataacatgaatgtcagaaagagagagagagagtggggaggcacaaaggaactgagttttgtaattagcaggtcactgggtcatttttggacaatcagagmctttaggttctaattataatgtggctttctttcatcttgagagggtagtggatcccctgggaatctgatggtaggtataaagcaatggatgtagaaacaggcaaacataaataaacttttttcctataacttagaggagtttttcacagattcccttgaaataacttcatgatacccactctagcttgatgaaaatgaaatcttagattgaggcactgatgcaccggcattaaaagtctttt

SEQ ID NO: 750101 - DNA, 631 bp, Homo sapiens
ttcatttatttcagcaatggtctgtaattcctggtataggagatttcattttataaattcctaaatactttattgttcaatattttgatgttattgtaaatggcatatttaaattttcaaatttcaaatagtttttgttagtagataaataaaatggaattttgaatcttggctttgtatgctatgatcttgctaaattcactaataagttctagttgttttattgatttttttggyttttctttatacatgttcatgtcaactataaaaaaaggcaattatactttttctttgctaatctgtatgctctctacatttaaatatattaatgcaacaataagatgaaagccttttattcatagctaacagatattttttcctctatgataatattatactaatatttaagtctaggaaaaataacttcagaaaaagcattataaaggaaacagaagaaacaatagaaacctggattagattattaagtaaatatttgttagaaattttgaatatcataaaatataaaattaggatttatatcatatgccaaattcaattccaatgacttcagaatgagtaaaagaagagaactatttcatcaaatatatattttggttctcaggacaagaat

SEQ ID NO: 750102 - DNA, 652 bp, Homo sapiens
ttctcctcattttttatttttaagtttattgttgagaggattatcgaagggtaaaagcagtaagggtaaagggtaaaagcataaaagaaccagagattttttttaaatataccttttgaaagagtgtgatttttttaacttttatttttattttattttatttatttatttatttatttttgagtcgaggtcttgctttgtcacccaggctggagtacaatgacacaatcatagctcactgcaaccttgaactcctgggctcaagttatccttctgcctcagcctgtcaagcagctaggactacaggcacgcaccaccatgcccagctaatttttaaattrttttagagacaaggtcattgctatattgaccagactgatcaatacccatggcctcaagcaattcctcctgcttcagcctccccaagtgctgggattacaggtgtaagccagcacacttagatagaaactttatttattaagagaaaaataccagtgtttcaagttcttttgcaaacgtgtgacattataattcatttttgacaatggagagtttttctgtttggtaaatacaattctatcttttttaaaaaagtagcctacaggaagttatattttatgagtgagtctttttagagctaggttaacagtga

SEQ ID NO: 750103 - DNA, 598 bp, Homo sapiens
taaattctaattaaaatcaggtttttatccttaaatttaagatcaataatgcctgtactacggattaaaatctgttaaaacatttgcctgtggctttaaaggaaaaaagtgggaatgagacctcatgccaacagtgtcaaaaaattaagcttagctttgagttagctgacttatttcagtgtcagaacgttcagcttttcacaagaaatctcttataaaacctgttttcaaaaagataaaatgtagaacrttcaggcaatgttgctttttcagaatatcatgtttaatatgaaacagaaaaatgatcactttctaatattaattatcttttaaaaaccaatagctattagcaggttagttgttactcaatgtggcacaatatatgtaaaaggaagaataactagttaagaaatacatatgctatataacttgggagaatcctatctatgaaaaaaattagttcaaccaaattcatactgttatttctttaaaactttgagtataagcaaacacctataaaatattccatagtctttgattaaaaagatagccaaattctacattgattgacataatctgttcaaacttgcactagtta

SEQ ID NO: 750104 - DNA, 598 bp, Homo sapiens
taaattctaattaaaatcaggtttttatccttaaatttaagatcaataatgcctgtactacggattaaaatctgttaaaacatttgcctgtggctttaaaggaaaaaagtgggaatgagacctcatgccaacagtgtcaaaaaattaagcttagctttgagttagctgacttatttcagtgtcagaacgttcagcttttcacaagaaatctcttataaaacctgttttcaaaaagataaaatgtagaacgttcaggcaatgttgctttttcagaatatcatgtttaatatgaaacagaaaaatgatcactttctaatattaattatcttttaaaaaccaatagctattagcaggttagttgttactcaatgtggcacaatatatgtaaaaggaagaataactagttaagaaatayatatgctatataacttgggagaatcctatctatgaaaaaaattagttcaaccaaattcatactgttatttctttaaaactttgagtataagcaaacacctataaaatattccatagtctttgattaaaaagatagccaaattctacattgattgacataatctgttcaaacttgcactagtta

SEQ ID NO: 750105 - DNA, 648 bp, Homo sapiens
atatagtattttatatatgtatgttatgaaggtatatatatatatacatatatacacacacacatatatgcctagagcattttattatttatatgggaaaatatttagtatatcatgtataaatatatagtatattatgtataaatataaaacatatattatatgtaatatatatttacccatataaactttatatatatttaagactttatgttttaaaattagtagttagttgaaccaagaatgattctgcaacataaagtttcacatttcttttccactacaaaraattgtccaaacactgaagtgtttctcattaataatatgcaccaattgttttctcttagaagagatgcaaaaaagcaagagtaactagcaaattttatgaaaatattaaataagcaaagaagtagaacacaatctcaaaatacccaagagatttttggttaaaagacttatctgctgaaaggcaaaaaggaccttttgttttcttacacattcattcagtaatgtctttaaaaatgttagtaataactagccttgtgtccatttccaaattatgtaatggctgagatttgtaaagaaaatacgttaaaagacaaacaaaagcatcccacctgacccagctgccttaaggtgtgggcgaga

SEQ ID NO: 750106 - DNA, 624 bp, Homo sapiens
accaaagacagagtggaggaaggaaaaaagaagaaaggcacacatgaatcagtagatctgtttccaataataacccatgccatctggtctgactttcctgtcttcctgacaaatacccaacgcacctacaaaaaggagcacaaagagcagattcctatgtgataatatgcatagtgtacataactcrtggcttaaatgattgactgaaaaagtcattttgctccatgataaaggaaaccataaatgccccccttgacctctgaaatatttaaaattactgtgaagattacctcactcttgtttgagaaatcattaagggttcaccatgcaatttgcagaatgtcagggtttctaagtggtaataaaatctccagcagattcaggaaagggattgaattggaatgtaagtgaacacagctccaggtatccctgctccatcagcttgtaaaccatttcacaatatattcagaactgaacgaccatactactccaggttctcaaagtggattttatttcccttaaaaccgaagccatttatgtaggatacgttcaaaagaggccaccctgcagaacctttgcttttaaaatcactgtaattcattcaaatcgagccacttttgcatg

SEQ ID NO: 750107 - DNA, 572 bp, Homo sapiens
ctccccctgagattctttccttctctttgatcttcagaatggggatgtcagtcatttccttccaactaattttgtttttttcttttttcctagatgaatctgaataagactttgacttatgaaaacaggaggaaatggaaaagcaatcctattagggtcaaatatcttcaagacgacacactcgtacattgccaagaaagactcagcataattcccttgtgtttttacactacaaaaggtccytatctcctttctgtagctggagttgcttaaatttgatatgcacataacttcagaagggggtagacagagcccatgcctcctgcaaggagtgagaaatagacctaaacgatcacagttcattcattgattttgcaaatattattgatcatttactttatgtcaagcactggggataaagtaaagcagtgggatctagttccctaccctcctggagcttctgatccagattcctagagctgaaacaggctttgaagacctctcaatttgtggtttccaaattatctaccaaaggtcattaatattctatgcaatattaattggtatttctt

SEQ ID NO: 750108 - DNA, 645 bp, Homo sapiens
aactttagaggtatatgtgcaggtttgttatgcagttaaactcatgtcatgaggatatgttgtacagattcttttgttacccaggtattaagcctagtactcattagctatttttcctgaacctctgctccttcctaccctcaccctccagtgggtcctagtgtgtgttgttcctctctacatrtccatgtcttctcatcatttagctctcacttataagtgagaacatgtggtattttgttcctgcattactttgctaaggaaagtggcctccagctccacccatgttcctacaaaggacatgatctcatttgtttttatggctgtatagtactccatggtgtatatgtaccacattttctttatccagtctataattgatgggcatttgggttgattccatgtctttgttattgtgaatagtgctgcagtgaacacatatgtgcatgtgtctttagtatggaatgatttatattgctttggatatatacccagtaatgggattgctgggtcgaatggtatttctgtctttagctctttgaggaatcaccacactgttttccacagtggttgaactaatttgcactctcaccaacagtgtataagtgtagttttatcatttgtaagaagaggacaatcatattt

SEQ ID NO: 750109 - DNA, 622 bp, Homo sapiens
gggttttgcagtcttctgctattattttctcgtaatttattcctccctttagatctattaatatttgccttatatacttaggtatactgatgttgaatacatatatgtatatatatatatttataattgttatagctcttgacgaattgacccctttatcattatataatgacattctttatctcattttaccatttgacttaaagtctgttttatctgatataagtttagctactcctgctcttttggtttgcacttgcttggrctatctttttccatctctttgctttcagtctatgtgtgtccttacaagtgagatgagtctcttgtaggccacatatagttggtttttaaaaaatctatccagccactctatgtattttaattagattatgagatctgggattgaattcatttttagcaaagcctattttctttttattatggtactcttagttgttttaggacttctatcttctaatatttatggaccattattctgttctttgagacatcttttacataagttgcttttcctaaagatactctaatccttaagccttagagaagccttactttagatcagtgactggatccttaatgcctaaagattttcactggt

SEQ ID NO: 750110 - DNA, 622 bp, Homo sapiens
gggttttgcagtcttctgctattattttctcgtaatttattcctccctttagatctattaatatttgccttatatacttaggtatactgatgttgaatacatatatgtatatatatatatttataattgttatagctcttgacgaattgacccctttatcattatataatgacattctttatctcattttaccatttgacttaaagtctgttttatctgatataagtttagctactcctgctcttttggtttgcacttgcttggactatctttttccatctctttgctttcagtctatgtgtgtcyttacaagtgagatgagtctcttgtaggccacatatagttggtttttaaaaaatctatccagccactctatgtattttaattagattatgagatctgggattgaattcatttttagcaaagcctattttctttttattatggtactcttagttgttttaggacttctatcttctaatatttatggaccattattctgttctttgagacatcttttacataagttgcttttcctaaagatactctaatccttaagccttagagaagccttactttagatcagtgactggatccttaatgcctaaagattttcactggt

SEQ ID NO: 750111 - DNA, 561 bp, Homo sapiens
tggtagtataataaaagtagcactgaatctgtaaattgcattgaccatatagccattgaaatattaattcttcctatccatgagtatggaatgtttttacatttgtttgtgtcatctctgatttccttgagcagtgttttgtagttctcactatagagatatttcacctttctggttagctctattcctaggtattttattctttttgtcacaattgtgatggggttatgttcctagtttggmctttgtttggctgttcttggtttattggaatgctagtgatttttgtaccttgattttgtatcctgaaactttgctgaagttgttttccagcttaaggagctttggggctgaaactatggggtttgctagatatagaatcatgtcatctgcaaacagggatagtttgacttcctctcttcctatttggatgccctttctttcttttggctgattgctctggtaaggatttccaatattattttgaaaaggggtggtgagagagagaatccttgtcttgtacttgtgttcaaggggaatgcctctagcttttgcctattc

SEQ ID NO: 750112 - DNA, 617 bp, Homo sapiens
tgtatttctgtggtatcaatggtgatctctcctttacaatattttattgtctccatttgattcttctctcttttcttgttagtctgtctagcagtgtatctgtctattttgttaatcttttcaaaaaaccagctcctggattcattgagttttgaagtgtttttcatgtctctatctcctacagttctgctctgatcttmgttatttcttgtcttctgctagcttttgaatttgttttctcttacttctctagttcctttaattgtgatgttagtgtgtccattttagatctttcccgctttctccagtgggcatttagtgctataaatttccctctaagcactcctttagctgtgtcccagagattctggtatgttgtgtctttgtcctcattggtttcaaagaacatctttatttctgccttcatttcgttatttacccagttgtcattcaggagcaggttgttcagtttccatgtagttgtgcagttttgagtgagtttcttaatcctgaattccaatttgattgcactgtggcctgagatactgtttattatgatttccattcttttgaatttgctgaggagtattttacttccaattatgtggtcaattcta

SEQ ID NO: 750113 - DNA, 564 bp, Homo sapiens
aactacttaaaatgactttctaaaaatggtaactgggtaataacttttttgcctctattccatttttcttcacatctcccattaaaaatacaccctgcttcaggtcaacaacaatgacaaaactgtcatttaagagtaaacgtattcagcaaatatgagattattatatcaaaagcccaaaattaataaagaaactctttacaaaatattagcttctcagtggcaaagctgaatagtagaatatgcaaattatgggaagcaggaagttttatttaaagtaggggatgaatgttttttgactgtagagaagtatagacatttccaaaaacccttccccactcatattttctttctttctctatatctagkattatgtttctactatttttttcaacttatttactggtgacccctccccgaaatgctttttattgatgcaacttttggaataaacccagcaggagtagccatttatgcctagtgttccattattggaacattaagcatgtgggaattatttatatcctactgctcaaggccatcgccaaggtctgattgcaaaaa

SEQ ID NO: 750114 - DNA, 613 bp, Homo sapiens
agcgactctaagatagaaatattcatatattttaacacacatatttaacacagattatctaatactgcaagtcaactatgtcagtaacttcccagagttagtgcagatccacagatcaagggcatagtccccaacaagactgctctcattttagatgccagaggaagaggtctaggagggtcttgaaggccctctctccatggaatcaggaccatgtcaccctcccagcacattgatgtgtccccaaccaagaagctcatctgagccccagtgtccaragtttttactggagtcttgctatgcagtgcgattgcacaggatttaactcaatctccaatccatctctcttgcccagaggttgaactgatatcatctggttcaaagcaccaaccttctaattacatggctggtttttctggcatagtctgccttcatgctgagctatcttgttaacataagctatctaaaagtccaccataagtgaccttataagcataaacccagagactatcatgaacaacacaaatactcctctcccttaagaaatgtctggggtttagaagttctatcccaggaatctgggacaaagaccagaaaattttctattattata

SEQ ID NO: 750115 - DNA, 588 bp, Homo sapiens
ccaaacaacaaaaaaaaatcataggttcaaaaaacatttcccaagagaaagtggcctctaaactgtgatctcaagcaaagctatgttaattcttacaattattccattgtgtaggtggagaaactgaggcaggaagacactggtctgaagttgtaaaaatgtatgagaatgtatgagtcttgggaagaaaacattgtcctgaagacttggagttctttgcttccaccatcacaccatgctccctccctccaaaagatctaaacattttaagtttatgagtctgacaacttcaatgrcattctttacccaggctataaaattctagccctgccaccacagagctgttttttctgaatttcacaaacttagagataacactgactctagttttctggccaacaacagtaatgaagcccaggatctcggtttatatttgaagactaactttacaactgcaaaaaagctgttgcctgtgaaatccaggccagggggtgagggtaaaagaaaggcgctttctttgagattccctgatttgggagagctagaactctctaataatttcgaaaatcttggattttccttcaaagt

SEQ ID NO: 750116 - DNA, 525 bp, Homo sapiens
aaaatctccactttccctaccataagctttgtacctagcaatatgcaactgagagaggggcaagagcataaagaacccccgtttatgcatagatatttagggtctgctgaaagctgagagtgaagcaagaacacagaaaaaccttcctgcactttaggtcccaaagtaagcacaaggtagcagccacccagagctagaagaatctgcagcctgtagtgcacaaaggtaatgttagcaacaaaaagcccagctcagctactaaccagattggctcaacttccctacattaacagcctgaaaaaagaggagaccatttctaggagttaattytacttacttcagactctactggtctaaaaaaaaaaaaaaaaaaaagcttcacagtcaacaaaaaaattaccagacaaaaaagtaattgttagatgttagcagaaggaatggaataatgaagactggagcagaaataaatgtaatagagactagaaaagcaataaaaaagatcaatgaaactgagttgggtttttt

SEQ ID NO: 750117 - DNA, 525 bp, Homo sapiens
aaaatctccactttccctaccataagctttgtacctagcaatatgcaactgagagaggggcaagagcataaagaacccccgtttatgcatagatatttagggtctgctgaaagctgagagtgaagcaagaacacagaaaaaccttcctgcactttaggtcccaaagtaagcacaaggtagcagccacccagagctagaagaatctgcagcctgtagtgcacaaaggtaatgttagcaacaaaaagcccagctcagctactaaccagattggctcaacttccctacattaacagcctgaaaaaagaggagaccatttctaggagttaattctacttacttcagactctactggtctaaaaaaaaaaaaaaaaaaaagcttcacrgtcaacaaaaaaattaccagacaaaaaagtaattgttagatgttagcagaaggaatggaataatgaagactggagcagaaataaatgtaatagagactagaaaagcaataaaaaagatcaatgaaactgagttgggtttttt

SEQ ID NO: 750118 - DNA, 586 bp, Homo sapiens
tccctaatcataatggattgattacacaaacaatattcaccagggcagcctggggaggggatacaaatgtaaatactcaaaataatactttgtttattaaaatcaacattgaagttgatggaaatggctatcactaagcaggataatacattgataatcagcaacacttttaaaatgttactgtatcaagaagacctgcaatagaattgagatctgaatgaaacgttcttgattttgtaatcgacttcacacttgttcttccratttatttatctttgtaaagccgtctacttcctatttcagttggttacaacaatacttttccatcaatggatttatcaaattagcattctttctaaaacaacatccatatatatgtgaggctctattgtatagattttagaagcccaaggctgaaggagcagagacttatgttttaggtaaaagatatgtacttaaaataatagctatgctttgatataaccatgttcgttagcgttactcctatatttttcagttcatacatcatacactcttttgtttacatgaacaatatacaatttaaataatggtatacgaacatagt

SEQ ID NO: 750119 - DNA, 511 bp, Homo sapiens
ttacaaatagtgaacgagtattgatatatgagtattaacttcatactttattcagattttcttcgtttttacctgatatggtctgactgctggtgttccactaaaattcgtgtgttaaaatctaactcccagtgtattagtattaagatgtgggacatttgggaggcgactaggtcatgagagcagagctccttgtcaatgacattagtgcytttataaaggaggcctaagagaccttgttcacttcttctatcatatgaggacatatataaggtaccatttacaagataggccctcacgtgacactgaatctgctggcatcttgatcttagacttcccagcctccagaactgtgagagataaatttttgttgtttataaattaaccagtctatattgttatagcggcccaaatggactaagacattactaattgttttgtttccaggatcccattgaggataccccactgggtctagttgtcttgtctcctttgactttccttggctatg

SEQ ID NO: 750120 - DNA, 450 bp, Homo sapiens
tattaatgcaaattgttagaactatttaaactatatcatattcatcttgaatcttttgaaaattattttaagtctcagtggactttggttcatccatatgcattagctgaatcctttaagagattttcttctgagaatgtkgttacttgcagactgctgcattgtttttaaggatttaaaattgaatcattgttcaaagcctggaccattattttggttgctggtaacattttagcatttctcataaaactgtttgtacttacattatgctgaattgtttgatgtttgctagtggccatgtaagacgtgactgtgcttgcagaattttcttctgtagtactcagctaaaaggtaggctgtactggtggttccacattagccaggcattggcagttgctatggcataaaataaaaatagataaatgagaaaataaaaaccaaaaaaaccct

SEQ ID NO: 750121 - DNA, 649 bp, Homo sapiens
tataaaccatatactctttgaccaagcatcctgttcctaggaaatagactaacaaaataggtaacatctatgtaataatgcaagtacaatgatgttcatcccagtgtggttaacgatttctaaattggcaacaatctagtatttatcaagaaaaaattgattcttaattatagtcattcttgcagaatttcatgcagccatttgattacgctaatctatgtttgttgacataaaaagatgtccaaagstatatcttaaatgaaattgcaggtagattgcaggacaataaatatggcatgattccaactttgttttctggagaaatgactctttgagctgaaactgaggtctgctcaggatgagaagagctgacacttccagggggaagagcaacatggacaagggctatgggcaagtggacaatagagaactgagggtgagaaatgcaagacaaggctgaagagcgaagaagggactagaccatgcgaagcactggaaccccggttaaagattttagtttttgcccaagaagaacaagaagccactgaacagtctccatgtcacagacaaggcactggggagctcagctgccactcaaggttaccccatgagtgggtcgtagagccagggctggctggagtctatctca

SEQ ID NO: 750122 - DNA, 643 bp, Homo sapiens
gctgcagtgagccatgatcatgccactatgttccaccttgggcgacagagcgagactctgtttcaaaaaataaaataaataaataaaaataggcctaaataagaagcccaataaggcccagaaagtttaagtccctttcgggagtcatacagttgggtaatagtcctagaccttaggcttaatcactagttaacactcagatcttgcccattagtcctgtaatgtttcctagtagatctgccactctccaaatcagataaccatacctgcagatcctcctcaaggcttagtagcattcacacatcaaaactagaccatgaccaatgttactgaaatcaaattacgcaaaggtgatgaatgcacatcaaaytactcaccaagagccagggtgccggagatgctgtgtcattaacaaggtcatgcagaaagccttctgctggtgcacctgttcagcatggagggttgatgtacctagacgacaaagcatcatgtgcaagggcaatgctggtgaggccaaggaggtgatgggatcagggaataaaaagtaagtcattcagtaggctggagcttactgtctgaatctgagagtagtgatataggtttacgtgttatgctgaaggattttgactttttcctgagggga

SEQ ID NO: 750123 - DNA, 637 bp, Homo sapiens
ctcaacatatgatctaaacaggagaatattctctttgcacttgacaataatttgtattcttttgctgttggatagcatgttctgtatttgtctgttaggttcatttggcccacagtgttattcctcccactgtttccttattgattttttttctggatgatctatacatttttccatgggggttattaaagtcccctaatactattgtattgctgtctatttctctcttccattctgttaatatttgctttgtatatttaggtgtcccaacattgggtgcatatataattgttacatcctttgtcattatatgatgaccttcttkgtcttgtcacagttttttacttaaagtctattttgtctgataaaagtgtagccatccctgctcctttttgggtgtcatttgcatggaatatcttttccatcccttcactttcagcctatatacattctttctctctctctcttcctctggaactcccataatttgtatattggtttgcttcatggtgtcctaaaatcgcagaagctttattcactcttcttcattctttttttctcctctgattgaatagtgacttgtctttgagttcacaaattctttcttttgtttaatttagcctgctattaaagctct

SEQ ID NO: 750124 - DNA, 634 bp, Homo sapiens
ccacagtgttattcctcccactgtttccttattgattttttttctggatgatctatacatttttccatgggggttattaaagtcccctaatactattgtattgctgtctatttctctcttccattctgttaatatttgctttgtatatttaggtgtcccaacattgggtgcatatataattgttacatcctttgtcattatatgatgaccttcttggtcttgtcacagttttttacttaaagtctattttgtctgataaaagtgtagccatccctgctcctttttgggtgtcatttgcatggaatatcttttccatcccttcactttcagcctatatacattctttctctctctctcttcctctggaactcccataatttgtatattggtttgcttcatggtgtcctaaaatcscagaagctttattcactcttcttcattctttttttctcctctgattgaatagtgacttgtctttgagttcacaaattctttcttttgtttaatttagcctgctattaaagctctctattgtattttttatttcacttactctatttttcagcttcagaatttctgtttggttctttttcatgatttctatcttgttagacatcattttatttgtatactg

SEQ ID NO: 750125 - DNA, 528 bp, Homo sapiens
aaacacagaaaaactacagaagcaggtatgcaaaggatactaggtccttcaggttcacatagagagaaaatagtcttggaatgacaatgccaaagaaaatgattcttcaatcttacctgttttcagtgatattctcattttgatatggattactggtgttttccagggtaaagaaacataggggactttgactcttaaatacatatgtatcttaacattaatagtaaatattcaaagaatgagyattatagaatttgaacatactgggtcacatggttgatttattgtaacatgggattcttacacaaaatagaaattacttttttggtgatcgcattatgtccacagaatggctcaacaaattaacaagtgaatatcaggttatgaaaaaacgtgctttacatttaggcataataaattgtctttcaaatactgtaaaaaatggaataccacttcagttggaatatctgaagcatggctctctaaattgagcatttagaataactagctatcagtttaacctttcaa

SEQ ID NO: 750126 - DNA, 640 bp, Homo sapiens
aggagcaggttgttcagtttccatgtagttgtgtggttttgaatgaatttcttaatcctgagttctaatttgattgcactgtggtctgagaaaccgtttgttatgatttccattcttttgcatttggtgaggagtgttttacttccaattatgtgatcaattttagaataattgtgatgtggtgctgagaagaatgtatattctgttcatctgaggtggagagttctgtagatgtctattaggtctgcttggtccagagctgagttcaagtcctgaatatccttgttaattttctgtcttgtcgttctgtctaatattgacagtggggcattaaagtctcccactattattgtgattattgtgtgggagtctaagtctctttgtaggtctctaagaacttgctttatgaatctgggtgctcctgtattgggtgcatatatrtttaggatagttagctcttcttgttgaattgatccctttaccattatgtaaatacccttctttgtctttcttgatctttgttggtttaaagtgtgttttatgagagactaggattgcaacccctggtttttttttgttgttgctattttttttttctttccatttgcttggtaaatattcctccatttctttattttta

SEQ ID NO: 750127 - DNA, 527 bp, Homo sapiens
tatgtaaatacccttctttgtctttcttgatctttgttggtttaaagtgtgttttatgagagactaggattgcaacccctggtttttttttgttgttgctattttttttttctttccatttgcttggtaaatattcctccatttctttatttttagcctttgtgtatctttgtatgtgagatgggtctcctgaatacagcacattcaaaggtcttgactctttatccaagttgccagtctgtgtcttttatttggggcatttagcccatttacaagtctgatgggcggttccctttgtgggtaatccaacytttctctctggctgcccttaacattttttccttcatttcaacctcagtgaatctgacaattatgtgtcttgaggttgctcttctcaaggattatctttgtggtgttctctgtattttctgaatttgaatgttggccagtcttgctagattggggaagttctcctggataatatcctgaacactgttttccaacttggttccattctctccatcatt

SEQ ID NO: 750128 - DNA, 490 bp, Homo sapiens
cctctctaatgatgaattaaccactccaatgtgaaaaggtctatgtattttctaagtaaaatggtgtttacaatctacagtctggttgtggtaggcagaattctaagatttccagtccctggtgtatacaaacaccttctctcattcaatcaaacactaatctaggtgctagtgtgaaagcattttatagatgtaattaagctcccaaatcagttgaccttaaagtagaaagattacaatcgcagagagtctggcctaatcacacgagccctaaaaaggaaacaggttcttcctgataaaagagattcaaagcatcagaggactccaygtcagggagattatctgatgctggctttgaatatagagggggccacagggcaaagaatgcaggtggcctctaggagtggaaagcagcccctagatgactgtcagcaaggaaatgtggacctcagtactacaaccacaagaaattaaatcttgccacaaccac

SEQ ID NO: 750129 - DNA, 608 bp, Homo sapiens
gatacagtaaccaaaacaacatgttactcatacaaaaacagacacatagactgaaggaacaagttagagaacacagaaataaagctgcacacctaaaaccatctgatcttcaacaaagtttacaaaaacaagcaatgcggaaagaactccctatttaataaatggtgctggaataactggctagccawatgcagaagattgaaactggactccttcctttcaccatatacaaaaattaactcaaatgaattaaagacttaaatgtaaaacataaaactataaaaacactagaaaaaaacctaggaaatatcattccgtacacaggctttggcaaagatttcacgatgaagtccccaaaggcaatggcaaccaaaacaaaaatagaagagtgagacttaattaaactagagatcttttgcacagaaaaacaaaacaaaacaaaaaaacattaacagagtaaacagagaacctacagaatgggaaaaaatatttgcaaactatgcatccaacaaaggtcaaatattcagaatctacaaggaacttaaatcaacatgcaaaaaacaaacaacctcattaaaaaatgtgcaaagtagttgaacagacacttc

SEQ ID NO: 750130 - DNA, 566 bp, Homo sapiens
tacccttacatgatgagaaaagcccacgctgaccagtagtgtaatgaccaggtagcataagtagtgctactgtgttgcttctaagactgggagcagaatttgcttagataactttaccagagacctttttagggtggtacagctcctgagtagtggttsattcttctcttgcagccacatgggaatagagatttagaggctcagaaagggagctgggaagagaacacccagacaggcccaggcctttaacttctgtgctcaagactgtgaatattacaaactgtggcactgagagccatgaaaatgagtttgcctattaaccctgacctttcctggagaggggaccaagaaagggaatgaggaaagagacagtcctaaaattcttcctgtgatcaataagtttttgacatctttatatgtattctttttgttttgtaactctataaaccaatgttttaagaagagattcctctctaaatgctctttttaaaagtttaatgttatatttgatatgcatttatcaccatggctttgatgtataaaagtgagcttgttgagactttatt

SEQ ID NO: 750131 - DNA, 598 bp, Homo sapiens
gtgagcccatgaatggggccggctggggaacaactggaaccctggtctccctagagctgggccattggcatctgggggaagcccgatttgctggggtcggggctgactggctgggccattacccgccgggggcctagagcccacggggaagttgggccaggttgcccctgctagaaccttcccagagtctagagcaggtggccgtgatgccctgctctctgcggctgggactccaactactcctgtcccctccccrgctcactgcctgtgggtcactcccgctgctcccagatggccatgctcattccctccctccacaggccttttgccctggctggtgcctctgccagggactcttcccctaatccttgtgtggctggctcccgctcctactcgcgccccagctcaagggtcacctcctcagaggccccccgaccacctgtctcaagcagccctgctctcacccccctcactctccatctgagggccctttaaggtctttcatggtatttaacaaaaatatcaggcatcacatgtattgtgggcttgtctattgtcaatgccctctcccttcactggggtgtaagcacccatggat

SEQ ID NO: 750132 - DNA, 482 bp, Homo sapiens
aggatcaacatactgattttcagcaaaacatacatcctgctgggtcttgctgtacttactctccacatactttgaatagactatcttacaaaagcaaagtgttgtttctttgtagaaaagcacacgccccttgaaagggctatgctctgactgtgtttgtgttggtgtatacgtggtgcttggggtcatctctccttgcccaggctctcctggagctaaaaaggacactgagggacaaaagaagcccgtaatttaaactacttgatcaacgacatagacaaggagttctacatttgcaaacaggctgtgctgtacartattctcctatagaagtaatgttattagactgttcaggtttttagattagtccgcatcttcctccggcccccaagaaaaccccagcacccataatgtacattttaattggaattatgttggaatatttttagcagaaaatttttagtgggaatattattagcata

SEQ ID NO: 750133 - DNA, 587 bp, Homo sapiens
aatgtttaaggaagaaataataccaattctatacaaactcttccataaaattgaaaaggggaagattatttcccaacttattctatgaggccaacattatcacgaaaccaaaaccagacaaagacatgacaagaaaagaaaactgtggattaatgtccttcatagattttcataggagaaaaagtttaaacaaaatttcagcaaatttagtccagcaatttataagaagggtaacacatcatgacctaatagggtttattccagtaatgcacagttggtttcaaaattttaatattcaaaattcaatgtcaytttcaatcaaaaagtggacaaaggattcaagtagtcatttctctaaagaaaatttacaaatggccaaaaaacacagaaaagatgcttaacatcattagtctttagggaaatacaaatcaaacgagctaccagttcacatgcagcaggatagctattttaaaaaatggaaaataacatgtgttggtgaagatgtgaagacagtggaaccctcatacctttaaggtgggaatatgaaatagttcagtcactatggaaaacaatttggcagttcctca

SEQ ID NO: 750134 - DNA, 566 bp, Homo sapiens
ccaacagacctgcagctgagggtcctgtctgttagaaggaaaactaacaaaaagaaaggacatccacaccaaaaacccttctgtacatcaccatcatcaaagaccaaaagtagataaaaccacaaagatggggacaaaacagaacagaaaaactggaaactctaaaaagcagagcgcctctcctcctccaaaggaacacagctcctcaccagcaacggaacaaacctggacggagaatgactgacgagctgagagaagaaggcttcagatgatcaaattactccaagctacaggaggaaattcaaaccaatagcaaagaagttaaaaactgtgaaaaaaaaatctagacgaatggataactagaataaccaaygcagagaagcccttaaaggagctgatggagctgaaagccaaggctcgagaactacgggaagaatgcagaagcctcaggagccgatgcgatcaactggaagaaagggtatcagtgatggaagacgaaatgaatgaaatgaagcaagaagggaagtttagataaaaaagaataaaaagaaacgaacaaagccttc

SEQ ID NO: 750135 - DNA, 566 bp, Homo sapiens
ccaacagacctgcagctgagggtcctgtctgttagaaggaaaactaacaaaaagaaaggacatccacaccaaaaacccttctgtacatcaccatcatcaaagaccaaaagtagataaaaccacaaagatggggacaaaacagaacagaaaaactggaaactctaaaaagcagagcgcctctcctcctccaaaggaacacagctcctcaccagcaacggaacaaacctggacggagaatgactgacgagctgagagaagaaggcttcagatgatcaaattactccaagctacaggaggaaattcaaaccaatagcaaagaagttaaaaactgtgaaaaaaaaatctagacgaatggataactagaataaccaatgcagagaagyccttaaaggagctgatggagctgaaagccaaggctcgagaactacgggaagaatgcagaagcctcaggagccgatgcgatcaactggaagaaagggtatcagtgatggaagacgaaatgaatgaaatgaagcaagaagggaagtttagataaaaaagaataaaaagaaacgaacaaagccttc

SEQ ID NO: 750136 - DNA, 525 bp, Homo sapiens
gattacaggcatgcgccaccacacccagctaattttgtatttttagtagagacaggatttctccatgttggtcatgctggtctcgaacttctgacctcaggtgattccccctgcctcagcctgccaaagtgttgggattacaggcatgagccactgctcctggccctgatcatttttaagtgtacagtaagtggcataaagtacattcacattgttgcacaaccatcaccccatccatccacagarttttttcatcttataaaactgaaagtatccgttaaacaatagctcctctttcccaccacccccagcccctggcaaccactattctgtttctgtttctatggatttgactactcataagtacctcatgttgagtggaatcatacagcatttgtctttttgagactggtttatttcacttagcataatgtcctccaggttcatccaggttgtaacttgtgtcagaatttcctttcttttgaaggcagaataatatttcattgtacagatataccatctttt

SEQ ID NO: 750137 - DNA, 507 bp, Homo sapiens
aagaatgaaagctttttacattttgctataaaaagaacttggttccagtgactctggaggctgaggtgggagaattgcttgaggctaggagctcaagaccagcctgggcaacatatcaagaccctgtctctaagaaaattaaaaaaaaaattacccagacatgatggcatatacctgcagtcccaagctacttgggaggctgaggtaggaggatcacttgagcccaggaattcaaagctgcagtgaactataatagcaccactacactttagcctgggtgacaaagtgataccctgtctcttatttaaaaaacaaaaagtgagaccstatctcttatttaaaaaacaaaaagtgagaccctatctcttatttaaaaaacaaaaacaaaaaacgctaacttgggacaagttcttgggaaattttatcctagtgttggttctgccactgacttgcatcctgtccacatagcttcaggcaatggaataaataaggtttgaggttcctttt

SEQ ID NO: 750138 - DNA, 639 bp, Homo sapiens
tctcatgtcatattaaaaaatcaactcaaagtggattaaagactaaaatgtaagacctgaaactataaaagtattagaaaaaaatagagaggaggggaaccaggcatggtagtttacatttgtaatcccagcactttgggaggtggaagcaggaggatcgcttgaggccaggagttggtccaagaccaagatgtctctacaaaaaataaagaaattagctgggtgtggtggcacatgtctgtggtcctagctactcaggaggctgagatgagaaaatcccctgagcccaggagttcaaggctatagtaaactataatgcatcactgcattccagcttgggcgacagagtgagaccttgcctcaaaataacaaaataaacaaacaaaaaaaccagggggagagctccctgacagtggtctgggcaatgtttttttggatrgaaacccaaaagcacagccaacaaaccaaaaatagacaaagagggttatatcaaactaaaaacttctgcacagccaaggaaataatgaacagagtgaagagacaacctgtagaatgggagaaaatatttgtaaaccatttatttatgaaggggctatatgcaaaatatataaggaattcaagcaactcaatagtaagaaa

SEQ ID NO: 750139 - DNA, 357 bp, Homo sapiens
cacttgcagagtctacaaaaagactgtttcaaaactgctctataaaagtaaggttgtactttgttagtggaatgcacccatcaaaatgaagtttctgagaacacttctgtctacttttcatgtgaagatatttccttatccacaatagtccccaaagccctcaaaatgcccacttgaagatccctcaaaaagactgtttcaaaactgcagtatcagamggaaatttcaactatgtgagtagaatgcacacatcacaaagtagtttctgagaatgcttctgtctagtttttatatgaagatatttccttttcgaccttaagcgtcaaagtgctgcaattatgcactttcagattcttc

SEQ ID NO: 750140 - DNA, 493 bp, Homo sapiens
taagaggttctatccagtgtgatgaatgcacacatcacaaagaagtttctcagaatgcttttctgtagtttttatttgaagatatttccttttcctccataggccacaaagggctccaaatatccacttgcagatactacaaaaagagagattcaaaacagcccaatcaaaagataggttccactatctgagttgaatgcacacatcacaaagaagcttctcagaattcttctgtgtggtttttgtgtgaagatatttcattttccacagtaggcctcaaagctctactaatayccacttgcagattctgccaaaagggagattcaaaactgctcaatcaaaagataggttcgactctgtgagttgaatgcacctctcacatcgaagtttctcagaatgcttctgtgtagttttcatgtgaatatatttgcttttccacagtaggcctcaaagcgctccaaatatccacttgcagattttacagaaacagtgt

SEQ ID NO: 750141 - DNA, 628 bp, Homo sapiens
  misc_feature 1, 2, 3, 4, 5, 6, 7, 8, 9, 10, 11, 12, 13, 14, 15, 16, 17,18, 19, 20, 21, 22, 23, 24, 25, 26, 27, 28, 29: n = A,T,C or G
nnnnnnnnnnnnnnnnnnnnnnnnnnnnnaatgcttccgtcttgttttaatgtgaagatatttccttttcaaccgatagcctaaaagagctccaaatgtccaactgcagattttttaaaaagaatgtttcaaaactgcactatcaaaagaaaggttcagctccgtgagttgaatgcacacatctcaaagaagtttctgagaatgcttctgtctagtttttatgtgaagatattcgcgattccaatgaagtcttcaaagcgctccaaatatctaaatgcggatcctacaaaaagagtgattcaaaactggtctatraaaaggaaggttcagctctgtgagttgaacgcacacatcacagaaagtttctgagaatgcttccatttagtttttaggtgaagatattaccttttcaaccacagccttcaagacgctccaaatgtccacttgcagattctacaagaagattgtttccaggctgctctatcaaaagaaatgttcaactatgggagtagaatacacacatcacaaagtcgtttctgagaatgcttctgtctagtttttatgtgaagatacttccttttctaccagaggcctgaaagcgctccaaatatccaattgcagattctac

SEQ ID NO: 750142 - DNA, 628 bp, Homo sapiens
  misc_feature 1, 2, 3, 4, 5, 6, 7, 8, 9, 10, 11, 12, 13, 14, 15, 16, 17,18, 19, 20, 21, 22, 23, 24, 25, 26, 27, 28, 29: n = A,T,C or G
nnnnnnnnnnnnnnnnnnnnnnnnnnnnnaatgcttccgtcttgttttaatgtgaagatatttccttttcaaccgatagcctaaaagagctccaaatgtccaactgcagattttttaaaaagaatgtttcaaaactgcactatcaaaagaaaggttcagctccgtgagttgaatgcacacatctcaaagaagtttctgagaatgcttctgtctagtttttatgtgaagatattcgcgattccaatgaagtcttcaaagcgctccaaatatctaaatgcggatcctacaaaaagagtgattcaaaactggtctataaaaaggaaggttcagctctgtgagttgaacgcacacatcacrgaaagtttctgagaatgcttccatttagtttttaggtgaagatattaccttttcaaccacagccttcaagacgctccaaatgtccacttgcagattctacaagaagattgtttccaggctgctctatcaaaagaaatgttcaactatgggagtagaatacacacatcacaaagtcgtttctgagaatgcttctgtctagtttttatgtgaagatacttccttttctaccagaggcctgaaagcgctccaaatatccaattgcagattctac

SEQ ID NO: 750143 - DNA, 616 bp, Homo sapiens
ctttttaaaggatctgccagttcatatgtgcagtgctttgaggcttatggtagaaaaggaaatatcttcatataaaacctagacagaagcattctcagaaacgactttgtgatgtgtgcattctacacacaaagttgaaactttcttttgatagagcagttttgaagcagtctttccgaagaatcttcaagtggacatttcgagggctttgaggaccattgcggataaggaaatatcttcccataagaagtagacagaagtataatcagaaacttcattttgatgtgtacattcaactcacaaagcagacccttacttttgatagagaagttttgaaacactctttttgtagaatctgcaattggatatttggagcgctttcaggcctctggtagaaaaggaaatatcttcacataaaaactagacagaaamattctcagaaacgactttgtgatgtgtgtattctactcccatagttgaacatttcttttgatagagccgcctggaaacaatcttcttgtagaatctgcaagtggacatttggagcgtttcgaaggctgtggttgaaaaggtaatatcttcacctaaaaactaaatggaagcattgtccgaaact

SEQ ID NO: 750144 - DNA, 606 bp, Homo sapiens
ctttttaaagaatctgccagttcatatgtgcagtgctttgaggcttatggtagaaaaggaaatatcttcctataaaaactagacagaagcattctcagaaacgactttgtgatgtgtgcattctacacacaaagttgaaactttcttttgatagagcagttttgaaaccgtctttccgaagtatcttcaagtgggcatttcgagggctttgaggaccattgcggataaggaaatatcttcccataagaagtagacagaagtataatcagaaacttcattttgatgtgcacatttaactcacaaagcacacccttacttttgatagagaagttttgaaacactctttttgtagaatctgcaattggatatttggagcrctttcaggcctctggtagaaaaggaaatatcttcacataaaaactagacagaagcattctcagaaacgactttgtgatgtgtgtattctactcccatagttgaacatttcttttgatagagccgcctggaaacaatcttcttgtagaatctgcaagtggacatttggagcgtttcgaaggctgtggttgaaaaggtaatatcttcacccaaaaactaaatggaagcatt

SEQ ID NO: 750145 - DNA, 513 bp, Homo sapiens
gcctaaacaatagaaaatttgttttctcaaagttcaggtggccagagaagctggagatcaagttgccagcagggtttgctttttctgaggcctctctttctagcgtgcagaccgcctccttctctctgtgttctcacgggacctttcctttgtgcttgcatccttggcgtctccttgaagttccaaatttcctcttctgggaaggacaccagtcagattgggttagggcccatcataatgttctcattttaatgtaatcacctattgaaagscttattttgaaatacagtcatactgtgaggcactgggggctaggcctgagcatgaattttgggggacatgatatagcctataaccccccacatatctgggttagtagcctctcctgtgtcccccaccaaggctatttgtatcctcggaccttgacactccacagtcacgtgccagtctatttcccaccactgagcaccttgagggtaagtaggaagaccagcttcttcctaacttttctct

SEQ ID NO: 750146 - DNA, 513 bp, Homo sapiens
gcctaaacaatagaaaatttgttttctcaaagttcaggtggccagagaagctggagatcaagttgccagcagggtttgctttttctgaggcctctctttctagcgtgcagaccgcctccttctctctgtgttctcacgggacctttcctttgtgcttgcatccttggcgtctccttgaagttccaaatttcctcttctgggaaggacaccagtcagattgggttagggcccatcataatgttctcattttaatgtaatcacctattgaaagccttattttgaaatacagtcatactgtgaggcactgggggctaggcctgarcatgaattttgggggacatgatatagcctataaccccccacatatctgggttagtagcctctcctgtgtcccccaccaaggctatttgtatcctcggaccttgacactccacagtcacgtgccagtctatttcccaccactgagcaccttgagggtaagtaggaagaccagcttcttcctaacttttctct

SEQ ID NO: 750147 - DNA, 513 bp, Homo sapiens
gcctaaacaatagaaaatttgttttctcaaagttcaggtggccagagaagctggagatcaagttgccagcagggtttgctttttctgaggcctctctttctagcgtgcagaccgcctccttctctctgtgttctcacgggacctttcctttgtgcttgcatccttggcgtctccttgaagttccaaatttcctcttctgggaaggacaccagtcagattgggttagggcccatcataatgttctcattttaatgtaatcacctattgaaagccttattttgaaatacagtcatactgtgaggcactgggggctaggcctgagcaygaattttgggggacatgatatagcctataaccccccacatatctgggttagtagcctctcctgtgtcccccaccaaggctatttgtatcctcggaccttgacactccacagtcacgtgccagtctatttcccaccactgagcaccttgagggtaagtaggaagaccagcttcttcctaacttttctct

SEQ ID NO: 750148 - DNA, 559 bp, Homo sapiens
gtgttgaagatgttgaagatatatcttcattcataaataaaaatttctgttagattttcaagccccttcaaatttgtaggacagagactctgagagccacagctggatgtttatattgactaaacatgcctgtagccacccatcgttgcaggtggaaaggagagaagctgcaggctgggaagatacttcaaagaggtgtctttaaatgaatgaacagcacagctatatcataggaaaagccataatcttcaacacttacagtattaaacaagagaaaatgaaacttttctagccattctgctcctaagaaaaaaagaaacagaatgggagaattaaaaatataaatwgcaattaataaataataaaatgaaaaaataacactttgaaaaagagcttagtttttgaaaacatgtttaaacagatatgtttctaggtagtttaattcaattggaaaaagaaagaaaatgcaaatcagaataggaataaatgagatgatagaaccacaagttcaaaaggatacccaaaagagaatattacaaacaattccacattcataaaa

SEQ ID NO: 750149 - DNA, 581 bp, Homo sapiens
ggtgggggattgaggtttttcatgtatttcttttcagaaagaataagaaagcctagattaaataataaaaccaaattataaggtgtttgacaataaagaagctgctctacctcacctctataatccacatttttttaaattttttgtaatccacatttcttcttctcaaattataaaggcaaattaacaaagttaggaatrgttaatactatataatatctgttacctcgtgtcctggttatctttcttaagtaacattcccagaagatttaatataattgagaaatgtttctttgtggccgtagttacagtgccaatcacagctccatcaaacaaagaaggagaggaagaactgaggctactaaagataaagtgatcatgcctgaaagacaaagcatagattatcttttcatctttaatcaaagaaagcaagcaagtccaaagttaaatcaacatacatctttaaaatctatccattaaaaaaataaaatgttttgtggggttcttttcttaagaaaaatttgtgaatacagtacctggtacaatgaggatacaatgtgtagagcacagcatactgaatg

SEQ ID NO: 750150 - DNA, 581 bp, Homo sapiens
ggtgggggattgaggtttttcatgtatttcttttcagaaagaataagaaagcctagattaaataataaaaccaaattataaggtgtttgacaataaagaagctgctctacctcacctctataatccacatttttttaaattttttgtaatccacatttcttcttctcaaattataaaggcaaattaacaaagttaggaatggttaatactatataatatctgttacctcgtgtcctggttatctttcttaagtaayattcccagaagatttaatataattgagaaatgtttctttgtggccgtagttacagtgccaatcacagctccatcaaacaaagaaggagaggaagaactgaggctactaaagataaagtgatcatgcctgaaagacaaagcatagattatcttttcatctttaatcaaagaaagcaagcaagtccaaagttaaatcaacatacatctttaaaatctatccattaaaaaaataaaatgttttgtggggttcttttcttaagaaaaatttgtgaatacagtacctggtacaatgaggatacaatgtgtagagcacagcatactgaatg

SEQ ID NO: 750151 - DNA, 581 bp, Homo sapiens
ggtgggggattgaggtttttcatgtatttcttttcagaaagaataagaaagcctagattaaataataaaaccaaattataaggtgtttgacaataaagaagctgctctacctcacctctataatccacatttttttaaattttttgtaatccacatttcttcttctcaaattataaaggcaaattaacaaagttaggaatggttaatactatataatatctgttacctcgtgtcctggttatctttcttaagtaacattcmcagaagatttaatataattgagaaatgtttctttgtggccgtagttacagtgccaatcacagctccatcaaacaaagaaggagaggaagaactgaggctactaaagataaagtgatcatgcctgaaagacaaagcatagattatcttttcatctttaatcaaagaaagcaagcaagtccaaagttaaatcaacatacatctttaaaatctatccattaaaaaaataaaatgttttgtggggttcttttcttaagaaaaatttgtgaatacagtacctggtacaatgaggatacaatgtgtagagcacagcatactgaatg

SEQ ID NO: 750152 - DNA, 592 bp, Homo sapiens
tcatctcaaaaaaaaataataataattcattatgtaatccagctttgaaacactctttggctacacttttgtatgctttaaggaggaacaaaacacagatggtctccaacttacattggttaaatctacaatttttcagctttacaatggtgcaaaaacaatgtgcattcagtagaaactgtacttcaagtacccatacaaccattctggtttgccccttcagtacaatgttcaatgaattatgtgagatattcaacactttattataaaacaggctttattttagatgaytttgcccaaccttaggctaatgtaagtgttctaagcatgtttaaggtaggctaggctaagctatgatgttcagtaggttaggtgtattaaagcaagttttacttaagatattttcaagttacagtgggtttattgagatgcaacctcattgtaagtcaaggaacatctgtacttcagaagtcatcaaagctgcatgagcaggacacaagtcatatgaaaagccaggtagacataatgctataaaaaatccctccattgggccgggcacggtggctcatgcctgtaatcccagcactttggg

SEQ ID NO: 750153 - DNA, 623 bp, Homo sapiens
ttttttgtttttttttttttttttttttgcagtctactatctatgtggtcttggtacgcctgactcgtatgcagcttgtaccacaaacaagccaccatgtgacatcaacaacacccagacttttccattctctgctcaacaagacaagtctactgatgttgccttaggatgttgcggcaattaggagttgtcatgagaatttctaaatgcttttgctcagtttctggtcttcctgctttacctttctactgaccagtggcagacagttcatggactgtcttaagcttcactccaggaattaggctggaagactaggaagtggccgtccaatattaagacagtctagtgtgtatatgtgagagccatcgytccagtttaaaacactctaaagaagtatatctgggtaggcccttagcagacctgggctctagttcagactttccagctgactcaatgtatatccctttgtttccatgtggttgactttccccttcagaagatgctggatttgtgccaggcagccactaaggacccttccagctcccaggtgtcatgctctccttgagcacacagctccagagacaacctgcatacccatgactcaatttacatctgcagcctgc

SEQ ID NO: 750154 - DNA, 624 bp, Homo sapiens
tcatgacagtagcctaaggagacatttccttgccttccattgggtttatgagctttccaaagcgctgatatgtcaggtctgactggccaggggggaaaggtgtttctgtagaaaggcataaactaagcatgagttaatattttaaaagtttagaaatgaaattaaggtgttataattgttttttctgctttggtgacttgtcttacctacatgttttccttccgatatcatgatgtcatagctaatatgtggcgactgggtttcgagtttcaggttgaggatgccatggtgatatacctccrtgtagaagctgtgaagttacagcacctttgttttcatgtcagttgtcttttgatgctgtcctccaagacagctgccgtatctcttgtagccatgtagttctgcatgtgggttgctattaatatttgtacacaagcatcacacgtgggttaatgcaacatccttgctctgatgtccgcagtctcatagtagtctgaagcctcattggatgagttattctgtggtactgggtcctcctccattgctgggattgacaaattcaaagatgtcttggggacatgagttcaactactccaaagaaaaatgatgtttggaaaatcatca

SEQ ID NO: 750155 - DNA, 613 bp, Homo sapiens
caaatatttgctctctgtctctgagcttggcatgactggaacctgttatgaaatcaaaccattgccctggctcaccctcaagggccaaattaccccaacataaagaaattcctgcagcatacatgggcctgggcccctccttaggagtggctctgtcaccattcccagaaggttgtctgcttgctttggaggaattcccaggagcctggcctgccttttgcttcaatctcagctataaaaagggtggaaacatggaaaccaagtctctccaaakgacggtaggatgtgtgatagaaggtgaaagtcagagtgcctgaaccccagtgtgtccccagacaacactgctgctgctgcaccacccagcacatagtaggtcctcaacaaatgtgtggtgaatagctgggtagtagtagaagagcgcttctctttttgtaagagcccctggcaaagcagatctatttcttcccggtacaactttatccaaatgaaaccagtgaaagtgagcactgagaggcattctggaaagagaagccttaaagggcagcctagggctgggagtggattggcagcaggggctcacggcctttggccttggtgctccccagtagtgttg

SEQ ID NO: 750156 - DNA, 574 bp, Homo sapiens
ttttttgggtttagtgttagcatggtatatcttactctatgtctttacttttaatctgtatgtgtctttaaggtgggtttcttgtgaacaacatatagttagttgggtcttgttttttttgatccactctaacaatctgtcttttaattggtatatttagacyattgacatttgaagtcaatgattattgattattgacatacttgggttaatatctactatagttagtactgttttctatttgttgcccttattctttgtttctatgtttgtcttccactcattttctgccttttgtggttttaattgagcatttaatatgttcgtattgtttctctcctttcttagcgtatcatttatactttcttttttacttattttagtgcttgctgtggagtttgcagtatgcatttacaacaaatccaaatctactttcaaataatattgtgctgcttcatgacagtacaagtaccttataataacaaaattatcctaattcctccctgccatccttgtctcattactatcatttatttcacttacacataagcatacctagcatatatgaaatact

SEQ ID NO: 750157 - DNA, 643 bp, Homo sapiens
tcctgccttcaggtggccaggggcatctgaacgcccaggggacctgggtatggggttggtgtagaccatgtcttggcccttcccaaggtgccggcttcacctccatccctctgtgctctggtgctgacctggcatttgcagttatgtgccctagtggcagccgctcgagcttggctgccaagacccacggtgtggtcagaccactgtgtgcggctgaggaatgagttcctcccaggaggggaaagccctcgggtcaatcggggccctcgtgcccacccgtcactgcaggscaggatcgtggcaggtggcaaccccagctttgagtgctgcgtcttctggggctgcagccgcccactgtgagcaggagggtgagggcaggtagagtctgtcctgccatgaagctggaggctttgacagcaggggcggacagaactgagcagaaacacttcacagcctggccacgagctccccgctttgtgctccctccctcgcatttccccgtgttctgcacccccagagctgaggagccagggcccttgtccaggaacaggctggatcgaggcctggtgcctgcatgcattcccaggtgggagccaggcaggtgacccggaccctccaccagcccagaagcagcccttccacc

SEQ ID NO: 750158 - DNA, 505 bp, Homo sapiens
cttgccctgaaagaaggggttagagaaatcttaacatctttttaactgaaagttttccaattattgccaaacatatcatcagcccaaatactgaattctaacaagatggtttgaacaaggtataaagtccgtactgataggcatgagaaagagtgattagtggtataaccttggagaagttactcactttcccacatgtgaaatggagacagcacccacgctgcatgactctagtaaaactgcacaactctgcaatgcacctagctgaggccctggcccattacaggctgtcagtattatttacattctcccttstccttttaaaactattactttttatgactattagagtaataattcactggaaaataaacataaaagccaaaaattgaaattacacataatatcaagtaacaaggtctgatattttggctcataattctatacttttaaatacatataaacaaattatactggcagcctgctttttcacttaaaaacatat

SEQ ID NO: 750159 - DNA, 651 bp, Homo sapiens
aagagagaatttaaagtaactgcaagtcccagcctgaaacctcgcgtttggcaattttgaagagactgtgggccatttacattatagccatgtttgtcaccagctgaggtatttgaaaagtgtgacaatttcaaatagcagccctctggtatatctcagccaagtattaaggtagactagaccatggttggctttaaaaaaaacaaaaaaamaaaacaaaccttcactgtgattagaggacaaaagctcgaatgctcagtatatttttcgaatccaggacagcttcgcacacctccccttgcagttcagggttcaggactcagctctggaaaacagggactagatgaaacttgcctttgtcatttcccactgtccatttccctcttgtcactcttctctgacctctcagtcttgccttcctatctagattttaaaggtgtggtgagggaggcagggagggaacactttgaaatccttttaaaaggccaggcaccctggcacatgcctgtaatttccagcagtttgggaggccaagctggggccattgcttgaggccaggagtttcagacaagcctggggaacatagcaagaccccatctctacaaaaattaaaaaataatgaaattcgcctttggcctcattgcactcctg

SEQ ID NO: 750160 - DNA, 525 bp, Homo sapiens
ggaaaagtttagacttctttaaaattttcaagaaataaacatatgagaaaatatttttgtaggtagacagcccatggaattatgttactgagtaagatgagaaggcaaatttcctttagtctcttaaggtaggggaaacaagatgctgtaaggtgctctcaggggagtgtggcatcattggagaatcatttatggagatattagttgctaggtgaatatgctgaaggcctatctttggtaactcctcctaacacaatcagttctgctgagttacctcagggtatcttctttgggaggccccayaggagggttcaaaatgcttgaagaccaagaatcatgcaccctttatgaccaatactgcttttatattttgtaatcacatcatggctaaaatatgtgccactatacatcaaatttaccttattatagtgtctttattctctccctgatttctttaaccatggtctttaatttattgcattgtattttactctaagtcactgcaaatgcctttttttctttttt

SEQ ID NO: 750161 - DNA, 637 bp, Homo sapiens
cttgtttgtgatattggtcatttgtgtcttctcactttttttcccccctaatctggctagaggtttatcaattttatgaattttcttaaagaattagcttttggttttgttgatctttctctgtggattttctgttttatattttattgatttckactatgatcttatttcctttctttcttagagtttattttgttcttccaggtttttagggtaaatgctgaaacctttttctattttaatacaggtgtttagtgctgcaaatttttttcctgtgtgctgctttattacatcttacatcctgttgtattttcatttagttcaaaatagtttctaatttatttctcttttgatttcttctttgagccataggttatttagaagtgtgttatttgattttcatctcttgtggtgtttcaaccatttacatttaatatgatttttagtaaggttaggtttgactctgtcatcttactagtagtttcttctggttttgttcccctctccctctttttctgccaccttttggattgaatatttttaatgagtctcttttaatatccattgaatattatactgttgggtgctggatatttttgtattcctataaatgtccttgagctttgttctgggatgc

SEQ ID NO: 750162 - DNA, 619 bp, Homo sapiens
cgttacatggatcaatacaatagtccatccctttttattgctgaaaagtattccattgcatggataaatcacagcatgttgatctattcacccactgaagggcatttgggttgtttgtaggtttttgttgttgttgtttgtttgtttgtttattttgaaatggagtttcgctcttatcacccaggctggagtgcaayggtgtgatctcggctcactgcaaccttctcctcccggtttcaagcgattctcccacctcggcctcctgagtagctgggattacaggcatgcgccaccatgcccggctaattttgtatttgtagtagagacgggatttcaccatgttggctaggttggtcttgaaccccgacctcagatgatccacccgcctcagcctcccaaagtggtgggattacaggcgtgagccactgtgcccggccattgtttgtagtttttgtctattgtaaataaagctgctatgaacattcactacataggctttattttgtgaacaaataagtttattttgtcttggatcaatgcatagaggacaacaactgggttgtatggtaggtataggcttaaattcttaagaaaccaacaaaatgtctccccagtacat

SEQ ID NO: 750163 - DNA, 619 bp, Homo sapiens
cgttacatggatcaatacaatagtccatccctttttattgctgaaaagtattccattgcatggataaatcacagcatgttgatctattcacccactgaagggcatttgggttgtttgtaggtttttgttgttgttgtttgtttgtttgtttattttgaaatggagtttcgctcttatcacccaggctggagtgcaatggtgtgatctcggctcactgcaaccttctcctcccggtttcaagcgattctcccacctcggcctcctgagtagctgggattacaggcatgcgccaccatgccyggctaattttgtatttgtagtagagacgggatttcaccatgttggctaggttggtcttgaaccccgacctcagatgatccacccgcctcagcctcccaaagtggtgggattacaggcgtgagccactgtgcccggccattgtttgtagtttttgtctattgtaaataaagctgctatgaacattcactacataggctttattttgtgaacaaataagtttattttgtcttggatcaatgcatagaggacaacaactgggttgtatggtaggtataggcttaaattcttaagaaaccaacaaaatgtctccccagtacat

SEQ ID NO: 750164 - DNA, 619 bp, Homo sapiens
cgttacatggatcaatacaatagtccatccctttttattgctgaaaagtattccattgcatggataaatcacagcatgttgatctattcacccactgaagggcatttgggttgtttgtaggtttttgttgttgttgtttgtttgtttgtttattttgaaatggagtttcgctcttatcacccaggctggagtgcaatggtgtgatctcggctcactgcaaccttctcctcccggtttcaagcgattctcccacctcggcctcctgagtagctgggattacaggcatgcgccaccatgcccggctaattttgtatttgtagtagagacgggatttcaccatgttggctaggttggtcttgaaccccgacctcagatgatccacccrcctcagcctcccaaagtggtgggattacaggcgtgagccactgtgcccggccattgtttgtagtttttgtctattgtaaataaagctgctatgaacattcactacataggctttattttgtgaacaaataagtttattttgtcttggatcaatgcatagaggacaacaactgggttgtatggtaggtataggcttaaattcttaagaaaccaacaaaatgtctccccagtacat

SEQ ID NO: 750165 - DNA, 573 bp, Homo sapiens
gaggcggaggttgcggtgagccgagattgcaccattgcactccagcctgggcaacaagagtgaaactccatctcaaaattttaaaaagaagaaaaagaaaaagaaatttttaaataaaaagaaaaggaggccgggtgcagtggctcaygcctgtaaccccagcacttaggaaggccgaggtgggctgattgcttgagctcaagagtttgagaccagcctgggcaacatggcaaaaccctatttctacaaaaaaattacaaaaattagctagatgtgatagtgcatgcctatagtcccagctacttgggaggctaaggtgggaggattacttgagcccaggaggcagaggttgcagttagctgatacctcgccactgcactccagcctaggtgacaaagtgagaccctgtcttccaaaaaagaaaaaagaaaaggatttatatttacccacattatttatcatttctggtgttctttatcccattgtgtagattcagatttccctgtgatatcatattccttctacctgaaaacttcctttaatattttagctcaggtcttttgctgattaagc

SEQ ID NO: 750166 - DNA, 591 bp, Homo sapiens
cgtctttcacctactttcaatatgtgagcttcagaaaagttgagcccacagcatggtccaggggtgggcatataacctgggcttagctagttggaaccacactggccacagtaattggtccattgatgggtctattattcacttaagctcactgagctaattctacacatttgctagagcaactgggagaggggcttccttcccaccttcccaccataagagggagtttgcttgagaaaaaagccaatatagaagaaagcaaagctgatagctgaagaaagagagcttggtaacatctactcttgaactttccaggtaggtgaatcaagaaattctccctcatacttaaaatatatttgagttgggttttctaygattaaaactgaaagttttctgacataaagacatttaaaaaattttaagacacggaggaatgtcaatgtggctatggattagtctaagatataaaagggatatggggacccacttggaaccctacagttggtatgaaaattattttaagctgaagatatttgagatttaacagacatggaaagaagacttttaggagcttccctcacatgactaaaa

SEQ ID NO: 750167 - DNA, 647 bp, Homo sapiens
tgtggcatagtagttagtatacctcccttccaaatcatgaaaaatattaactaatgcatcaagaagttcaacaaaccccgaatagtataaacacaaaggagactgcacctggacacatgacggtctaatttctaatagccaaaaataaagagaaaatcttaaaagcaaccaaagaaaaatgacaaatcatatacaaaggaaaactatatgattagtggcagaattctcttcagaaacaatggaagccaaaggagacactgaaattgctaacagttaaaaaaaaattgttgctaggagaattgcactataaagcatactaaaagaagtcctttggtggaagaaaaataacacaaatgctaacttatctacattggaagacatgaagagcatcagaaatggtaagtatggtgtaaatatataaaatacacacacatatgtatttccyttcttctttaagatttagaattgtgtgaagcaaagttatactatatttgggggtttataatgcatattataatgcacagatataatatacatgacaatgcaaaaataatgggggaaaatggacccgtacttgtgcaaaattcccacattttatcagaagtcagggtaaattaccattagattataatcaattcaagatgcat

SEQ ID NO: 750168 - DNA, 643 bp, Homo sapiens
agagagcaaatattgcccgtggtttttaaacgtgcagttgaaggagagaaattattgatgcaatggtaattatactggtaataacttaaaagagcttgctgtatgagagaaatctgcacataataaaagctggctatacatttgagagtctaaaaaaatgcacacaaaacaaaaaggactcaaagaggtagaaaataggcccattattgggaggggacaaaatttgggrtaagagcgcatattaacatgcctagattttaagtttatctttaaaatgtacaaagtgctggattgcctggagggaaaagtacattaatctggtcatcagaaggccagctgtagtccaagtctatcagtctttggccgtaggagaccttaggaaagtcagctaagagcattggacctggaatctactcatcgcttgcaaaatgagagggctcattaactgagcttgtaagtctttggtagctttaaaaatgtaactttctttgatatatctctacttgcagaatttcaaaggatggctcaaactacactcaccaatttcaaaattttctctcttaaatttttgtgactctgatttggagcccatgctattttaaaaactcagtaaaacagataccccaataattgagtctaaatt

SEQ ID NO: 750169 - DNA, 636 bp, Homo sapiens
tcatttctttgttttggaaacactcaatatcttccctctagctatttgaaactatatattattgttaactatagtcatgctacagtacagaacactgcatgtccagctgtaatgttagacaaagattttgaacctattttaaatatgttcaaagcactaaagaaaaccatatctaaagaactaaagtatgagaataatgtgaaacaaaataaagaatatcaattagccagatagaaattataagaattacatagatattctggaggtaaaaagttgaaatgaaaaatttactagagggcttaagcaacagttttgggcagacaaaaaaaaatcagtgaattcaaatatatgccaattgagatgatctagtctgaggaacaagaaagattaaaaagtgaagaacaatgagagcctcagaaatctatgggacattatcaagtwtgtaaacattcacatcacgggagtcccggaaaaaaagaggagagatggaaaggggcaaaaaagattatttaaagaaataaaacctaaaatcttcctgagtttgatgaaaaaatataaattcagaagctcaacaaactttgtggaacataaactcagagctattttcacctagatgcatcttaataaaaaccgtca

SEQ ID NO: 750170 - DNA, 585 bp, Homo sapiens
agttgtgggggtgagggggagcataaaaacaaaagaaattgtcttcacaacttcatctgtgtccttagttttcaccagacaacataacaattttagaaagacttgaggttcttaaagcccctaaacttgttttctctaaaggaaagcacctcttcactattgttttcttaaggtcttcatatattgaggggktttttttgtttgttttttgagacggagtttcccttttgtcgcccaggctagagttcaatggcgcgatctcagctcactgcaacctccgcctcccaggttcaggcgcttctcctgcctcagcctcccaagtacctgggattacaggcgccctgccatcactcccggctaatttttgtatttttagtggagacgaggtttcaccacgttggccaggctggtctgaaactcctgacctcaggtgatccaacccgccttggcctcctgaagtgctaggattacaggcgtgagccactgcacccggcctttttttttttttttttttttttttttaagagaaacttgccctgatcctttactgtgaaaaatccctgtgaaccagtgaaatttccatga

SEQ ID NO: 750171 - DNA, 522 bp, Homo sapiens
ctggaagatcacaccatttgattagcagtggaatcgaaagtacttctaaatctaaaacagtaatatctcaagtagtataacagactcagaggtagaatcattaaggtctttaaaaacgtctacagaatttaaagtaatataaattaagtttttaaagttcagtggtaaattgaatacgaagcatcctatattctatttatctaaccttgaccctgcctagcaattaaatagcagtaagtatacagttgctattaatttaagtgtacaattaacatgggcatatttaaatatrtatcttcagaagctactgaaaacctgaattcttttttttagtatgactggctggcttttaaactcctcaacgtacctttaatcttatgtaaacttaaaggctaatcagtaaattaccacattcaattaactgacatattgccaatagctagtctttttcttgcaagttatagcagataattgcaattttccagaactggttaatttaatattaggtcactttaaatatca

SEQ ID NO: 750172 - DNA, 639 bp, Homo sapiens
atgaagaataatctattatgggtcagcaagctttggcttgctggtcaataagcctaccacctgttttgttttattaccgctttattgaaatataatttatataccacacaaaccatccatctaaagtatacaactcaatggttttagtacattcaaaccattgtgcagccatcaccacaatcaaatttagagcatatttattacccacaaaagcctgtatctactggcagtcattccccaactccccctcaggccagccctaagtaatcacaaatctactttctggctctacatatttgcctattctggatattaaatacaaatgaaattayacaatatatgatcctgtatgactggctacttagtcgagtattttcaaggttaatctaatgtgttgtaacaagtatcaacacacttctttttactaatgaacatttcattcgtatgaacataccatatttatcgattcatcagttaataaacatttggactgtttccatttttggccattatgaataatgttattatgaacattcatgtccaagtttttcacttcatttcacatgtttcatttcttttaggtatatacccaggaatggaattactaggtcatatggtaactctatgtttgacattttg

SEQ ID NO: 750173 - DNA, 684 bp, Homo sapiens
ccaaatagccaaactaatcctgagcacaaagaacaaagctggacgcatcacattactggacttcaaattatactacaaggcaagagtaaccgaaacaggatggtactagtataaaaacagacacatagatcaatgtaacagtatagagaatttggaaataaagccaattacctacagccaactggtcttcaacaagattgacaaaagcatatattgggaaaggaacatgctattcaataaatggtgctgggaaaatgtggattgccatatgcagaatgaaactggacccctatctctcaccatatacaaaaattaatgttgattaaatactgaaatgtaagacctgaaaatataaaaatactagaagaaaacctaaccaaaaactttgccagacattggccttggcaaagaattcatgactaagacctcaaaagcaaatgctacaaaaccaaaaatagacaaatgggacttgattaaattaaaaacttttgcactgcaaaataagtarcagagtgaacaggaatcctgaacaatgggagaaaaatatttgcaaaccatgcaccaggcaagggactaatccagaatctacaaggaactcaaacaactcaacaacaacaaaaaccaagtaaccacattaaaaagggggcaaacgacatgagcagacatttttcagaaagagacata

SEQ ID NO: 750174 - DNA, 597 bp, Homo sapiens
caaatatacaaagaaacaaaagacataatgatgatatgagttaggactaagtttagcctcacacagcagaacaaacaaataatggtggcttagacacacacagttttatttgttttcatctaaaagacgtcatgagataggtgtccaggacagattcatcagaaattcatcagggacctgtttctttacagtttatgaatcrtctcagatctacgttatgctccttgttcttgtgacccaagatggcagctagagctccagatgctcacattccaggccaattgtggaaggaaagggatgaagggcaggcctatttaaaaaaaaacaaaaccaaaacattctgaagtttgcacacagtactgccacttaaaatttattgtcaaaaatttaaccacaatgatcacatcttgatgtgaacaaaaactagggagttttaactggccaacaataagcttgactaaaaattagtattttccttactagcaagggagttggggaatggatgcttgttgtcaactgagtctctgacacagtaagtgtgtaatgagctagaaaatggcacccctgaatatctcagtcctaagccctggatccgtg

SEQ ID NO: 750175 - DNA, 612 bp, Homo sapiens
aaatgaggtctgggctgagagaaggagggacaggagatactagtccatgtgagtgacctgatcttatacccagcccagtgctggtgggtattaggaggtgcaggcagggagctctgcctgccagagtggtcagggggcatcgtggaggacttggggattgagctcgacctggaaggctggtagaaatgacgtcaggcagtaaggaggcttttctacgcagaagagaaggagttagtgtttgtaagagacccggactaggtagaaacatttgggtggaagaaagggctgtaatagggagcatcagagatacaggaacaccagtgagtgtgtttgcttcratcatctggattgtaaactccttgtggcaagtcttgcctttgcttgaagagccctgggacacaacattcacaacgaacgttcacaatgagcgttcactcctctgtcttagcctccttgggatatggccaggcctctttggggtcactggatggaagtctttgtgttcttataaaagtttcaggaaaagccaacaaaatgagttaagggtaggaaaataaaatatttcaggggtcatctcatcgggtgaccaaacaatgcaggatccacttgaca

SEQ ID NO: 750176 - DNA, 626 bp, Homo sapiens
aaatggccatgatcatgtatctcaccagctgcaaaatcttaaatcgataccactggaaaaaaaaaaagcatgaccatcctggcccagaatatcttgatcatatcttgttataactgggaacttctcatccatccattctttagttttactggcaatgtgttacacatcaaacaactttttataacagcccccacaagggattttataatttgttatttaaaagttatgcatcttcattgtataatttttggaaatacaaatatcctaagcaaatgacttgctgtcttatcactgagaagaaataacctgtgtttagaaaacattttacaaatgcttattatttttagtaggttgccttttttgtcttttgtataaaagatcatgtttctttgacttctttccccttttgtggtgatttagaatataaatactctttttaatttgtttacattttwaaaaaatttagtttattttctcaattatcaatgttaaaaatgaaatttgatgtgtcatttgataaaaaattagcatgcttacttcctccttctttttcttcccagttaccagtttttatttgtcatctgatttcatatcctcattattttatatataaaacttatatttca

SEQ ID NO: 750177 - DNA, 620 bp, Homo sapiens
ttatatgcttcctggcttttctatcttgggattttccttgttctttcttcttgctacattaatgttacacacaacatctcttgctcactctctttgttcttttagaaatgtggataaattctatttttattctattactagttacctttaaatttttaaataaattttaaatttctctgtcagaggaaagatttcacggtagctattaattctcttcaacaaaagatgagcctggtaccgtggctcacacctgtaatcccagcagtttgggaggccgaggcaggcagatcacctgtggtcaggagtttgagaccaccctggccaacatagtgaaacgccatctctactaaaaatacaaaaataagccaggtctcgtggyatatgcctgtaatcccagctacttaggaggctgaggtgggagaattgcttgaatccaggaggtggaggtgaaccaagattgcaccattgcactccagcctgggtgagagggcaagacttggaaggaaggaaggaaggaaggaaggaaggaaggaaggaaggaaggaaggaaggaaggaaaaacaagcaaatacaagcacatttttactttcccttctcctacgccaccccgtcctcccaat

SEQ ID NO: 750178 - DNA, 614 bp, Homo sapiens
gtacacatcttaaaggatgtctcattccatctgtggagtgcagtctgcctgctgattgtagcttccttctaatggccctagattctccaccctagaaatggcacccgtacctctgtctcccagatccatgcaagttggcagctttccgcctttgcagttctctgatgtgtctgcctgcctctcctttgtcttcttagctcctttgaaacctgtttaactagtcctctatattgaatcccaaatctagcccctccttactttctttcacaaaaaaaaaaaaaaagaaagaaactagagtgatttctgttttattgattggatcctgattaaaacatgtgattttgaatccttattacataatrttttttcaaggtaaaaatcactcaatagaaggaaaatacgtagcttaaaataaaggcagtcttagtgtgtttttcttttatatgcttgtggaatatgaaatgactttgaactactctattcaacaataacaacaaaataactgtggttttatgatgaggttataaataggagttgtaataagtaaaatttccaagaagtaatttctgaataccataggaggtctttcagctaacatctattttgttgttacc

SEQ ID NO: 750179 - DNA, 562 bp, Homo sapiens
tacagttactgtggaaaacaatatggtgatttcttgaaaaacttagaaatcatcttaaccatatgattcagcaatttcactgctggtatattcccaaaataatcaaaagcattgtctcaaagacatatttgcacatctatgttcacagcagcattagtcacagtagtcagaagrtaaaagcaatgtaagtagataaacagataagcaaaatgtgatctatattttatatatatatatatatatatatctccattggtatatatattagtagatgaataacaaaatgtgatatatatatatatatatatccattggtagatgaatagataaacaaaatgtgattttacatgtacacaaaaattgaatattatttattatttttaactgacataaaattgtatatatttatggtgtacaatgtcttattttaatgcatgtatatattttcttaactttgggaacattcaaaatcttctctaccagctatttgaaaatatgccataaatggttattaactgtagtcaccccacagtgctgcctgtagagcactagaacttacttc

SEQ ID NO: 750180 - DNA, 536 bp, Homo sapiens
gatcccagagcactttgacccatagtggcgaggtttgccaagaaattcaaattctgaccactgagatgggtgattcccctccagttagatctgatgcaaattattcctttgtgctcaggcactatctgagcccagcacagctttgctctccactgcaaccaggtagcactgagtccaaagtaaagtcctccagttacggtgctctctttcttccaaatgcacrgattctttttctgtatcttgcagccactgttggggaagcagggaatggtggctctggcaattcaggactatttctctaaccctcttcaatggctctttcagtgatataaagttagcagactgctgaactgttccagatgttttaagctttttcctggaggaagaagttattatggctggctgtcaggcctcacccttcctagactggtcttgtgaagggagagacgcccagttcctgcaccagtatatgaacctatgtcacgcttttctctgtgttctaaaagtggaggctcctgtctcatttgaactcaggc

SEQ ID NO: 750181 - DNA, 618 bp, Homo sapiens
tatctatatattcttttattaaaaataacaataactgtatctttttatatctgccaattattccacatgaatgtaaatattatactgacaatcttaaaatagatcactttttgctgaataaatttcatctattttcctaaatttagcagatcttattcttatgcaaaataatgctctgcacatatctattccttcattacttaattcaatatcagagaaatggtattttggtgatttaaaaagttgtatgtttttaaagagtatattctaatatactaagtcaatggttttttgctaacaggtttcttgctaatgctttttaaatctgtacttaaaggcaaacaataaattaatcagattaaactctcttccttctgccttttggaaagttgtgtcctttggaaggatgtagattgccataatcatccatcaaggaactacatataccagaatagagcaatggtctcaaacctaaactttctrtagatagaccagacacaacaatttcacttctggtggtagggcatacatgtgtttttaaaatctaatatatctttgaaatattgtcatttatttgcctacttgctattaattaaataacaaacatttattgcatat

SEQ ID NO: 750182 - DNA, 608 bp, Homo sapiens
ttctggcatgggaacacatgaaataaacaaataagtgtgaaaagcagacaagtttctaagagggtgaaggagattaataaataaccagatgattgtagcaagtgttgtaatagaggtgccagagccaagcacaccacaatttttgacatagatttccatcattaattgtgcattacaaacaaggatgtatgtggcagggtgggtggctgggaatctccttaccttcacaaacctcaaaaattggcattaaaaacctaaaaaaattaaatttactttgccttaaacattaggttatcaattatttttgtatgtgactttgatccagaaataggacatatgtatataacattacagtttgctttacatttagaattasggaaatattatcatgattctcccaagttcacaatctccaagtctttcttagtattattacaattaatattttcttttaccctataggtagcactaccctttatttgacactatttcagagtaatttttaactcaaatgaaccttaaaaaattattttgcttaattcttctctataaagcctccagaaggtggaaaaactggtgaaggcattgtttacttcagtagtaacctt

SEQ ID NO: 750183 - DNA, 557 bp, Homo sapiens
tgtatctgtcggtcttcattctgaatgctcctgtgtatgcacatttaataaatgtttatgtattttctccaattaatctgctttttgtgagttgatttttcagcaaaccttcagaaggccaaggggaaagctctcccttgtcccctacatgcttaaggtgtttggaaacttggagggagacaaaactcaaaccatgagtgatttcggtctatatcccagcgattgccctgcctggccctcaacagaccttctagttggagaaggaaatatcctgaagaatatttgtgaaaatgaaaacaaaaacaccaaggcaccaatttcatgcctggacraggatgtcttgagctgaaggaagaaaatgaaagcaacagttacggccttatcactatgaacaagaaagtcttataagggtggaaacattttgctttattttttttgtccccatagcacttggcttcaaagaacaaaagatggtgttcaccaagcagacaacttaccaaagccattttttgaaatgatgcccaataatcaatattaattcagtttatatcaatgca

SEQ ID NO: 750184 - DNA, 646 bp, Homo sapiens
atataacataatacaatcatgcaatataagaaaatataacaaaattctaaatagtatgtacctaataatctaccaagttatatgcagcaaatactaataaaactgcaaagaaaacagacaaatcactattaaaatgggatatatttagcacatttctctcagtaagtgatagctcatgctctccaggaataagaatatagatttctaaaatacaattaagaaactttatgtagtagacatacaaaggccatcacaccaataacaaragaatacatattttgttcaagcacacatggatcccagatcacattttacgcaataaaagagggcttactaaatttcaaagggtatcatacagcccacattcctaacaataacacaatatgttagaaatcaataacaaagaggcatttaaaataatctcatacatttgggagaaaaaaaaacctcctgagtaaagaggaaatcacaatagaaattttaaaatacttgtatctgaaaaataatagaaaaaataaagtagtattttaggaaaatttaatgccttataaatttctatataaaaaaaggaaggattaaaattaagaatgttggaccatcctggccaacatggtgaaatcccgcctctgctaaaaatacaaaaaaa

SEQ ID NO: 750185 - DNA, 680 bp, Homo sapiens
ataaatcacttaagcagtacctgtattgtttacttacataagctgataatccctttaaaaaaaaaacaaaacagtgattgagtatctgtcacttgtagctaatacaggtacccaaggagtaaattcagttgctggtgaaatcaaacttcaagtctctgtccagggtgaacctaaggaccagtcagtttgcaagaaaaggcaatatgtaacctgttgtcacaagctctgtttctcttctcttattctccctttattagagttcatggtaggatcagtcaggctcctggtacagagcagatattgaaaaaaatatttagtcaacaaatgaatgaataacttaatgccttgtgtattattgattgctgtgaaaccaattaccccccaaactcagtggcttaacaataaacattaattmattttcacagttctgtggccaggaatttggcagctacttgtctgggcagttcttggtggagtctcacatgagactgagtcagaagtaagccagggctgcagtcatctgaagccttgactggggctggaggatttgcttccaagatggtgcactcccatggctggcaagttggtgctgcctgttgatgacagtcctcagttcctctccacatgggtctctccacagtgttcatcagtgacttgcagcatggtgactggatccacct

SEQ ID NO: 750186 - DNA, 545 bp, Homo sapiens
acagggtctcactctgttgcccaggctggagtacagtggtgtgatcatagctagctgcagccttgaactcctgggctcaagtgatcctcctgccttagcctcccacagtgctggaattacaggcatgaactactgtgtccagcctcaaaagatacatattttaaaggtagtgttacttttcctaaaagggtaagttctggtgactcacatccaacatactaatatccactgaattttcaatgatgtagaaggtaccacacaaaagtctattttctacttatgggaagaaacaattgacaatatgaacttgtaattgagacagmatttctgagacgtgctccaaatgtacagggaattagtgtcaatgcttctatgtgtccctagctacaaactctttgctccaaggtcagaatgcaaagtgcaaaatatttcaatggtaaatgcaagaactgcaagaccaagtagcagcacataggaataacatagttctggtgcaggagttgtgattggtatgatgatatttgttgagaagggaaggaaagaag

SEQ ID NO: 750187 - DNA, 620 bp, Homo sapiens
agcttcagctgcttttctacagtattttgtctttccaaaacgggaagggtcagctctcagtcatgtagtggtctctctagaacagcttcttcaacctttgagcattactgcttcccccatccactaaggagccttttagacatttttttttttaatgttaaccttgtgatggttaattttatgtgtcaacttgactgagccacaatgtgcctaaacatttggtcaaatgttattctgggtgtttctatgagggtctatttggataagattaacatttaaatctgtagactaagaaaagcagattgtcttccctaatgtgggtggcctcatccaatcggtgaaggcctcaactgaacaaaaaagctaaccctacccgcagcaagagagamgtctcctgcctgaagtcctttaaactgggactttggctcttcctggttctactgtaggctgtgggccttcaaacttgaactgggacagcagctttgtgaatttggggcttgctaccctccatgatgagccaatcaattccttataataaatgtccctcactctctctctccgtatgtgagatatttcgcattctttttcacactaaaagtcttcaaaatacagtatgttat

SEQ ID NO: 750188 - DNA, 611 bp, Homo sapiens
ccaggacttgtgcttagcactttacttgcattatcccctttaatcctcactgcaacccaaccaagaaagaaagtaacatttaagaggtataatgactggcctgggttcccttatttcttgtcaaggccagaatttaaatacaggaaacttgaaaaggaggccaacttgactagcatacacagtctgattagctgcagagatgagaaaaagtggatgaggtaaagagagaaattgaagatgacaccaccatttctagacaatatgccaggaaaaaaggaatgattattaaccataatacaagttattgcctaatctcacctatttcttggtgagaacaaatatttccatttatatcatgtgaaatttaggatactgatgggtctcttgttgaaaaygatacttagaaatgcaaatccgtgtatcagaagataggtcaagccccaaaataaagatctgggggtcattagcactcaggagctaagtgtaaccagaaaacaggtcaaaatcatttaaggagagaatgcagaagaggataagaccactgataatacttgaaactaccttttgcttaaagacagaataacaaagagaagtaaagtaattgacagaga

SEQ ID NO: 750189 - DNA, 544 bp, Homo sapiens
tatggagactccagagaagtctggcttcatttgagttttggacaaagacctgggaagatcttttttttttcacatttttctgtcattctcacatgcttataaccaaaaccactcttaaacgaatatgtgtttttccttgctagtaagggagaaagtgaagaggcattcctgctttgcatgtactttctgtgtcctcctcagtattttccatcctcttgttgaacagaatagattgcctccagataacatttgtttcattctgtgattttaatagcaatgaagcaacttgttttgcaggccctgaatccaaaattgagacatagcaatctggacaaataccaaagcttaattaagtctgctatcctggtgataaatatggactaaaaaattattctagkagatagagtacatataacattacattcttctctgtcagatgcctcatcagcacagaccacagtgagatacaacctcatacacatacagttttagtaccttaatcatattcataaaattatagatatggatggtttctcccaaggtt

SEQ ID NO: 750190 - DNA, 571 bp, Homo sapiens
tgtgtaactcaaaacttaaattccgggagcacaaaagctgcttcagagttgtagagaatatagattgctcacctcctcctcataaaagtcatccctctcctccctgtccctttgcatccagaaatagtactctgattcctttgagtaattccctctcttccactttcagccaacatggcttggatggggttgacacaagtcctgctctaaggatacatctggattgccttaaaccagccagcctgttttctctcttggattggtttggggattagagtcagtgtgaagaggggttagctggtgtttctagggaaaggaaggtttctttctctactattgtaattggcagagtatgagtgtgaagcctgcatctgtagccaccttaaagctctgagggacatgatagaaattcacagtgcttgaaatggraccaacccccaggaagcaaagccaagagccagatgctactgtcactgtttgaagcctgaatcaagccacacctgaaggcagctgtacctgtgtacttttgagttttatgggccaattaatttctctttttaccttaatccat

SEQ ID NO: 750191 - DNA, 639 bp, Homo sapiens
tgtcttttggttatttaaccttctactgactgaatttcacatctctttgaactatttttagatatcagtaataatctgtgtagattggatcagaactatatcctacaaataatacattggcgatttgggtattctctagttaaattgctagtatgttcataactaaagtgagttttaaatgggctttgtagttgttgtttaaagacagatatttaaacaaaggctctgggtgtaataacaatgatgctaccttcagtgcacggcaggcctttcatccatggagcataaaatgcctcacttatgccatcagaggtgggaatgtggatgtgtaaacaactttccacttggtcgggatgtcatccagctatggaaggaccatcttttccgtaataaaatcttcagaggatragacttaaagagatcagagggagaaaaattatttctttatgaggattttttctttattccctgttgtaatcttccaaataagaataatcaaatagatcactttttattagggagataatagctaattagctaaaaaatagatagatatacacatgaaactagagaagtccctgcaccaaatccatgtaaaggctctactctttcctatattttgacatgattgtatatcta

SEQ ID NO: 750192 - DNA, 619 bp, Homo sapiens
tggctttttttcctctctctatatatgttttgctctacgtgatggctttcagagtggtacatgttactgcatacgggaatacttcattcttttgattactattagtaaggattatggggttaactttgggttattatgaacacaactgttaagacttttaaaacttatcttttggtggcagaaccactcatttctgttaggcatatacctagagcttgatttcctgtttcatatgtctacacattcaggttaagtagacactgccaaatagttttttaaagtagttacataaatttagatactcactagcagcatctgagaattccagttattctgtatctttaccagcctttggtattcgctattctyttaatggtatgaccctggaagtcgaataatacctcattatagaaccaattcacatttccccaatgagtaaagattttgagcaatttttcatttgctcaatttatttatcggcctttgcaagagtcttttttgagaagcatctacgtgtttactttttactattgatttttaaaaataattttacataaaaggaaaggccattctactattgagtgggcttattagcatgtatgacttatattgaacctca

SEQ ID NO: 750193 - DNA, 628 bp, Homo sapiens
ttttacttagaaattatatccacaattgattcaagaaaattttacattgctagaaaagagaaaaattttacaaattatgttgttagtaaataagtttggtatagtagtaaacatccttatcttcaagaaaaaagggttattgagagttttgtaggttatgaaattataggttgaaataakgtaaaaaaatgaatagctgatgtgaaatttacatatagggaaaatgtggtttaatgtacaataaggagtcatttttcttttttgagctgtcaggtgtattggaaatcaactagctcagctaacatcactttagagatgaagcaactggagattataaaaatcagtggcaagattgggatgcagtccttttgacttttatttttgctgcacaagctgccgtgaaatttgacaaccattttgtattgcttctatttggtggaatcccttaattcctaatacaacaatttaattacagttatttctttatcagtatttttccagctaattcaatttaaactttattaatgaaagtttatccacttaggtagataaatattaaaataaaataaatatgtgacctaattactgcattatctctctctttacaagtaaataaaatgtttatcca

SEQ ID NO: 750194 - DNA, 530 bp, Homo sapiens
gtgaatgatttgatccttaactaggggtgggacacaaaatattccaataaagattatcgcaaaattctcttaattcagtgctgatttcctcttcagatggcattgttagttatgacaggatcagtcttctagcctcagaaaccaacaaaacccaaaacttctattatattttatccagaagkggatattatagaatatacagtaaattgagataataaagcaagaaagctacaataaagataagctatgataaagataaagctatgattaagataatataaataagaaaattatatctctcatgtcaagaaacataacagatactttccttggaaagtgggcaccaaatcatcagtcagctcagctctggaataggaaacagggagatgtggcccagaattcaatgactgtgcaggtggcagacaactcgacacccccatgaaatcagaaagacaagggaaaagaagaggagaaaataatacatttataaaataacaataacaaatcataactgtataattacatattca

SEQ ID NO: 750195 - DNA, 530 bp, Homo sapiens
gtgaatgatttgatccttaactaggggtgggacacaaaatattccaataaagattatcgcaaaattctcttaattcagtgctgatttcctcttcagatggcattgttagttatgacaggatcagtcttctagcctcagaaaccaacaaaacccaaaacttctattatattttatccagaagtggatattatagaatatacagkaaattgagataataaagcaagaaagctacaataaagataagctatgataaagataaagctatgattaagataatataaataagaaaattatatctctcatgtcaagaaacataacagatactttccttggaaagtgggcaccaaatcatcagtcagctcagctctggaataggaaacagggagatgtggcccagaattcaatgactgtgcaggtggcagacaactcgacacccccatgaaatcagaaagacaagggaaaagaagaggagaaaataatacatttataaaataacaataacaaatcataactgtataattacatattca

SEQ ID NO: 750196 - DNA, 530 bp, Homo sapiens
gtgaatgatttgatccttaactaggggtgggacacaaaatattccaataaagattatcgcaaaattctcttaattcagtgctgatttcctcttcagatggcattgttagttatgacaggatcagtcttctagcctcagaaaccaacaaaacccaaaacttctattatattttatccagaagtggatattatagaatatacagtaaattgagataataaagcaagaaagctacaataaagataagctatgataaagataaagctatgattaagataatataaataagaaaattatatctctcatgtcaagaaacataacagatactttccttggaaagtgggcaccaaatcatcagtcasctcagctctggaataggaaacagggagatgtggcccagaattcaatgactgtgcaggtggcagacaactcgacacccccatgaaatcagaaagacaagggaaaagaagaggagaaaataatacatttataaaataacaataacaaatcataactgtataattacatattca

SEQ ID NO: 750197 - DNA, 654 bp, Homo sapiens
gtattaaagtcttatgggaccaccattgtatatacagttcattgttgatcaaaagtccattatgcaatgcataactgtataccacagtttctttattcatttgtccgctgatggatacctaggttgtttttatatcttggctattgtgaataatgctgcaatgaacatgaaagcgcagacatctttatgaagttgtgatttcacttccttttggtatgtacccagaataaggattgctgggtcatatggcagttctaattttatttatttaggaacctccatactattttccttaatagctgcaccaatttacattcccaccagtggtatacaagagttcccgtttctccatatcctcaccaacacttgttaytgcttgtctttttgaaaatagctatccttatgggtgtgtggatttgatttgcatttccttgataatgaataatagtgagcatcttttcatgtacctgttgaccatttctatgtcgtctttggaaaaatgtctatttaagttctttgcccattttaaaatttggttatatattgtctattgagttgcatgtgttctttataaatcatgactattaacctcattttacttatggtttacaaatatttctcttcaaatatataggttgccctttcatttttttg

SEQ ID NO: 750198 - DNA, 522 bp, Homo sapiens
ctttccatgtttagtgcttccttcaagagctcttgtagggcaggcctggtggtgacaagatctctcagcattttcttgtctgtaaaggattttactttccttcacttatgaagcttagtttggctggatatgaaattctgggttgaaattcttttctttaggaatgttgaatattggccctcaatctcttctggcttgtagggtttctgccaagagatcagctgttagtctgatggrcttccctttgtgggtaacccgacctttcactcaaacttcccttaacattttttccttctcttcaacctttgtaattctgacaattatgtgtcttgaggttgctcttcttgaggagtatctttgtggtgttctcagtatttcctgaatttgaatgttagcctgccctgttatgttggggtagttttcctggaaaatatcctgaagagtgttttctaacttggttcctttctccccatcactttcaggtacaccagtcaaatgtagattttgtcttctcacatatcc

SEQ ID NO: 750199 - DNA, 627 bp, Homo sapiens
tcatgcattggaagatacaatatcataaaaatgtttctacaagccaaagcaatctacagactcagtgctatttctatcaaattaccacatggtttttattcacagaattagagaaaactattctaaaacttatatgaaaccaaaaaagaatacaaatagccaaagcaattttaaaagaacaaaattggaggcatcacattacctgacttcgaactatactataagactacagtaaccaaaacagcatggtactggtaccaaaataagcagatggaacaatggaatagagtrgagaaccagaaataaactgatcttcaacaaactacacaaaaataaacaatcgaggaaggatttcttatgtaataaatgtttctgagaaaagtagctaaccataagcagaataatgaaacaatttctacgtttcttccatatagaaaaattaactctacatggattaaagacttaacaataaaccctcaaactataaaaatcctagaagtaaacctatgaaatacccttctttttatttatttcttacttttttttttttttttatagacactgggtctcacaatgttgtctagcctgggcttgaacttctgggctcaggtaatccaccggcctcag

SEQ ID NO: 750200 - DNA, 603 bp, Homo sapiens
tctgttgtcatgttttcgaagttcttaataatttcatctttgaacttgtgttaaaaatccaataggacaatggagtatgcacataagcagagtagatacacataatatgtatctactattccttgccaccccaggtatatatagtgtttgtaatgctccatgagtgaggaattccagtacacctacaatgtgtgggagttcagcaaggctcaaactgagtgcaaggtaagtgatttatgtgtaaaaccaagtgggagtactgacaaccttaagaggytatactttccttttaaatcagaacttcctttgaatgcaaaaaaagcaattatgttctaagaaacacgaatgaccaaggaactctatcgtattctattttactcatgctacttccctatattagccaactactattgctaaatatgatgatttaaaaggaaagggaaagatagggccacccgtagtagttactcctttcagtcctttcatcagtgaactgaaagtagagactgttggtagaatgtggacatatcaaaaagtgaaatagaaaatacttgaattagctttgtgcagcatttccattcttctggtaagcagaaaatacat

SEQ ID NO: 750201 - DNA, 633 bp, Homo sapiens
aggttgctccttctggcaggcaataagtcttcaaataaggaaagtagaatagatggtgttccagaggccatttggcaaaactgggtaactaatgggaaatgggttgagagtgagccaggggaggatacttaggttaacatccatgttttgaagagtctgagatacataataataaaaatctrtgtgatagttaaaataactaatgtcatcgagcacctgctatttgcctggtgcaagactgaatttttaatcatcaagctttgaaatttggtacaattagtgtccccattttacagatgataaaactgaggctcaaaggagtcacacagcccaagattacacaggaatggagcagagctggacaccacaggaatgacaagacaagtaagacataattgctatccttggtgtgacacttaaggaatctctctgtggatgaccagcactttagagtacacaaaacacctttaaatatgttattttagttaatccccacatagtattgtataggaggcattgccatcatcatcttacacatgatgaaactgagatctaaatggaaggagttgctttctaagatcagacagtaattagatgacgcatctaatttaaatgataaatccgagcagtttg

SEQ ID NO: 750202 - DNA, 658 bp, Homo sapiens
aactgaggctcaaaggagtcacacagcccaagattacacaggaatggagcagagctggacaccacaggaatgacaagacaagtaagacataattgctatccttggtgtgacacttaaggaatctctctgtggatgaccagcactttagagtacacaaaacacctttaaatatgttattttagttaatccccacatagtattgtataggaggcattgccatcatcatcttacacatgatgaaactgagatctaaayggaaggagttgctttctaagatcagacagtaattagatgacgcatctaatttaaatgataaatccgagcagtttgcagaacattacaacttctttacaaatgccatgagtgagatactgctgctactcacactggtgtaagtcccaagtcattcatgggaaaagagtgcagatgatacagtttagattctgggatcagactgcttattatattggcacctcatttctgctataagaccttggacaagttacttattctcctaggtatgttttcttatccaagaaatgggaataataatggcatattttgctatttttataaggcttctgtgataatttttaagagataattcatgcaacatgcctggagcctagtaaaattcaattaatgttagtagtaataa

SEQ ID NO: 750203 - DNA, 578 bp, Homo sapiens
agctgggtcattcctggtctaatctgggaaatgtatctcttaaggctgtggatcagaatgccagcctcccagttgtcaccagggagcatcatttacagccactgaggtccgagggcaaagcatcagaatcacttaatgtggacacagcagcctagctagcttcataaattctgttgcaaagagcaataatcaatatttcatgtttaatgatgcagagttaaaattactatagattttatgtcttctacttttccaaattatgcaaacattagtaaccccttttttagtgcccttattacacttccattaaaaaacrgatggaggggagcaggtgaggaagcctggtaatatataatgaaattattgaatggtcaaaagcatcaaaagtgattttggtttttaatttttgttaaatagttgcccttaggttaatatataattatttccaagacacaaaaacctgatttatgtaagtggcacaggttttgtcacccacagctacacagtgaagtaaattgcagattgttttcacattttaagttaacttaaatgctctgggatatgttgggattaaatga

SEQ ID NO: 750204 - DNA, 621 bp, Homo sapiens
tctgtcctaggaatagaaatgtacattaaattttaattatcagctagtttatttacataaaactgaacaaatcttgcatagtgagtacacgtgagattgtattatctaatgcaattcaatttcatatccatgacgatttacaaatatgcatattcaacatatgtctgagaaaaaagtggattttyaatgtatttatgtgatttgtgttaatagaaatgtttagggtcgtcttaaacttcacattgtacattgaattatgagagttactgtgtagtaagtatgctacacttgtaaaaatatttccctttaaaggagcttaaacatactgggagattcccagagagacaaaaacacctataaaatttagagagtgatatgatgaagcactcattttttaaaaactgaattcactatatttcagatttttttaattcaaaatggaatcattcatcattgaatatcttttttctctacactacctttaaaacaaactaaatatttcatttgtttctgtagttagggataggttagaataaatatgacaatagcgccaatgattgaataagtactatgaattagtactatgttattattttactgttataaatgtgccagttttga

SEQ ID NO: 750205 - DNA, 621 bp, Homo sapiens
tctgtcctaggaatagaaatgtacattaaattttaattatcagctagtttatttacataaaactgaacaaatcttgcatagtgagtacacgtgagattgtattatctaatgcaattcaatttcatatccatgacgatttacaaatatgcatattcaacatatgtctgagaaaaaagtggatttttaatgtatttatgtgatttgtgttwatagaaatgtttagggtcgtcttaaacttcacattgtacattgaattatgagagttactgtgtagtaagtatgctacacttgtaaaaatatttccctttaaaggagcttaaacatactgggagattcccagagagacaaaaacacctataaaatttagagagtgatatgatgaagcactcattttttaaaaactgaattcactatatttcagatttttttaattcaaaatggaatcattcatcattgaatatcttttttctctacactacctttaaaacaaactaaatatttcatttgtttctgtagttagggataggttagaataaatatgacaatagcgccaatgattgaataagtactatgaattagtactatgttattattttactgttataaatgtgccagttttga

SEQ ID NO: 750206 - DNA, 621 bp, Homo sapiens
tctgtcctaggaatagaaatgtacattaaattttaattatcagctagtttatttacataaaactgaacaaatcttgcatagtgagtacacgtgagattgtattatctaatgcaattcaatttcatatccatgacgatttacaaatatgcatattcaacatatgtctgagaaaaaagtggatttttaatgtatttatgtgatttgtgttaatagaaatgtttagggtcgtcttaaacttcacattgtacattgaattatgagagttactgtgtagtaagtatgctacacttgtaaaaatatttccctttaaaggagcttaaacatactgggagattcccagagagacaaaaacacctataaaatttagagagtgatatgatgaagcactcattttttaaaaactgaattcactatatttcagatttttttaattcaaaatggaatcrttcatcattgaatatcttttttctctacactacctttaaaacaaactaaatatttcatttgtttctgtagttagggataggttagaataaatatgacaatagcgccaatgattgaataagtactatgaattagtactatgttattattttactgttataaatgtgccagttttga

SEQ ID NO: 750207 - DNA, 629 bp, Homo sapiens
tttcacagtttcaacattttcttacctctgattccctttaaaaccacactcataaattcctgacacagtcttaaatactttcttttccacatcctcacaccctctttaattcctggtaccatatgatgctttagacaaatcttcatgaatctttactcatcacatctgagaggcttagattgtttaaagtcattgagattcccaaagttcttttcctagcctccatgttttcttttcagggattctcttccttgttaaactgtaaaatcagtgcaattacgtgtaactcaaaaaagttatgctcartaaataacattctctaggtaatgttaattgcacagtttctggtatacatagtgcatttgtagaggatattaactgtcattattgttgcagatattattaatagtaataattcttggaattatttctgaagctccactgtctttctaaagttccaaatatgcatttctggtttttgcttaccgcacctgaagatgtatttgtgagtcaaacttactaaaaacagctatatataaattgtcaacagttatgtgctcaccaattttgagacttctttccattccttatatggtcttgtacctttctctttgtttccttttgattac

SEQ ID NO: 750208 - DNA, 609 bp, Homo sapiens
agaagtgtaagacctgcacaatgaaaatcagaaggcattacacaaataaactgaaggtcatctaaataaatggatagtcatggcaatttcctgactttaatgactcaattttattaaaatggcaatttaacccaaatagaaaaatacattcaaaacagtacctataaataaccaaagaatgtaaagaatcatagtaatttacaaactgatgctgaaatttactcagacatgtaaaggaattaaaatacccatagtgatatggtttggctgtgttcccacccaaatctcaacttgaattgtatctcccagaattcccacatgtagtrggagggactcagtgggaggtaattgattcatgggggccagtctttcccaagatattctcgtgatagagtaagtctcatgagatctgatgagtttatcagtgatttccacttttgcttcttcctcattctctcttgctgtcaccatttaagaagtgcctttcatcctccgccataattatgagacctccccagccatgtggaactgcaagtcaaattaaacctccttttttccccagtctcaggtatgtctttatcagcagcatgaaaatggactaatacacct

SEQ ID NO: 750209 - DNA, 572 bp, Homo sapiens
acactgccttgattacagaagacttataagtctcaaaatcatatagtgtcagtctactcactttgttcttttccttcaatattgagttggctatcctggatattttacctcttcacataaattttaggatcagtctgtctacatccacaaaataatttgctgggagtttaatcaggattgtattgaaactacagatcaagatcttgggaagcactgatgtcttaacatatatgagtctacttatttatggacatgacatatcgttccatttatttagttcttctttgatattagttcatttctaraacgtcttttagttggaattatagagtatgtagcattttcaaactggcttcattaacttagcaatatgctttacattttctccatgtctttcaagccttaaagctcatttctaaataatattcgacgatatgtttatcagtgagtagcacatttaagttccctgccagcccatggaattttttaaatcctatataagcagaggggatattctatcctattggtactataaagcctgcctccaaaagtctctgatagctcactctgat

SEQ ID NO: 750210 - DNA, 613 bp, Homo sapiens
ctctgaactgctttctaaattcacagattgaaaatctaaaacccacagagttcaaagaccttactcaaagtcaaagagctagtgggtggtcaagcttacattaattctagatttgtctagattgatggattctgcattctaccatctaagattaaaatttgactggaagaatactctagatgttcagtcaaaagctaaaggttaaaatttgcatgaaataactcatgaattctatttccattgtttcaactgaaaattatttgcaaaataaatgtgcgtgtacattayaaatttgattggcaatattgatttaaaacggaggttatcaatattttttaagtacaaggtgtcagaattgtattgaactcctaaaagaataaacccaaaataagttttaaaatatgaccaaaatttgatattaaaatcacagaaaagagtaatagaaccctggattgagaataaaaatgactgtattctgccttagaatgtactcctttaaatgaacagtaattccttgaagaagtctctgtgcatatctaaatttaattttcttcattgcacactaaggtatttgaatttaataatatctgtgattcttcctaacactgtgttc

SEQ ID NO: 750211 - DNA, 560 bp, Homo sapiens
atttctctaagtttattttgattttatttcatctatgtttagtacttttgactatatctttcttgcctataaatattttaatattactgttacatattttcatacatatgttgcaaacataatatataaaatatatatccccatataattacaaaaacaaattcaattttgtaaatataattttatatatttactttgtatcctgcaaactgctaaacttattattagtcttgataacatttttgtcatttttgatatttattttagatagacaaataatatgcaaatagagacagctttattatttttaaaaaatctgtatgacatttattgatttttcttatcctattgcactgactagggccttcagtacaatagtaaatagatatgtctttgttccctgtataagaraaaaccttttagtctttctacattaaatattttagacataagcttaatgtgagtttctcaacctttgtcaagtagaggaagtactactttcttctcagtttgctgagagtcagcctgtctctgtgtgtgcgtgtgtttatatgacgatg

SEQ ID NO: 750212 - DNA, 614 bp, Homo sapiens
aatgaacccctttgagcagatatagtgaaatggattctcccttacagcctccagaagggaatgaagatctgccaagacctttattttaacccaggtgggacctatccgggagttctaacctacacaaatctaagataaaaatttgtgtgttagaccactaagtctctggtaattttctacagcagcagtagaaaactaatatactaattttgtaatagtggaaaacatccactaagtcatagtatataactcatttcatatgttgctagatttaatttgctaacattytgttgaaagtttttgtgtctatgtgtctatatctataagggaccttggcccacagtgttctattcctatgaaggtctttgttgttagttcttaggattttactgcatcaaaggatgaattggcaagtattgtcttctcctaatgtttgaaaaagtctgtgaaagactgacaataatgctttttatgaatttttgtttgttaggtacaccagcttagctatctgggtctgggctttctgtgtgtgtgtgtgtgtgtgtgtgtgtgtgtgtgtgtgtggatgaaggaagtttttaaatttctaatttaatttttctgcttcttatagg

SEQ ID NO: 750213 - DNA, 607 bp, Homo sapiens
tagagaaggacttggttggacaagggagggaacaaggggtatgactaactaggctggaatctcagctagggtattaaaatgtaataaaaatctaaataagccacattcattttggacatcaggcaaatccttcccagcatctgagggtagaactgaaaggctctaaatagccttaaagcttcacagagacaayagcaattgctagtactatgaaaataggacttacagggtcttggaattaatagtagctatgatcttaattctcaggcaccttctctatgtattctctttcacccactgccttcttaatcacactgggcttttgtctctttgcattattttcaaatccaaggtgtggttttgccattctcctactagatctgacattattctccattttattcattctgttttgctttctaggacattttacggcccgcttctcctcaaagctgtcccttctaactcctttttgccacatcactagccagattaatcttcttgaaacaactttgatcaaatctcccaccttctccaaagcctttagggaacaaaaatatttctgctgcaaaaaggaatcccagagcttccctatcaaggccctcca

SEQ ID NO: 750214 - DNA, 623 bp, Homo sapiens
gtgcagttttgttacataggtatacacataccatggtggtttcctgcacccatcaacccatcacctacattaggtatttctcctaatgttatcccttccctagcaccccagcccccaacaggccccagagtgtgatgctcccctccctatgtccatgtgttctcattgttcaactcccacttacgagtgagaacatgcagtgattggttttcttgtcatagtttgctgagaatgatggtttgcagtttcctccatgaccctgcaaaggacatgaactcatctttttatggctgcatagtwctccatggtgtatatgtgccacattttctttatccagtatattattgatggacatttgggttggttccaagtctttgctattgtgaatagtgctgcaataaacatacgtgtgcatgtgtctttatagtagaatgatttataatcctttgggtatatacccagtaatgggattgctgggtcaaatggtatttctagttctagatccttaaggaatcaccacagtcttccacaatagttgaacaacactcctaccgagtgttgtaagtgtccctatttctccacatcctctctagcatctgttgtttcctgactttttaatgatt

SEQ ID NO: 750215 - DNA, 613 bp, Homo sapiens
ttcttaaatagggagtcttttcctcattgcttgtttctgtcaggtttgtcaaagatcagatggttgtagatacgtggtgttatttcttaggtctctgttctgttccactggtctatgtatctgttttggtaccagtaccatgctgttttggttactgtacccttatagtatagtttgcagtcaggtagcatgatgcctccagctttgttcttcttgcacaggactgtcatggctatatgggctcttttttggttccatataaattttaaagtagttttttccarttatgtgaagaaagtcagtggcagcttcatggggatagctttgaatctataaattactttgggcagtatggccattttcatgatattgattcttcctatccatgagcatggaatgcttttccatttgtttgtgtcctctgttattttcttgagcagtggtttgtagttctccttgaagaggtccttcatatcccttgtaagttgtattcctaggtattttattatctttgtagcaattgcgaatgtgagttcactcattatttggctctctgttagtctgttattggtgtataggaatgcttgtgatttttgcacattgattttgtatc

SEQ ID NO: 750216 - DNA, 623 bp, Homo sapiens
gaatgccatgtgaagactggagttatgctgcacaagccaaggcacaccagattgccaaaaagagtgccagaagttaggcaagaggcctggaacagatcctttcctagcactttagaagaaacatggccctgccaacactttgatcttggacttccaggctctagaactgtgacaccataaatttctattgtttaagccactcagtttgtggtacttggttctaacagccctagcaagctaatacacacattttccactctctcttgatctcatagtaatcaaggttttgtccctctcattcattgtcactatcctatcaattaaatggtcaatctcaattatcccagcatttcagcagtatctgacacaactgatgattcttctggaaacaattcatttgcttcttgtatcaactaycatggctttcctccttccttacttttggctcttggtcacttggttgagtctacctcatctcagtcctcagctcatttctcttttccgtcttacttcattccttaggtgatcaaaactaattgcatggctccttaataactctcctagtccctctctgtgtctcaccacactttgattttcttcataacacttatcactactgatca

SEQ ID NO: 750217 - DNA, 588 bp, Homo sapiens
catctgacaaagggctaatacccagaatctagaagcaactcaaacaaatcaacaagaataaaacaaacaatcccatcaaaaagtgggctaaggtcatgaatagacaattctcaaaagaagatattcaaatggccaacgaatacatgaaaaaaatgctcaacatcactaatgatcagggaaatgtaaatcaaaaccacaacgtgataccaccttagtcctgcaaaaatgaccataataaaaaaatcaaaaagtaatagatgttggcgtagatgtggttaaaagggaacacttctacactgctggyaggaatgtaaaactagtaaaaccactatggaaaacagtgtggagattccttaaagaaataaaagcagaattaccatttgatccagcaatcctactactgggtatctacccagaggaaaagaagtcattatatgaaaaagatacttgcacacgcatgtttatggcaacacaattcacaactgcaaaaatatgaaaccagcccaaatgcctatcagtcaatgaggggataaagacattgtggtatatatacacaacagaatatttctcagccataaaaggcaatga

SEQ ID NO: 750218 - DNA, 600 bp, Homo sapiens
ttgcattatttggagaagaaatccagaaaacttttccatattcacatccattccatctctctccaatatatttaaagaatactgaaactatttttaaacttcactctgctcattcacatgaacaacatttacaacttccccattcatgtacaaaaacaggtctgtggacaaataacataaagttgcaaatgtgttcctactattttatgaaagaaaggtctttttgtaattgaaaatagattcctttcaaaatctgcaaagggcccccatagtctgctctaaaaatgttattgtctaaaccatttctgggactaattattacattatttactatgattasgaatctcatggaggctgaagcaaaaataaaaatgactttagaagcctaaattttgagaggttatatcaaaattgacaggaacaaggatgcaaaaaaaaaaaataaatgagtgaccttctatgaaaaaataaactgtttatcttggcaagcctatttcttatgcattttatcagagcacttcaaaattggtagggaagcaatcatcacactgaggaaaaaacttgcttctctggccaaatatgataagtgatatatttagc

SEQ ID NO: 750219 - DNA, 613 bp, Homo sapiens
aaaacagaaatctaatctgggctatcatatactgcaaagatgattttcctgtctatctgcaacagtctatgaatcatagtttttttcctaataaatgttttgatttcttaaagaagggtagcttgaactcagatggtgaaggctgcagtgagccatgatcatgccactgtactccagcctgagccacagagtgagaccccgtctgaaaataaataaataaaaataaaggctttgatttcacctcctttcaactttttgggtcaacttgccacaaaaagcagtattaaaaaaaatacttttcatgccgggtgcagtggctcatgcctataatcccagcactttgggaggccgaggcgggtggatcacgaggtcaggagatcgagaccatcctggctaacacggtcaaaccccgtctctactaaaaatacaaaaaattagccgggcgtggtggtgrgcatctgtagtcccagctactcgggaggctgaggcaggaaaatggcgtgaacccgggaggcggcgcttgcaatgagccaagatcgtgctgctgcactccagcctgggcaacagagcgacactctgtctcataaaaaaaaaaaaaaaaaaaaaattctca

SEQ ID NO: 750220 - DNA, 651 bp, Homo sapiens
ttttttaaaaatcacctgtgaaagtaataaacctaaaaatttcatccaattcaaatcagactatatttacttcagattaaacatgattttattaacattctagacagctaagaccctaaaagaagaaattgacagtttatatttttaccatcaggcataggttattttatatatgtgtgtatatatcattaattcttggagcaactcatgctatataagattatctctctgtctctctgtctctctctctctctctctctctctctctctctctatatatatatatatatatatacacacatacataacatgagtcagctaaaggcctattttctaaaagaagggtcagatgacaaagctcactgactttaaaaagctttcacagcacaatatttttgataaaaaggtktagtctattctttaattcacctaaagatacatttagcaaaaaagaaaaagaagaaaaaaatgccattgagagtcaaaagaaaatatcgtgtcaactaaaagtaaaagcaaaaataaaagaaaaaatctcagtactcactgaatactactataaacatcaaaaaatttccatttaaagtcaccagaaacccttgggttcctaatacaatttcatccaattcaaatcagactatatttacttca

SEQ ID NO: 750221 - DNA, 639 bp, Homo sapiens
ctgaggaaaatcataggaagaaaatatataggtttgagtgacctgggccatatttttggggcccaatggttcagcaaatctaaagattttcatatagaaacacaaaacatttggaaaatgagagtagataaggatttgtgtttcagaagggcagcttacacctctgagttcagggatgaaaggttcttcaggacagagggtgctgtactttctctaatttcccacccagactccctccttcctacaaacatagcaggcacgacctgggttttgatctgaaaagcatcacacaggcttgtggcccagaaatgtctgtctaatcttcctgacatttcatgcttctgtggctttcctttggctctggaagaattgggaactgtgagacagcccaccygaagggctaagtccctgagagggaaccccttaatctgttagccctctgccattttgggacagatttcttatcaaccctggcagctagccgagataatcaaggcaggtaaggaggcagtgcctggataatggaatgggagagggttaatgagatctgataggacatcgggaggggggcatgtggatgctgtttcacatgccagaggccaggtctgctggtctgcttacttcctttatccttctgat

SEQ ID NO: 750222 - DNA, 624 bp, Homo sapiens
caactagaattgtcacaattcttggaggatgtgtaattttattggagtgttgcaaagcttttgaaaataaaccttaaatcagatgggtgatacatactgggtaaaaaaaactttaaatcagcagcaagagggaactacagggcaaggaatggtatttgtgtagtctataaactggtattttttatagtctcaaatatgtgtgaaataatctctgcatccttaaaatatgcactgtctccctaatgtgactactttgaaagaaaaaracagaggcttctttcaatggaagctccatggaaatgagtggtttcaccatcagccattgttttcagcatcatgcctggttaaatctcacaggagttgacaaacacaaagatggcatgtgcaaattgaaataatacaaacaagcacctgtgcactcatgctttgtaactctctctaattttatctcctccacatgctgcttgtctgtctctgagccttcgtggaaagggaaaaggggaatttttagaatgttcatactctgtgttatttatgtttgtattattacacatttaaaactaagactctaaattatttactgtaacatagaacatggatgggtttttttttccccactcttta

SEQ ID NO: 750223 - DNA, 624 bp, Homo sapiens
caactagaattgtcacaattcttggaggatgtgtaattttattggagtgttgcaaagcttttgaaaataaaccttaaatcagatgggtgatacatactgggtaaaaaaaactttaaatcagcagcaagagggaactacagggcaaggaatggtatttgtgtagtctataaactggtattttttatagtctcaaatatgtgtgaaataatctctgcatccttaaaatatgcactgtctccctaatgtgactactttgaaagaaaaagacagaggcttctttcaatggaagctccatggaaatgagtggtttcaccatcagccattgttttcagcatcatgcctggttaaatctcacaggagttgacaaacacaaagatggcatgtgcaaattgaaataatacaaacaagcacctgtgcactcatgctttgtaactctctctaattttatctcctccacrtgctgcttgtctgtctctgagccttcgtggaaagggaaaaggggaatttttagaatgttcatactctgtgttatttatgtttgtattattacacatttaaaactaagactctaaattatttactgtaacatagaacatggatgggtttttttttccccactcttta

SEQ ID NO: 750224 - DNA, 582 bp, Homo sapiens
  misc_feature 1, 2, 3, 4, 5, 6, 7, 8, 9, 10, 11, 12, 13, 14, 15, 16: n = A,T,C or G
nnnnnnnnnnnnnnnngaattcagtgcacagttaagagaacagaaaatctataggagaggcatctttacacatttttaccagagggaatgacaaaatgaaaattgatgtctcatttgcattgggcatagaaagctaatttaaggaaacmggatgtggttaattcttggaacaattaaatactcttggagagtaggtggtcataatttgaagaattaattcaatatgaaggaattcaatatgaagaataaatttacaatgaggaattctggagtcaggaaaataaagagaactcacaaaattaaagtaacaagaccctggtcataagtaaaggcagaaagattaaacagaaactttgccatgaataaattattctaataggtgctggtgaatgaagagggagtgaaattagtagaatctagtatattaatacttgacttcaaaatttgaagtgtgaatgatggacacaagctggtatactacttgtggagagaataaagctaagaaataaagctaagaaaatgattttagtgttagatgttgtagatggttgtagacggttagatggtgtggacaggactact

SEQ ID NO: 750225 - DNA, 427 bp, Homo sapiens
attcttttttatggctgcgtggtattccatggtctacacataccatgtttgttttatccaatctatcattgatgggcatttgggttgattccatatctttggtattgtgaatagtgcagcaacgaacattgatgcaatcccattamtgagtatatacccagaggaatataaaaatttgtatttcataggcaaaggcttcttttttcctatgagagtgtttggaggggcttcagtaactacaactttttttctatttattgtgagtgccaggcagtgcactaattatctggaaccactattttcccttgtaagactactcagctaatttatggctggtccaagatgtgaatccagatctgttttcaaaacctgtgtaacatctatgcttcaataaccaataaattttccttctcattggcatatcctc

SEQ ID NO: 750226 - DNA, 505 bp, Homo sapiens
gaatataagccctggaactagcaaatccctagaaaaaaactttggagaaatgtttcaggacattggtctgagcaaagatttttttgtgtaagttctctaaagcacgaccaaagcaaaaattgacaagagatcacattaacttaaaaacttctgcacagccaagggcacaatcagaaaatgaagagattacctgtagaatgggagaaaacatttgcaaactattcaaacaggtaacagattaataactagaatatataargaacttaaacaactcaagagcaagagataaaataattaatcaaatttaaaaatggacaaaagatctgaacagacggttctcaaaggaacatatacaaataaatggtcaacaggtatacgaaaaagtgttcagcattactaatcatcagataaatgcaaataaaaaccacaatgagttaaaaaccacaatgagttactatctcacactagttaaatggcttttatcaaattgacaaagaaataatgg

SEQ ID NO: 750227 - DNA, 615 bp, Homo sapiens
tcatctcaaacgaacctgactcttaacagaagatccagaagtaaactctcctagaagtttgtcttcatcatctgtgacacaggcttttctgctcattaattattttgagtgttcatgaataacgtaaaatcactgagcagcaaaattacaagatgtagtcccaaaatttcaattttagatatttcagaaaaaaacatgacttgcaamcttctttactggcaatttcttatctgcagagtgactagattaaagagtacctttggaagttagatataacatatcacattttcctgttaacagcattgtccttagacctgggcagggaggcagctgctttacactccacatatgtggtctgtggcagcaggccacagacatactaaaaggctatgaaataaattaagggcagctataaaattattctaatcaaatccagaacttgaacagttcagatgaaatacctggactgccttagtctttaattaatgaacatttaattatgatcaatataataagaatataaaaaggcaattatttctatcaaattcagatctcagaagcaacaaatgcagctctgatctattagaaagataaaatatattcagaaaattagca

SEQ ID NO: 750228 - DNA, 615 bp, Homo sapiens
tcatctcaaacgaacctgactcttaacagaagatccagaagtaaactctcctagaagtttgtcttcatcatctgtgacacaggcttttctgctcattaattattttgagtgttcatgaataacgtaaaatcactgagcagcaaaattacaagatgtagtcccaaaatttcaattttagatatttcagaaaaaaacatgacttgcaaacttctttactggcaatttcttatctgcagagtgactagattaaagagtacctttggaagttagatataacatatcacattttcctgttaacagcattgtccttagacctgggcagggaggcagctgctttacactccacatatgtggtctgtggcagcaggccacagacatactaaaakgctatgaaataaattaagggcagctataaaattattctaatcaaatccagaacttgaacagttcagatgaaatacctggactgccttagtctttaattaatgaacatttaattatgatcaatataataagaatataaaaaggcaattatttctatcaaattcagatctcagaagcaacaaatgcagctctgatctattagaaagataaaatatattcagaaaattagca

SEQ ID NO: 750229 - DNA, 580 bp, Homo sapiens
gtttgcaggcagcaagctgctagctggaaacgcttaaatagtaaaccagccccagttagaaactggagagagaagacagatccctccgctatccaccatgggcttggcaggcacgatgcacttcacatcctaaactcctctctaaccatctctctctaaatctggctgacctctggggtggcttttggaatcagatgttttggcasatgccaaagtctttagggagacaaatgagatgctttctagctattacagtcccgcctttatcgatcccctctgcctctgaggaattcacccctattattgacgggctgctgacaggctctgaatattctctctctcattctgtctcctctctctgttagcctctgttatcaagctaaaggaatgtccaaggattagtttctttggaattcaatacacacaaccattatccagtggacaagaaataaaaagatgaaacgcaggaaagaagagttgagtatgttctccaacattttctcatgaaagattccaaacatgtaggaaagttgcaagaaagggtttgggttctgagctctatgttttacatagcaaatta

SEQ ID NO: 750230 - DNA, 580 bp, Homo sapiens
gtttgcaggcagcaagctgctagctggaaacgcttaaatagtaaaccagccccagttagaaactggagagagaagacagatccctccgctatccaccatgggcttggcaggcacgatgcacttcacatcctaaactcctctctaaccatctctctctaaatctggctgacctctggggtggcttttggaatcagatgttttggcagatgccaaagtctttagggagacaaatsagatgctttctagctattacagtcccgcctttatcgatcccctctgcctctgaggaattcacccctattattgacgggctgctgacaggctctgaatattctctctctcattctgtctcctctctctgttagcctctgttatcaagctaaaggaatgtccaaggattagtttctttggaattcaatacacacaaccattatccagtggacaagaaataaaaagatgaaacgcaggaaagaagagttgagtatgttctccaacattttctcatgaaagattccaaacatgtaggaaagttgcaagaaagggtttgggttctgagctctatgttttacatagcaaatta

SEQ ID NO: 750231 - DNA, 580 bp, Homo sapiens
gtttgcaggcagcaagctgctagctggaaacgcttaaatagtaaaccagccccagttagaaactggagagagaagacagatccctccgctatccaccatgggcttggcaggcacgatgcacttcacatcctaaactcctctctaaccatctctctctaaatctggctgacctctggggtggcttttggaatcagatgttttggcagatgccaaagtctttagggagacaaatgasatgctttctagctattacagtcccgcctttatcgatcccctctgcctctgaggaattcacccctattattgacgggctgctgacaggctctgaatattctctctctcattctgtctcctctctctgttagcctctgttatcaagctaaaggaatgtccaaggattagtttctttggaattcaatacacacaaccattatccagtggacaagaaataaaaagatgaaacgcaggaaagaagagttgagtatgttctccaacattttctcatgaaagattccaaacatgtaggaaagttgcaagaaagggtttgggttctgagctctatgttttacatagcaaatta

SEQ ID NO: 750232 - DNA, 580 bp, Homo sapiens
gtttgcaggcagcaagctgctagctggaaacgcttaaatagtaaaccagccccagttagaaactggagagagaagacagatccctccgctatccaccatgggcttggcaggcacgatgcacttcacatcctaaactcctctctaaccatctctctctaaatctggctgacctctggggtggcttttggaatcagatgttttggcagatgccaaagtctttagggagacaaatgagatgctttctagctattacagtcccgcctttatcgatcccctctgcctctgaggaattcacccctattattgacgggctgctgacaggctctgaatattctctctctcattctgtctcctctctctgttagcctctgttatcaagctaaaggaatgtccaagsattagtttctttggaattcaatacacacaaccattatccagtggacaagaaataaaaagatgaaacgcaggaaagaagagttgagtatgttctccaacattttctcatgaaagattccaaacatgtaggaaagttgcaagaaagggtttgggttctgagctctatgttttacatagcaaatta

SEQ ID NO: 750233 - DNA, 389 bp, Homo sapiens
aaacaccacatgttctcactcatgggtgggaattgaacaatgagaacacatggacacagggtacagaacatcacacactggggcctgctggggggtggggagatgggggagggatagcattaggggatatacctaatgtaaaggatgagttaacaggtgcagcataccaacatggcacatgtatacataygtaacaaaccttcatgttgtgcacatgtaccctagaacttaaagtgaaaaaaaaaaaacagaaaatctcaatctcaaattctgtgcccattttaaattgtattgtcagtctttttcttactggttttttaaatttaatttgtattttttggatacaagtatttcatcaaatatatatgcatatatgatttgttgttttt

SEQ ID NO: 750234 - DNA, 605 bp, Homo sapiens
ggatgtaggcctgactcaactaattcaatcaggtgtattttgttggacccaaaataccatatatatcttttgaacataaaaagctgtgccatgctaatattctctatcactaaactttctcattcattcattcaatatttctggagtgtttacccaggctagacatacaggatggtgaacaagatcgacatggtaactatactcatgaaacttaggtctacttagtctcaccaataagaaaatatataattaaaaatttaacaagtgctaggaatgaaaataataggatgaggctgggaacggtggctcacacctgtaataccagcactttgggaggccaaggcaggcggactacgaggtcaggarttcaagaccagcctggccaacatggtgaaacccagtgtctactaaaatacaaaaaaaaaaagattagccaggcgtggtggtgcgtgcctgtactcccagctactagggagcctgaggcaggagaattgcttgaacccgggaggcggaggttgcagtgagctgagacggcaccactgcactccgagcaagactctgtctcaaaaaaaaaaacaaaaagaaagaaagaaaataataggatg

SEQ ID NO: 750235 - DNA, 547 bp, Homo sapiens
atgctacgatctcgaatggaataaaaatgtatggaatggaatgcaatgaaacggaatcgaatgtcatagaatgtaatggaatgcaaaaaaatggaatccaaaatcattgactggaaaggctgggtgtcgaaaggaattgactccaatggaatggaatcgaatggaatggaagtgaatagaatcgaactaaatcgaatggaatggaattgataggaacggaatggaaaggaatgcaatgatttggcatggaatggaatcgaatggcatcgaaaggaatggaatggaatgcaatggaatggaatgtattagaatgtaatgaactttaatggaatgtactcgaatggattcgactggaatggaatgttctggaagtgaatgsactccaatggaatggattcgaaaggattggaatcgaaaggaatggaatctaatggaatggaattaaatggaaatgaatcaaattgaatagcacggaattgaattgaatggaatcgaatgcaatggaatctaatgaaacggaaaggaaaggaatggaatggaatggaat

SEQ ID NO: 750236 - DNA, 632 bp, Homo sapiens
ggaatcgaatgaaatggagtcaaaaggaatggaatcgaatggcaagaaatcgaatgtaatggaatcgcaaggaattgatgtgaacggaacggaatggaatggaatccaaaggaatggaatagaatggaatggaatcgaatggaaaggactcgaatggaaatcactcgaatagaatgcaatttaataaaataggatcaaatgtaatggaatggaatggaaaggaatcgaaacgaaaggaatggagacagatggaatggaatggaacagagagcaatggtatagaatggaatggaatcatctggaatggaattgaatggaatggaataatatgaaatggaatggaatggaatggaatggaatgcccttgaattaaatggactggaatggaatggactcgaacagagtggaatggaaagtgttgagatagaatggaatggactcctttggaatggtstagtatgcaatgcaatcgactggcagggaatcaaaaggaatgtaatcgaatggattggactggaatgcaatggactcgaatagattggaaacggaatgcaaaggaatggaatggaatagtatggaatggaatggaaaggaatggagtggaatagactagagtggaatggaatggactg

SEQ ID NO: 750237 - DNA, 470 bp, Homo sapiens
caccctgagtgtatgtcccatcacatcctgccagagaacaaggatcatagtcattactgggagtgtcttcacagtgggtctccagggagcgctgacattgatttactgcatgctgccacctcctaccttttggagcaccagcaaagctctcagtaatgatggttaaggaaattgatttcatcctttccctacccccstttcttggcacagcagagtggaaagatcctaatgggttctggtcccatttgggtgattgtgcagaaaagaaaagggctgcaccacttgtcagagatgagttcagaggtgctgggcacagcacatggtgttttgtgttttagacagtgttttccttagggctcttgggactgtgaggaactcactcaagtttctttagaaaaaagagttttaatgtagagatgtgcagactgaagctgaaaacaagctgcaaggagagagagcccatctctgtg

SEQ ID NO: 750238 - DNA, 590 bp, Homo sapiens
acaaattatttcaataatgttgaaagagacattattggacaattatggaaatctgaatatggacattttattagataatcatgtcagtgataacattttctaagtgggagaagtatattgtggttataggggagaatgtccttaattctttttttttttttttttttttttttttgagacagagtctcactctgtcacccaggctggaatacagtggcatgatctcggctcactacaacctccacctccaaggttcaagcgattctcgtgcctcagccttcctagtgactgggattacaggcaccttccactatgcctggctaatgtwtttatttttagtagagatggggtttcgccatattggccaggctggtctcaaactcctggcctcaagcaatccacctgccttggcctcccaaagtgctgggcttacaggcatgagccaccactcctagccaaatatccttaattcttggagcatgcatatttgaggaaaaatggctctatgtctacatctgttcctcaaatgattcagcaaaaaagaaaatttgtatatatgtacagtgagagaaagccaaatatggcaaatg

SEQ ID NO: 750239 - DNA, 557 bp, Homo sapiens
gcattgaacctacaaattactttgggcagtatggccattttcaagatattgattcttcctaaccatgagcatggaatgtttttccatttgtttgtctcttatttccttgagtggtggtttgtagttctccttaaagaggtccttcaaatcccttgtgagttgtattccttgttattttattctctttgtagcaattgtgtatcggatttcactcatgatttagcactctattactggtgtataggaatgcttgtgaattttgcacattgactttgtatcctgagactatgaggaagttgcttatcagctgaaggagatttggggctgagacaatttggttttctaaatatacaatyatgtcatctgcaaacagagacaatttgacttcctttcttcctatttgaataccgtttatttctttctcttgcctgattaccctggccagaacttccaatactatgatcagagtgaacaggcaacctacagaatgggaggaaatgtttgcaatctgtccacctgaaaaaggcctaatatctagaatctacaaggaacttaaa

SEQ ID NO: 750240 - DNA, 655 bp, Homo sapiens
aatttgcatttgcaatgtatttgttaatctttatgtaataattaatacaatgaagataaacgggcacagctctgtcactctcacagaaacatattaagttcactgtttataggcaaaaataattttaggtctacactaaaaaagcaaaacaaacaaacaaaaagcaaacgaggtggttttcacaggatgacaaactatatttcaaaactgaaaaaaagcaaaatgtttatatctcactcctgaaacaaaaattaacatcaracttaagaaaataaggcagatactagtagtactaagttttcttgaaactgtaaaatatatataaaaatgaaaagataccgaatgtggacagctccacattgatcaacaaatgttaacattctcaatctctttcattgactttaaaaactatgtaatagaaacagaaaatgaactaatacacaaatgaagtacaaatatcataattttcagaaggtttgatttttcgagtaccataaaaaaactgaaatataaatattttggaaatagttctaagaaataaatatgaaaatattttgtttggtatcataacacagaagctatccattttctcaaagtgtaaggattcaattattttatgatttagtttgtggtcatttgtgttatcaatattgcc

SEQ ID NO: 750241 - DNA, 554 bp, Homo sapiens
ttatctttaactaacagttttatgagactttgtaatttccagtgttaccacactggaatgaaaaatgaaaaatttcttttaagggtgtctaccttaaaagaatgtcttttaagagtttctagctcgtgtcttacacttttcaaacactgccagtgcaaagaacataagagaaggtcatttttacctccttctagttctaagagcctatgattccaagaaagtttattataaagcatagatattagtataacccgggaagggaatacttctgtttttttaaaaaaattattacatattttaatcaacattaggcattgctttattgtaaatagcattagatcarattagttgtttcatacaatactataaaaataatgtttatagtcaaaatctgattaatataaagaaagtgaaatttttagaagtattaagtcataggttttctgctaaacctccagaatcaaacagcacaaatatattgaaaaatatacttcaggaagtacttattttatgaagagaagttatttgtctttaaatacaaatactttgaaagt

SEQ ID NO: 750242 - DNA, 611 bp, Homo sapiens
tatgtcttggacatgtgaattgtgctgatgcaaaacgccaattaaagaggcatctccaaacagaatcttcaaagcaaacagagctgttttcttacgctcacacagttatatagcaattaatgttttggtcaacagaccacatatatgacaatggtggtctcataagagtataataccatttttactttgccttttctatgtttagatacacaagtacttaaaattgtgttacaagtgcctacagtattcagtatagtcacatgctgtacagatttgttgcctaggagtgataggctatgctatacagaataggcgtgtagtcagctgtaccatttaggcttgtgtaagtacactctatgatgttcacagaatgacaaaatcacctaatgacgcatttctcagaaaatgtccttgttgttcaataatgcaggactgcatttcatgaccacacatasctttcatggttttagactcttccaggtaagtatttcaaagcaaactttaccaatagcacatacaaaatagtgtatccatttcctagctaaggcaacttggacaaaaggaaattaagaaacattacactaagccaagtaaatgaatgacaacaatac

SEQ ID NO: 750243 - DNA, 646 bp, Homo sapiens
tgtaatttacatgagattctaggcctcagtttcctcaactgtatagggggagaaatagtagaacctaaaggagctaacaaaataaaataacatgtgaaatactttgaatttcagcccagaggaagtcttcggtaaatgttaactgttatttattttgttaaacttgtatatgattgttctgttttgtttatatgtatcttatatgtatataaaatttctagatcatgatgctcatctgaagataaaaagaaaaaaattaaaaacaaaacaaaatgcatgttatatgcaatcacttctcatttttctcggtagtgaatgttccattaagtaaccgtaaacgttgaattagcaaatactgaaccattcctcctagaggaaatacaagttaggttcctgtgaacctctcrtcacaagatttttgtcaacagatcaatataaaacttgttttatgtgtgtttctgtttaaagacaccatgtttattttatatattattggttcaacaacattgaaatcacagacaatagcactgtaactcatgtctaaacaaagcttacctaacacttgtattttgcctccaaggctcatcacagccttctggtactaagaagtgctagacagcactccagtattatactggagagccat

SEQ ID NO: 750244 - DNA, 543 bp, Homo sapiens
aagcttgtggaatgcagcgaaagcagtaaatgcctacattataaaggaaaaaaatccaaatatgcaagctaacattacaccaaaagggtctgaaaaaagaagaacaaaccaagaaaaagtttgtataaggaagctaataaagatcaggccaggaaaaaatagaaattaggaaaacaatggaagagattaataaacctaagagttgttatattttaaaagataagttgatatacctttcactagaaaaaaacagaagactcaaaatcagaaataaaagaggagctattacaactaaagacacagaaataaaaaggttaataaaaagactattaccaattatacaccaacaaattggataayctagaaggaatggataaatttctagatacacataacctactaagactgaattatgaagtagaaaatctgagcagatcaataacaagcaaggagattgaattaataattttaaaaaaatcactcaccaaaaaaagcccaggatccgatggcttcactgctgaattctatgaaacatttaaagaa

SEQ ID NO: 750245 - DNA, 640 bp, Homo sapiens
gctccattgcttttagttactgtggaatttgtcttcgtgtagtttacaaacacttctacaactgcttggctcaggtactgacgactgatgatgtcattcacctggactttcaacataaatacagacactggagagaaaaaggtagaaattgcagcatgtcgtatcctagaatgcatatgtcatagtctttaaatgtcattcaacatatctaaataacagtacaaaactgttgttaaacttaggaactacacataaatacatataataatgaagaattcattattctttgtaaaacgaaataaatttcaatacagttaagtgctccatagcaacatttcagtcaatgatggaccacatatataatcttccagaagattatgatggcrctaaaaaattcccattgcctagtgacgtcatggccatcatagtgttgcagtgcaatgtgttactcacgtgttaatggtaatactggtgtaaacaaacctgtgctgccagttgtatgaaagtatagcatatataattaggtacagcatataaaacttgataatagattacgttactggtttatgaatttactatactttttaatcattattttacaatgcagtccttctacatacaaaaataaaagttaattgta

SEQ ID NO: 750246 - DNA, 530 bp, Homo sapiens
ttcagaggaaggagtattagtagtatcagagggattcttgcctaatgataaaagactcatttcacaaaaagacatggcaattaatatataataaacatatatgtacctagcaacagagattccaaatacacgaagtagatctgatgaaacgacttcacaaaactatttgtttctcatcaggttaaataartattcacttcatcatctagcaatctcactcctgattatttaccctagagaaataaaacttatgttcccatggaaatctgtataggaatgtttatatcaacaccattcgtagtcaccaaaaactggaaacagcgcaaatgttctccactaagtgaatggataaagaaactgtggtatatccgttaagtgaaatatcactcaacaataaagggaatgaactgctgataccccaaataacttggatgaatcttgaatgtattgtgctcaaatggctgcatactgtaacactcctcttatatgtcattcttgaaaaggtcaaaatatagtagtgaaggactcac

SEQ ID NO: 750247 - DNA, 623 bp, Homo sapiens
  misc_feature 517: n = A,T,C or G
tctatgcttacttttataatatttactaaatcttcaggaatagaacagaataaccaggaaaccagatttctactggggggaggtaaatatggatcttaagacatgggtagaacttgagtatatggagaaggcagaaagtgcaggtagtttaagtagaagaaagaaaatgagttaatacagaaatgaaaactgtgacagtaaatgagaccaacagcataattggagttccttggagggtagcatgaaattagattggaaaaaccaagatgcagtcctgctactgaagggtttaagaacatagagtaggtgctttctcaaatagtacagactgtcttgacttgtattttccctgtgcattttagactgtgtatttattgtcattcataaaggaacaatgacttaaacaaaacaagtttyggcagcctatcaaatggtgaattctctgagagcacagtgcatgccttatacattttagtttttccccaatctggaggcaggaagtactgtggaaagccanttattgaacaaggagagagactgacacaaagatttaaaggaagacagaaatttcactgttgactagtctctagcatggcacagaatgaacacagtatgtgaaaagc

SEQ ID NO: 750248 - DNA, 588 bp, Homo sapiens
aaaagaagggaaataaatttactttaaagtgtaaagtttaagatcctatacacgggttgggctatcaatcctttaactgtctggtgaaagtatctcagaataacgttttaaatacatcaaataaaatgtataggattactaaggaaaccagttatatcaaaatacagttatcgaaataattttaraaaacagatttgtaaacagcaatatatgtgcttctttattaatacactaaaattttgaaatgtagtggtgggtctaataaccatcttcatttcaaaataatgatgagtttaaatatttggagatctctccaacaactgcaatacaatataaaaattcttataattactactgctgacaaagtcataaatacttctaatattggtgtgggttggttacttgcattcaaattggaaggaaacatcaactttcagttaggggaaaataaaaataaagaagtaacattttactccaagttgcagaactcacttgggttacaggaatccccaggagatttcttaaaaaaaaaaaaaagacataattacaccctacataatctagtaacagagtctcagcatctggatt

SEQ ID NO: 750249 - DNA, 564 bp, Homo sapiens
gccttgagagactactggaactagagagctagctcagaaaaactcttcattactatatgtataagaagtcagtatatggtcaagcaattacaataaataataatatatttttaaaggttactaaaaatgctaacaagaaaatatttgaaaacataataaagtctcarcatacataatacagctaaataatttggagatgaaataaaaagttaaatatcattaacaaaatttttaagcatatgtaaaagaaagatatgtaagtattttctgaaataagaatgaaaattttaagagtaaaattctctgaaaattttaaagaataatatagaatttttataactacataaatattgtgatacttccctatctaacaaatcctaccatgtagctaaattaaaaaactgaaaaaaattgccacatacataagtgttaaattacttgtgactttcatctataaagatctgcacaacatcattataaaaaacgaaataatgtaaattaaaacatctgttttatttccttgaagtatttaataaattagcaaagataagacagaattagaaa

SEQ ID NO: 750250 - DNA, 643 bp, Homo sapiens
gagtaaaactaaatgtcagcaaatgcctacatatatgctagagaactcatctgataaaatattatataatcattaaaatgaagtttttcctagacacatacaacctaccaagactgaaacatttaacaaagaactaatgctgatctttctcaaaatctttcaaaaaaaattaaaaggagagtgtacttcccagctcattttacaaggccagtattaccctgataccaacaccagagaagaacaatacaagaaaagaaaattacaggccaatatctctgataagcatagatgcaagactcctcaaccaaataccagcaaacaaaattcaacagcctattaaaaggatcattcaccatgatcaactgggatttatcccagtgatgcaaggatgacttaatatatgcaaataaatratataatacaccacatttataggctagaggacaaaaactgtatgatcatcttgatatatgcagagaagacattttataaaattcaacatcttttcatgagaaaaactcaacaaattacatattgaaagaatgtacctcaacataataaaggccatatattacaagcccacatctgacatcatacttagtggagaaaagttgaaatctttcctccagtatcaggaaaaaga

SEQ ID NO: 750251 - DNA, 568 bp, Homo sapiens
ggagctaaatattgagtacacatggatacaaataatagaacaacagatattgtggcctactggagggttgagggtaagagaagggtgaatataaaaaaaactgcctatcaggtactatgcttattacctgggtgatgaagtaatctgtacaccaaacccttgtgacacgcaattgacctatataataaacctgcacatgtacccgtgaaactaaaagttaaaaaaaaaaacagaatcatcaataactcaaatattacaggtaagaagttttaggttgccacacytgttaaaaaactccagtgagctgagcttaaggcagaaaataagaaatccatgaaagggtagtgaaagaacaagctataattatcaacttatgtctggggcaggattaggagctacaatagctatgttttctgctaattatttgccttttttgctcttcctctttcaacttacataaataatcatgacaggagctattcttttatgtagcaagtagaagtgtgagctacttgatatcatgccgctatgatatagttcttaatggaactttatgtgttccctgtat

SEQ ID NO: 750252 - DNA, 589 bp, Homo sapiens
ttattgttgcaattaacatctctgttatttttactttttagtataaagccttttctgttttgtctttgacatatggcctgtgagcttttattttttctttctccatttatgttactttcaaagtatctgggcccatagttcatttttttgttggactaaattatactacttcaggactattccaccagtcatatttaagagctctctcttggctggtggctcaaaagtggagctaatgaggccagatcaggagggtcgtggatgtcaacagttgtggcgggttttcagtctgttgtattgayggtgggccttggcagctgcgaatgaggagaaagatggtcttttgttatgagtttggggagatgtcaaggagtactccagagggattcattacaggaagcacttgtttcagggcaactggaagcaattttctatcccgcgagacccaggaatagcccatgaaaggcaccattacccttttcctcccctggccatgacaacctagatgggatctttcaagccagaaggcacctgcctctgtggctttccacttgctgtgggaaatcctctggggagcttgcattcacag

SEQ ID NO: 750253 - DNA, 589 bp, Homo sapiens
ttattgttgcaattaacatctctgttatttttactttttagtataaagccttttctgttttgtctttgacatatggcctgtgagcttttattttttctttctccatttatgttactttcaaagtatctgggcccatagttcatttttttgttggactaaattatactacttcaggactattccaccagtcatatttaagagctctctcttggctggtggctcaaaagtggagctaatgaggccagatcaggagggtcgtggatgtcaacagttgtggcgggttttcagtctgttgtattgacggtgggccttggcagctgcgaatgaggagaaagatggtcttttgttatgagtttggggagatgtcaaggagtactccagagggattcattacaggaagcrcttgtttcagggcaactggaagcaattttctatcccgcgagacccaggaatagcccatgaaaggcaccattacccttttcctcccctggccatgacaacctagatgggatctttcaagccagaaggcacctgcctctgtggctttccacttgctgtgggaaatcctctggggagcttgcattcacag

SEQ ID NO: 750254 - DNA, 569 bp, Homo sapiens
ccaggtatatgtagaggctggaggaagcagtgtttgatttgcatagggctcaggggattggtttgaccaggcatgtcattcatgcagcccgtgaaaaagctggccctcccaccctagccttttaatatgcaaacgcagggtgccatgatgttctacacacatggggatatgtagggggggccatgttgccaggaacatgtggggcaagggcaagaagttcgcaggaatcgccatgtttgggtggacccagtttctaatggccttcatttgcatatcaaaggttgccggcctggctctaagagctgctttaaaaacgaaaacttcccagggaccccttttcctctcttatctgcctaaaataatttcttaactcctacaacactatcataccacattacagttgtagtwttgaagaaagagacatatgataaatacgtattatccagtttcagttttggcaatgaacatgacagtccacaaaagccaccatgttttttgtgctgaaaaattcttgtgaatggaagaaggaaaccagcaaaatgaaaaggatcccttctgaaaatgcattt

SEQ ID NO: 750255 - DNA, 600 bp, Homo sapiens
ccccagtaatcacataggttcttttctatttttcctaagcgtcggccggcttgagaaataaagggacagagtacaaaagagagaaattgtaaagctgggtgtccgggggagacatcacacgttggtaggatccgtgatgcccacaagccacaaaaccagcaagtttttattagggatttcaaaaggggagggagtgtgcgaataggtgtgggtgacagacatcaagtacttaacagggtaatagaatatcacaaggcaagtggaggcagggcgagatcacaggaccacaggaccaaggcataattaaaattgctaatgaagttttgggcaccattgtcattgataacatcttatcaggagacagggtttgagagcaaccggtctgaccaaaatttattaggcgggaatttcytcctcctaataagcctgggagcgctatgggagactggagtttatttcatctctgcagcctcgaccataagagacgaccacgcccccgggggaggggggccagttcagagacccacccccaggtgtgcattctctttctcaggggatgttccatgctgagaaaaagaattcagcgatatttctcccatt

SEQ ID NO: 750256 - DNA, 601 bp, Homo sapiens
catgggaactatggaaacacttttctagttatatttatttattttgtttttaagacagttgttttttagatataagtgagactgagtgggctggacttaatgtaaagcacatgtgttggccagtttgcaggcacttgttagagctctctgagcatatgtgggataatggattctgtttctgttacgtgtttctcatgaagcctagcactgtgtttttaaaggctaggaagcatatcaatgtattggaactttttctcccatacrgtgataaagtgaaaaggataaaaaaattgtaggtaagagagattagatttccccaggataaagcagatttgtatcttttattttttgtatgaaattttctactcatctctctatctttctaccttctatctatctacctacctatctatctatctatctatcattctaccatctatctatctatctatctatctatctatctatctatctatctatctatctatcatctatctgtctttcccatctaacagtaagcatcttaaggtagaagcctatgagtttagttgttgaatttccttaatttgtttgaaataaacacatatgtaactcctgaata

SEQ ID NO: 750257 - DNA, 604 bp, Homo sapiens
cacttttctagttatatttatttattttgtttttaagacagttgttttttagatataagtgagactgagtgggctggacttaatgtaaagcacatgtgttggccagtttgcaggcacttgttagagctctctgagcatatgtgggataatggattctgtttctgttacgtgtttctcatgaagcctagcactgtgtttttaaaggctaggaagcatatcaatgtattggaactttttctcccatacggtgataaagtgaaaaggataaaaaaattgtaggtaagagagattagatttccccaggataaagcagatttgtatcttttattttttgtatgaaattttctactyatctctctatctttctaccttctatctatctacctacctatctatctatctatctatcattctaccatctatctatctatctatctatctatctatctatctatctatctatctatctatcatctatctgtctttcccatctaacagtaagcatcttaaggtagaagcctatgagtttagttgttgaatttccttaatttgtttgaaataaacacatatgtaactcctgaatatgtcacttaaagagatactt

SEQ ID NO: 750258 - DNA, 471 bp, Homo sapiens
tttgttttatctttaatttctatcatgcctgtggttactatttctttaggtgcaatttcatactttgaaataccttaagcaaaacagagatgtgcaattataaggatatagtggattccttttctaggtgatttatttacttctcasttggctgtaataaaatctaattggttaagtaaataaaacacagcacccttcagtatgttttccacatagcatctgaaagatttacttattttatttctttctaaatatatttagctaatgttagatatttactattcaaccttaagagaaaggggaagaaaccctgccgtttgccacacacggatggacttgaacgacattatgctaaatgaaataagccagatacagaaagaaaaatattgcatgatcttacttatatatggaatctaaaacaacaacaacaaaaacaacaaaatcagtggttaccatggtctgagttggggg

SEQ ID NO: 750259 - DNA, 488 bp, Homo sapiens
attactagtaagactgagtgtgtggtttttagtgtttggaaatttgtgttcacttcacgtgaattgctacttcataatcttttttccactcgtgtgtgtgtacacatgaacataaactctaaattatgttttatttatttattcacctaagttggtatagatactatatgttgctttgcttaagaaagatttggactaagttctgtgcttggaattaacatggctgcatcaggttgcatctggatatttgcctgataatatcttatttctataactttatattgtctttctgtgtctctttttggcagcaatcactacttttatacatkattttaatctatttacactcttgtaattgcaaatatattggcatcatttattctattgtatagagtgactttcatttacgatgcttttcgttgtcattttttaagatttcttattttctgccttgttagatttattgagtttcctttgctcacttttta

SEQ ID NO: 750260 - DNA, 573 bp, Homo sapiens
cgtttgaaaatagcatgcccaatctctagcccattcaaagtttctcatctctacattgttgtactttgagacctggtagtcagtattactacatataactgtgaagtttagcttacattccagtaactggatgtttaaactcagaagtgatagaaaaatgagaacatgatttttaaaaaaatattcactcattgttttattttggtcaaaatgctacaaatccttagaaaagtaaattctaaagtatagagtttatcttttttaactattaaaacctgatgaatattacaggatatgtcctaaaagtataacattgattaattagccttcagtgtaagcarcaggtcatctccgttccagataggacctcagtaaacctggatgaactagagaattgaagataaccttaaagctaatgctctttaggctgggcatggtggctcacacctgcaattacagcactttgggaggccgaggtgggcaaataatttgaggtcaggagatcaagaccaacgtggccaacatggtgaaaccctgtctcttctaaaaatataaaaattagcccggcatggt

SEQ ID NO: 750261 - DNA, 494 bp, Homo sapiens
gtcttatttccaaccctatttctgtgctgaaattatactttcacaaatgagtgactgattgtcagattcaaaggccatttcttattcgctccgctcctgggcttctttagaccatttaattcatttgacttgtattttccttaaatttctttggtttacttccctccaaatctactttgtacaccagattgaccttttacaaatgctcactcattgctctgctaactcctctgctcaaaaccaaagtcatatcattcctctgctcacaacaattaatgtttcctcatctattcgtggaaaaataaaaaatccttagtgtgacatttgacatcaataatattatcctaatttatctttayataactttttaatgaaagagatgaaaaagtcttacattgttgtctgatctatttcaccagcattttgcccattctgtacctgagaaaatatattatatacattattgaaacttcaactttcattttttcattttc

SEQ ID NO: 750262 - DNA, 599 bp, Homo sapiens
cagtgtgtttttgtggtggttgatagcaatttttctttttcttatttagtgttttatttggcacccttgcaggcttgcctggtagtgacaagttttctttgcatttgcttgtcttcaagggatcttatttctctctcacttgtgaagcttagtttgggccaatataaatttctgggttggaatttttttttctttaagaatgttgaatattggccccccatctcttcttgcttgcagggtttccactgagagctctgctgttattctgatgggtttccctttgcaggtgacctggcatttctctcacttcccttaacatcctctatttcatttcaatcttgaagaatytgatgattatgtgtcttggggttgattttcttgtggagtttctgactggggttctctcaatttcctaaatttgaatgttggcacctcttgttaggttttggaagttttcctggatgatatcctgtagtatgatttccaagtttgttccattcttcccatctctttcatgtaccacaatcagtgataggttcagtctttttacatagtcccatattttttggaggtttagtttgttttttaattttttttcc

SEQ ID NO: 750263 - DNA, 501 bp, Homo sapiens
caagtgaatcagaatagagagcccagaaataaatccaaacacatatgatcaactaatttttgataagagcaccaagaggacacaatgaggaaaggagagtgttttcaataaatggtgttgggaaaactaaatttcaacatgcaaaagcaagaaattgggcccttaacttacaacatacacaaaaacgattcaaaatggataaaagacctaaatgtaagacctgaaattataaaatttctagaagagaacataaggagaatagtccttgacactggcattggcaatcatattttggatatcataccaaaagctcagacttmtggtgcaaaaataaataaatgggactacctcaaactaaaaagcttctgtgtagtaaagagaataatcaacacaataaaaagctaacctacagcctgggaaaatattatttgcaaaccacataactgatagagggttaaaactgtacaactcaatagaaaaaaaaaatgcatgaacaaagtg

SEQ ID NO: 750264 - DNA, 571 bp, Homo sapiens
cttgagctgtggtgggctccacccaattcgagcttcccggctgctttgtttacctaagcaagcctgggcaatggtgggcacccctcccccagcctcgctgctgccttgcagtttgatctcagactgctgtgctagcaatcagcgagactccgtgggcgtaggaccctccgagccaggtgcgggatataatctcctggtgcaccgttttttaagcccgtcagaaaagcacagtattagggtgggagtgacccgattttccaggtgccgtctgtcacccctttctttgactcggaaagggaactccctgacyccttgtgcttcctgagtgaggcaatgccacgccctgcttcagctcgtgcacggtgtgctgcatccactgtcttgcgcccactgtctggcactccctagtgagatgaacccagtacctcagatggaaatgcagaaatcacccgtcttctgcgtcactcacgctgggagctgtagactggagctgttcctattcagccatctaaagtgtggaaagtaatagcctcaatgtccaacaatagcagtgtagttaagtagattgtta

SEQ ID NO: 750265 - DNA, 603 bp, Homo sapiens
atccttattgctatgaacaagataggaggaaccggcaggccctcccatctttttctccccaattaataaaaccaaaccaaatgacagccagaagcaactggaccctgagcagagagcaagaatgggaagaaaggagggtgggggaaaaccagagaggaatgatgtctcggaactcatctgatgttgactcagtatggactaataggtgatctgaggggggaaaaaaaaaccctttcatatggatttcgtatatgtttaatagtagggtttttttgtggtgctactcataacaaaggggttacattactcaatayagattcaagcagtggattatattcctgacatttagaagtgaagtgctattagagttctatttaagtgtaccacggagatacagattcaaacttgtgcttttactcttaaagtaagagtcggctaccactcttactccgcagcttttggagactttcaacctctctgagcctcagcatcttcatgtataaaatctggctaacgtccacctaaggttctcatagaggattcgagaagaatgaatataaggcaccaagcaaagcatacttcagggattctcactgttgaatc

SEQ ID NO: 750266 - DNA, 539 bp, Homo sapiens
  misc_feature 390: n = A,T,C or G
gtggagtgggtcacacctgtaatctcagcactttgggaggctgaggtaggaggattgcttgagcccaggagaccagcctgggcaacatagtgagaccttgtctctacaaaaattttaaaatttggccaggtgtgatggtgtacacttgtagatacagcttcttggggagctgaggtgggaggattgcttgagcccargaaattgaggctacagtgagctgtgattgcaccacttcattccagcctgggcaacagagcaagatcctgtctcaaaaaaataaaaataaaaataaaaatataaataaacaggaataaatttaactgacatgaaagatctgtacagttaaaattataaaacactgatgaaagaaatcgaagacaccaataatgngaaagataccctatgtttacagattggaagaattgttaaaatgtttatactatctacataaagcaatctacagattcaatgcaatctctatcaaaactccagtgttttttacagaaatagaaaaaataattctaaaattcatatgggat

SEQ ID NO: 750267 - DNA, 539 bp, Homo sapiens
  misc_feature 390: n = A,T,C or G
gtggagtgggtcacacctgtaatctcagcactttgggaggctgaggtaggaggattgcttgagcccaggagaccagcctgggcaacatagtgagaccttgtctctacaaaaattttaaaatttggccaggtgtgatggtgtacacttgtagatacagcttcttggggagctgaggtgggaggattgcttgagcccaggaaattgaggctrcagtgagctgtgattgcaccacttcattccagcctgggcaacagagcaagatcctgtctcaaaaaaataaaaataaaaataaaaatataaataaacaggaataaatttaactgacatgaaagatctgtacagttaaaattataaaacactgatgaaagaaatcgaagacaccaataatgngaaagataccctatgtttacagattggaagaattgttaaaatgtttatactatctacataaagcaatctacagattcaatgcaatctctatcaaaactccagtgttttttacagaaatagaaaaaataattctaaaattcatatgggat

SEQ ID NO: 750268 - DNA, 605 bp, Homo sapiens
tccattacttattcataaataatgtcagtaagtttgcctaagatatataaacaaaataaaaatcaaaataatatcaatcacaaaaatataatttaacattccacaaaagtgtatgtatgtcttctttctttactactcaatatttggtatttctattttgagagaaaagcttatgtgtagtacaacattttgtggataaatcaaatatgtctacatattaggtaaatttcrcgttatataattacaagtgtaatcacaaatcacactcagcttttatacaaatcgatacctaagtatatctttatatctgcctttatgtctgcctatatactttcttagctatgtacctacctgtctacctatccggcttatttaagggtttaacttctgagaatactatgttttctccagtactaattagtgagataagcattacaaaagccgtgacaaactaatcaaaaaattcatcaacaatttgcatttgataatgatgcttaacagaccaggatgtttactgtccacattttgtctatgaggcaaaacaaacaactaaattataactttgtaacatctgcttcctctacggggctatttgtatagacttt

SEQ ID NO: 750269 - DNA, 657 bp, Homo sapiens
atgggcaaatatttgaacaggaacgtcaccaaataaaatacataacaaataaacactttaaaaatgcacaatgtaattaacagaatgcagattgaacaacaatgagatgtcattatacatttagtagattatctaacatttaagattcaccataaaatatgttggaaaaaatgaaagcactgaaactcatacactgccgattaaaatgttaaatggtaaaaccacaatggaaagcagtttgaccatttcttataaagttaaacttgcactaactatatgacccagctactccattctcatgtctttagcccaaagtatttgaagcttaagtttgtttagaaaaagtgtatatagatgtttgtaacaggcttatttgtaaaagcaaaaatcgggaaataccctacataactattacttggtaataaataaacaaacttaggtatttttataaaaattatgctaataaatttgtgaatgaaggaagccagccaaaaaarggtacacattataaaactctatttacataaaaatgtagaaactggaaactaatttatagtagtaattgccatccagggacaattttgtccctcatgcaccatttatctatatctagggatatttttggttgtgatataaaagaaataatacttgcatctg

SEQ ID NO: 750270 - DNA, 602 bp, Homo sapiens
gactagaaccctctctatctctatcacaggagaatacaagagagtagccatttggaaaccaggaggagggcccttaccagcctcacaagccagcagtttgattttggacttcccatcatccaaaactgtgagaatttaagtgattgttatttaagccacccagtgcatggcattttgctataacaactcaatctaactgaaacatataaaaaaactaatgaacttaacatatatgaagccaaattgacactgtaaggagaaaccaaaaaattaatataaatagttagagatttttaatttctattttcaatttatrtgacaactacctacacacagaaaatcagtaaagacatggaagaattaaagaacactatcaacccataaaccttattgatggttacagaacactgcaaactatggttgaggaatttatagtcacttcaagcagacatcatacattcaccaagatactatatgctgattccttaaaaagtaaaaaatttaaaagatggaaaattatagcatattttattttctttcaacaacataaaattgagtaaaaataaataaagatctccggaaagcaccaaatattcaacaac

SEQ ID NO: 750271 - DNA, 587 bp, Homo sapiens
agttgagacagttaaatattcttgtcaagttgaaatctttaacataatgtattgcactcctttgttcttcctgatggtttttggtttaaaatctgttttatttcatacaaaaattatgactcttgttcttttttttttttttttcattttactggtggggccattctccatttgtttccatggagcctgtgtgtgtgattatatatgagttgcacctcttgaagatagcagactgttgggtcttgtcttttgccaagcttgcaacattacgccttttaagtagagcattaagacaatttatattcagggttagtattgatatgcaagattttgtttttgccattgtgttgttggctctgttttgtaraattaattgtgtagttgctttattgtgtctgtgggccatgcgcttgggtgtattttttaggaaacaggtttcaatcttttgtttccatgtttagtacttgtccaagtacctcttgtaagggtggtctggttttaataaatttccttagtgtctacttgtctgagaaggaccttattccttctttgcttaagaagtttagtttggtggggtatgatattcc

SEQ ID NO: 750272 - DNA, 575 bp, Homo sapiens
tttattactataaacttttctctaacacagcttttgctgcatccccaaaatttagataactcacatcactgttaacattcattttgaaaacttttaaaatttttatcttaatttcattgttagcccaaaggtcattaaggagtatactgtttactttccatgtatttgtatagttttraagattccttatttagttgatttccaggtttactccattgtggcctgagaagacagttggcataattttgatttttaaaaaaatgtatactaagacttgttgtcttgcctatcatataatctatcttggaaaatgttccatgtgcagatgaaaataatgtatattctgcagtttttgggtagaatgtttttcaaatgtctatttggtccatttgttctagtgtccagtttaaatccagtgtttctttattgactttctgcctcaatgatctgtctagtgctgtcagtgcagtgttcaagtcttcctctattattgtgttgctgtctatttactttcttaggtctagtagcatttgtataattctgggagctctggagttagatgcatatatatttag

SEQ ID NO: 750273 - DNA, 572 bp, Homo sapiens
ttgtcaatttataatttttctgtttttatgcaggcatttattactataaacttttctctaacacagcttttgctgcatccccaaaatttagataactcacatcactgttaacattcattttgaaaacttttaaaatttttatcttaatttcattgttagcccaaaggtcattaaggagtatactgtttactttccatgtatttgtatagttttaaagattccttatttagttgatttccaggtttactccattgtggcctgagaagacagytggcataattttgatttttaaaaaaatgtatactaagacttgttgtcttgcctatcatataatctatcttggaaaatgttccatgtgcagatgaaaataatgtatattctgcagtttttgggtagaatgtttttcaaatgtctatttggtccatttgttctagtgtccagtttaaatccagtgtttctttattgactttctgcctcaatgatctgtctagtgctgtcagtgcagtgttcaagtcttcctctattattgtgttgctgtctatttactttcttaggtctagtagcatttgtat

SEQ ID NO: 750274 - DNA, 613 bp, Homo sapiens
ggcgggttcctgccttaactgatgacattccaccacaaaagaaatgaaaacggcctgttcctgccttaactgatgacattatcttgtgaaattccttctcctggctcattctggctcaaaagctcccctaataagcaccttgtgacccccactcctgcccgccagagaacaaccccgctttgactgtaattttcctttayctacccaaatcttataaaacggccccacccctacctcccttagctgactctcttttcggactcagcccgcttgcacccaggtgattaaaagctttattgctcacacaaagcctgtttggtggtctcttcacacagacgcgcatgaaacttatccttgttaatatatattctttggtatatacttattttgcatagccttgataatgtggcatctgtgatcacctctgaaaactttattgatccaaagttgacaaataattcccttaaatttgtccttactctaacatgagcacacctgttatttattgagcaatgcaatttgtattcttagactttctataaagatgacagtttatagatattaggttcataaatgagttagtctgcagtgggctttgatattttactacagc

SEQ ID NO: 750275 - DNA, 613 bp, Homo sapiens
ggcgggttcctgccttaactgatgacattccaccacaaaagaaatgaaaacggcctgttcctgccttaactgatgacattatcttgtgaaattccttctcctggctcattctggctcaaaagctcccctaataagcaccttgtgacccccactcctgcccgccagagaacaaccccgctttgactgtaattttcctttatctacccaaatcttataaaacggccccacccctacctcccttagctgactctcttttcggactcagcccgcttgcacccaggtgattaaaagctttattgctcacacaaagcctgtttggtggtctcttcacacagacgcgcatgaaacttatccttgttaatatatattctttggtatatacttattttgcatagccttgataatgtggcatctgtgatcacctctgaaaactttattgatccaaagttgacawataattcccttaaatttgtccttactctaacatgagcacacctgttatttattgagcaatgcaatttgtattcttagactttctataaagatgacagtttatagatattaggttcataaatgagttagtctgcagtgggctttgatattttactacagc

SEQ ID NO: 750276 - DNA, 626 bp, Homo sapiens
tcacatagttacactttttgtgtgtgtgtggcaagagcacctaaaaatctactctcatcaaaaatctcaaatacaatacaatgtcattaactatagtcctcatgttgtacattggatctctagacttattcattctacatgtctgaaactttgtatcctttgacctgcatctccccattttctccctgacagyccctggtaactaccattctgtatgctatttctgtacttttttttttttttacattctacatataagtgagatcatgcagtatttctcttcgtctcccttatttcacgtagcataatgtcctccagtttcatgtctgttttgtcaaatggcaggatctctttcttttcaatggtgaataatattcatttatatatatcacaatttcttcatctgttcatccatcagtgggcacataggttattttcatgtcttggctattgtgaataatactgctttgaacatgtgagtgcacatatcttcatgaggtagtgatctatttgtaatttagagtgggccctaagaagctgtatgctatatattttgtatgttgattgttagacttttatgggtacttagttccctccacttcttaagtttttctggggttctgcag

SEQ ID NO: 750277 - DNA, 626 bp, Homo sapiens
tcacatagttacactttttgtgtgtgtgtggcaagagcacctaaaaatctactctcatcaaaaatctcaaatacaatacaatgtcattaactatagtcctcatgttgtacattggatctctagacttattcattctacatgtctgaaactttgtatcctttgacctgcatctccccattttctccctgacagcccctggtaactaccattctgtatgctatttctgtacttttttttttttttacattctacatataagtgagatcatgcagtatttctcttcgtctcccttatttcacrtagcataatgtcctccagtttcatgtctgttttgtcaaatggcaggatctctttcttttcaatggtgaataatattcatttatatatatcacaatttcttcatctgttcatccatcagtgggcacataggttattttcatgtcttggctattgtgaataatactgctttgaacatgtgagtgcacatatcttcatgaggtagtgatctatttgtaatttagagtgggccctaagaagctgtatgctatatattttgtatgttgattgttagacttttatgggtacttagttccctccacttcttaagtttttctggggttctgcag

SEQ ID NO: 750278 - DNA, 626 bp, Homo sapiens
tcacatagttacactttttgtgtgtgtgtggcaagagcacctaaaaatctactctcatcaaaaatctcaaatacaatacaatgtcattaactatagtcctcatgttgtacattggatctctagacttattcattctacatgtctgaaactttgtatcctttgacctgcatctccccattttctccctgacagcccctggtaactaccattctgtatgctatttctgtacttttttttttttttacattctacatataagtgagatcatgcagtatttctcttcgtctcccttatttcacgtagcataaygtcctccagtttcatgtctgttttgtcaaatggcaggatctctttcttttcaatggtgaataatattcatttatatatatcacaatttcttcatctgttcatccatcagtgggcacataggttattttcatgtcttggctattgtgaataatactgctttgaacatgtgagtgcacatatcttcatgaggtagtgatctatttgtaatttagagtgggccctaagaagctgtatgctatatattttgtatgttgattgttagacttttatgggtacttagttccctccacttcttaagtttttctggggttctgcag

SEQ ID NO: 750279 - DNA, 644 bp, Homo sapiens
agtctatctcatgcgtccattgtgcaagaaacacaagaagggcatttatccctcaccacccctttctctgggttctactgaacctagtcaagaacagcatctatgaaacctgtgtcagtctcatggttgcgcttggtctcaattgctgtatctcttatagtcgttttcatactatattgtaactatcttttttttttttttttttgagatggagttttgcccttgttgcccaggctggagtgcaatggcgcgatctcagctcaccgcaacctctgcctcccgagttgaagtgattctcctgcctcagcctcccgagtagctgggattacaggcatgtgtcaccacacccagctaatttagtgttttttatagagacggggtttctccatgttggtcaggctggtctcaaactcccgacctcaggtgatccgccygccttggcctcccaaagtgctgggattacaggtgtgaaccaccgcacctggcctttaactgtctttttaaaactgctttttattaaatattgaatagtagaacatgtgtaatatattaagggggactgaacacccatgttaagaggtagaatgctaatgttagaaatcccatgtgtgctttgatcttcccaatctaaatccccttcttta

SEQ ID NO: 750280 - DNA, 598 bp, Homo sapiens
atcatctatctatctacctatctatctatctgcaacattttctttatccgttcattcactgatagacacttaggttgattccatatcttggctatcgtgaataatgctgcaacaaacatgggaatgaagatatctctttgacatactggttttatattatttggatgcatgcccagaaatgggattactgcatcatatagwagttgtattttcagttctttgagaaatttttctaccgttttacctaatggctataccaatttccattcctatcagcagcgtacaaggcttgaggcttgcaccctatgaaaccacagctggagctcgacattgtctggggcacagggcaccaaatcctcagcatggggaccctgggcccagcccatgaaaccatatttccctcctaggcctcccagcttgtgataggaggggctgtcatgaagatctctaacatgatctggagacattttccccattgtcttggggattaaaatttggctcattacatgtgcaaatttcttcagccggcttagatttctcctcagaaaatgggattttcttttctatcgcattgtcaggctgcaaattttccaaactc

SEQ ID NO: 750281 - DNA, 581 bp, Homo sapiens
attcatgttttcttataaattgaattgtgaatatatatgatgaaatgataaaactgcctcctcttcttacataaatatgcagaacttttcaagtccatcattgatgtggaaaagtttcctgtaggaagtgtttattctcttgttgcagaaagtagttgagccagtaattttcctactstcaacatttatggctaatcctttcggaagttagaggtgaggaaggatcttgagaaatgcaccaaactgtgtcaaagtttgatactgtatgcatgatttagatttcagtatgaaatcaaatatgtgggtgatgatttccatgttagatgttttaagcagattaggcttcaccaacccatgttagagccgagaacacaaaatagaaaggcttcctaaggtcactgcagatagacaagactgggcactgaacacaagttatccagactcccatgtctttattgtagcccaaaagagaaatactacatgttccaatgcacatgtgcttgtcagtacacacacatgtacctgcacacacatgcatgcacagccttacctttgttcttacaaagaacaaaaatgccttc

SEQ ID NO: 750282 - DNA, 611 bp, Homo sapiens
tagggtctttaatatgtgaatatgcactgaggaagtctaaggaagggattggagcacacagcatttctcaatctcatttcagcagggaacctgtgtcttaaggcatcatgttaagactctgatctacagcgcataatttgggacaagttgcctttgagtacaaaccatccaaaacacagatatgagcagagagcctgtgcagtatcaatcacatgcaggtcacataattttcgtttgtcatatttgacactaatagttagaactgcacatcataatcttgaggaacaaatccaaatacaatttaaaaacttcttccctaccagcaatacaaattctggttcatgtcatttccatttcctaatccaaatggcaaaataaatatgttagtttgtagaatgccaagaaaaatataagttcaggtaaacacaactgactactggtatattcgttccayagacagaccacatttactgttggaacacacgctttgctttttttgcaacttaactatataatgccccagcccttttttttaattagtcaaatgcgggatcagatctcagaagagacaaaggttaggattttggccagttccaaaaaacacagctaaa

SEQ ID NO: 750283 - DNA, 627 bp, Homo sapiens
atcccacagaatatatcattacgtacttattgtagggaagaaaaatccaggtacttgagacatgcaatttagatctgggttaaggggaacaggggcaacttggcaaagaggtgaagtttgaaataaataaatgatatccataatttacctaattatacattgttaacttttcatcaatttaataagttttagaarggaattaatttttttcttctaggaaccatttagtcaatcaatttaggaataaccttctctagctacctgtgctaaactgacctaattcaatgcattgaaaatccatcaaaatataggtttaccttatcccttcatgataaagcaaaaacaaaaagaaataaaaggactgcatagtcttcactcttaagcactgctttcatttctcctagtggaaaaagagccatggtagctttctgatggcgctttctccgttttttaaatcacttatctaatctccataaataacagctacggatcaaagtctagccttgacttgtttgaatgagtgccatgtgattgaataccaacagcttccctagtcaatattttggtttatattggaatgtgataattttccttaaaaattcttaaaaagtcacatcacataataag

SEQ ID NO: 750284 - DNA, 612 bp, Homo sapiens
gttataattacctactcagtacggtaacatgctatacaggtttgtagcctaggaacaatgggctataccatatagcccaggtgtggagtaggctataacatgtaggtttatgtgaatacactataatatacacacaatgatgaaatcgcctatcaatgcatttatcggaacgtattctcgtcattaagcaatgcataactatatttagatttgtcttaaaagytgcactaaattctcttgaaaggtgagtggaagccccaccctagaactgaatttgtacaactcaacaggtttaaatatgattgcttaagacagatattgatcatgctacaaaccatttctttctctcccttcttttaagacattgggtcccactttaagagcaatagttatgataaaacctcatatgcaatgtgctttatcaatgagctaggttttgatactttgctgccagaaatgtacacattttctcacctattataaaacattagtgggctgcttctatcacatttataaacctttagtgttagtagagtaaataacttgtcactgagggcacaaaataaaacatcattggtattgcttcctaacaaatatcagtgtttgtatatc

SEQ ID NO: 750285 - DNA, 574 bp, Homo sapiens
ccctgaggtttataattacatatttagctttttaactgtctactgaaattcaacattttaccatttccagtggaatatcaacactcctataagcatctctttacttccctttaggttataatttttcatccagtacatctatgtatattgaaaaccccagtaaacggtgtttaatttttgctttccatcttttttmtcaagcgaagaatggtctatttactctttcatttgctctttattgctgatgtttaaaatttctatctggtatcattttccttcctcttgaggagcttgctttagcaatttggtgagggcagatctgttgtaaacgatttttcttagtttttcttcatctgagcatgtccttatttcaactttatttctgaaggatattttttctggatgtagagtttgtgttgacagttctttcatttcaacactttaagaatagtgtgcaactaccctctgggcccatagttttgaaacaggatttttctcggcccctttgttgggctcacagcagggacatcccatcaactcgacccatcacgctcagccccttgcgggagggagc

SEQ ID NO: 750286 - DNA, 639 bp, Homo sapiens
atttcattaatatcactgtgtgtaaaccctgaatattataaataccatcagagaaatatttcattaatatcacagtgtgtaaacagtggatattgtaaatatcatcacactgatatttcatatatatcactgtgtgtaaacactggatattacaagtatcatcagagtgatattttgttaatatcatagtgtgtcaatattggatattacaagtatcatcagagcaatatttcatgaatactacagtgtgtaaacactcggatattacaattattatcatcagagcgatatttcattaatatcacagcgtgtaaaccctggatattacatgtatcctcatcagagcaatattcattaatatcacagtttgtaaaccctggatacaataaatatcagagcgaaatttccctaaaatcacagtgtgtacatcstggatactataaatatcagtgcaaaatttccctagtatcacaatgtgtaaatcctggatactctaaatatgagaccgaaaattccctggtatcacagtgtgtaaaccctggattttataaatatcagagctaaatttccccagtatcacagtgtgtaaaccctggacactataaatatcagaacaaaattttcctagtatcacagtgt

SEQ ID NO: 750287 - DNA, 584 bp, Homo sapiens
cctatttgttttacagacataccattaactattttaaggactaatgcgagcagaagacaaacatatttagtttgggacaaactggttgggtgcttaaaaacatagaaggatcaacatttctgtgatttttttttttctttttaacttcctgggccatgtgatggatcgtactgctaaccagccagcaggtagaatttgaggcgctgatctttctctctgcagctggacttttccgctagagactttttctccctgtcactttgggcttcaccagtccctgcattattaccacaagcacagaggactgtgtgcttcccttagctcatttctgatggaatgcaaagtagcattgtggatgagataggcattttcacattttttcaaayaattttttttctgtcactgcttttggcaggctttgtagcctccaagcaagtagagaactgtattttattttcaaacagccagaaggagaatttcatgaaattacaatgattagcagtttgtagttagtgaattccaaggctgttggacatataatcagggggtgatgatactactccttcctgagggcagactgactt

SEQ ID NO: 750288 - DNA, 541 bp, Homo sapiens
cagctggctaattttttgtatttttagtagagacggagttttactgagttggccaggctggtcttgaactcctgacctcacgtgatccacccatctcagcctcccaaagtgctagcattacaggcataaggtgaaaaatatttttctctttttcattcactgttatatccctattttagtctttagtttatcaagttttactgtttatttgtacttagcagtcctttttaactaactcccttactgtacacaccctgaatattgtaagtggcagagataatatagcttgttaaaggagaaagaagaaaacagaccaagtcatagtgttggttaatccatcccacacagagagtccgcgaggcgttgcaragagttcaggctgaaggggttgatcacagtgctcagggagtcaccttcagtggaatatcgtgatgggagcctccacactcttgaactcagccaacaggctgacacggcacgggattctcacttagcaggtatgcgctggatgcagccctaactcatctcagtgtcaaatgtc

SEQ ID NO: 750289 - DNA, 482 bp, Homo sapiens
gcttctgagatctaagacataaagtcaccctttggggaaacacacatgcaacatacaactgattttccaaatgttggatatattgacaaaacagagcagaaaggaaattctacacgagagtggtgggagggggtaaactcctaggatcgcattcaatgattgatgataaaatggaaagaacaccgctttaaagatcagatgactatatgtatgaatctctactgtgtaatctcggacacatttccagacttcctaaggctgaatttcctcacctgtaaaatgggttgayagagtttcctgcatataaccaccaaacagccacttctagttatggttcccgggcgtaacccccggacctgcccatcatgaggtggagactttgaagcactcccagcattcgagaaaccgccactgtgcaatgtgcaagagcttgggcctctgtgattcacgtcatggtgtcctgtattactcagctcatcctc

SEQ ID NO: 750290 - DNA, 602 bp, Homo sapiens
agaattctaggttcaaaatcattttccattagaatttagaagacgttatactattttttctagtgtccagtataatattgagaaggctagtgctgttataattcccactctttgtatgggatccgttttctctcttaaaaagaaaagtatatttaagtgtaatataaagttacagaaacatttgcaaatcctatgtgtgtagctcagtgaattatcacaaattgaacacttctagagtattgataatattatctcttgttcacccagaacacttcaggcttcttatttcttctctgtcagtttcggcaagttgtatatagttttcttctaatgatcccattccatctgttccattctcttgttcactgagaacaagagttaatattaccaatactctagaagttcctcttgctgtttcccctcactcacaaccycctgcctcttccccaaaggtaccatttacctgacttctcaaaccatacattgcatttgctatttttgaaatgcatatgaattatttctttttttttttttttttttgaaacttagtctctctctgtcacccaggccagagtgcagtgttgtgatcttggctcactgca

SEQ ID NO: 750291 - DNA, 600 bp, Homo sapiens
tccccctgacaccccacccttcgtgggggtattgtcacctgtctcatggtaaggcagggctgggactccacacctgcatccaggaagcactgggttatgccagttgctggccctgccctgccctgtctcccctccgtccctgaggcctgagctcctccctattctctggccaatacgcaaccttcccaagaactcactgaagatgtggaggctgatggggggtgagaccaaagagcccacgccgttctcagcttggcaggtgtagacgccagcatcgctccakgctgcctggggcaggtgcagcacaccagtcttggtttggaggcgtaccccatccttgagccacttaatggaactgactgcagggtagctgctgttcacctggcaggtgagtgtgaccagctcacctggaaggatgttcctccccgaggggctgaggaggatcttcacacccctgggggcatctgcaagtcacagtagggggtattgggtaaggtgcttggggagggcagaggatggcacacttcttcttgcccccctttaaaagctcagtcctaaggaagtatgcccagataaaacagcagtccccttcaatcctca

SEQ ID NO: 750292 - DNA, 602 bp, Homo sapiens
agagttctgaaaatgtgagcgccagcagctgctgcttttgcattgtggtgggcttggcagaggagcagagactggaggcagtgggccaaagtggattcttgaatgggagggtcacaggaggaatgcaggatttagaaacattatcctggcagcaagagatgagggaaggaaaaaccattttgcattgggggtgaattttcaggaaaacttctctcttcatggttcctaataattttggtgggtactcaattataaataacaacaatatttgtagcctgagggcttttgtatctataaggtgaatttcaagctcttcaraatgcccagcaacaatgcctactgtgtgctaagtgctagggaacaaggaaaaataggatttggcctccactttcaaggtgctctgaacaagagagaagacagacggtaaagacatagcacacgtggagtgtgcctgggacagtggaagatgcctgggcatgtaccagcacataggtttcaggatgtgtggagcgtgaggggaagtgaggtggagaaggaaggaaacttgtgtgagtttgcagggatcagctcaggaagcttcttccatgcttaggtggtttgca

SEQ ID NO: 750293 - DNA, 621 bp, Homo sapiens
gctggaagacagagaaagaagcgttgtccttttcatgccaaaagaagagcacaactgggtacgggcatgcactggaagtctccccaacaagggcccctccaattacacataaggtactcagtatgggtcttaagtgctcaataaattgggcaaagtggggaggtrgggcaaaaaacccagagagaaggaagagagaagagaggaagaagcacgaagaaaatttacaaaaagaaattagatccagaacccaaagcaagaaggccccagggcccagccagtggttgctggagccagctcatgtactagctcatgagtgtcagttgccaaattttcaggaatggaagccagttattaaatagaacaatgattaaaaattaaattatatacacttaaaatcttattgaagacacaggtaataaatacacagatacatcacatcctaattctctgactacattttactattagctgtgttcttgaggttatttccattgattaccgcatggtgaaccctacttcccaactccatgcccagcgacatggcttggtagcctgtgggagtatttactcctgggaatcaggaaatgctgcaaaccagggcttttattccctagagagcta

SEQ ID NO: 750294 - DNA, 510 bp, Homo sapiens
gctccaatttcctggtctttattattaaaacccatggtttatgaatacattacgctaaagtccaacacagcagttctgggtgctgttgtgagccatggtaaacaaggggtgtatctgagccccagctctccagtgatcagcaaggacaggccacctgtgcctccaggggcagcctctgtagagtcacagatcctctcagtgcggagaacctgtcttggttcctcaaggggaaccaagggaagatattccagagggctcataggtcagggacctggtcactatcctttcagcacagctgtagccctctgtgggcccaggraagcctgatgccagctgccccagggtaaagccttggcagatgccaagtgggagaaggaggtggtgttccctcggggagagggggaaacgctacacagagcaacatgggattcatctgcagaagagaggtcaattgcttaccctactggaaccaaaaagtctcttggcaaagggagttctgagctgataaac

SEQ ID NO: 750295 - DNA, 629 bp, Homo sapiens
acttaaaaaatgtaaatgaaactactctgagatgccatttttcacacgtcagattagcaaaatttggaatctgctaatatcctgtatcagtgagggcgtggggaaacagaaactctagctcttgtgtgaggacacacatctggttatatatataaaatatatatttacatatataaaaaaatacatatatatatatatacaccctttgacccagcaaatctacttgtgggaatctgccctatagatatacttttaagttttaagtwtaaacttaaaacttaaggggggcagttaaaaaaaaaataacatagaacacgtacatgcaatacaatgcacacttatggaactatgaaaagaataaaataggtctttaatacgtgcttatatggaaagctctccacagtattcagtgtaaaacggtgcaatgtagtgtatattttcccttttgtgtaaataacaagcacatatacattctcacacataatccgaaacataaatagaaatgttttcaaaaaaatttactgaaaatgtaagaaacttataacgtttgcttttggggaaaaggcaacggtggtaaaggaacttttacgctttatattccttttttttttttttttttttttactatc

SEQ ID NO: 750296 - DNA, 632 bp, Homo sapiens
aggagcccgctgtctcccgctggaggggagactcttgcaggaaagaaagtccgttctgtcgccaccggccagctgtgcccgaaaagtcccaggaagaaactctcgctcatccgcggcgagcggatcccgggcacaggggctggaggccgacccggtgagagtgcaaggtctcgcgaccaccgacgacagcagacagcgagtcgggccttcccatctgaggccagcttcagtacaggcctccaagcccgggcttgttttggccgcgacgtcacttccgatttcttctttcgccttctggctaaaaaacgttccgcagcaatgcarctgaaactttcgggttttcttttttttgtccctctctccttttttttaatatttttatttttgccgcctttacgctccgaggcccatcctgccggagtactacacagacagggtcatttcagttgacggttctgggtcaccagagcagaagaagccccaatttcgccctccggtcacacctcctactccagatcgccccgcccacctgacccgcctctgcgccgccgggctgcgtgagtctcatgagcgtgctctggtacgtcatcttcgcgcgacgttcggttcgctgtgtgtgtcgccggctcctt

SEQ ID NO: 750297 - DNA, 632 bp, Homo sapiens
aggagcccgctgtctcccgctggaggggagactcttgcaggaaagaaagtccgttctgtcgccaccggccagctgtgcccgaaaagtcccaggaagaaactctcgctcatccgcggcgagcggatcccgggcacaggggctggaggccgacccggtgagagtgcaaggtctcgcgaccaccgacgacagcagacagcgagtcgggccttcccatctgaggccagcttcagtacaggcctccaagcccgggcttgttttggccgcgacgtcacttccgatttcttctttcgccttctggctaaaaaacgttccgcagcaatgcaactgaaactttcgggttttcttttttttgtccctctctccttttttttaatatttttatttttgccgcctttacgctccgaggcccatcctgccggagtactacacagacagggtcatttcagttgacggttctgggtcaccagagyagaagaagccccaatttcgccctccggtcacacctcctactccagatcgccccgcccacctgacccgcctctgcgccgccgggctgcgtgagtctcatgagcgtgctctggtacgtcatcttcgcgcgacgttcggttcgctgtgtgtgtcgccggctcctt

SEQ ID NO: 750298 - DNA, 632 bp, Homo sapiens
aggagcccgctgtctcccgctggaggggagactcttgcaggaaagaaagtccgttctgtcgccaccggccagctgtgcccgaaaagtcccaggaagaaactctcgctcatccgcggcgagcggatcccgggcacaggggctggaggccgacccggtgagagtgcaaggtctcgcgaccaccgacgacagcagacagcgagtcgggccttcccatctgaggccagcttcagtacaggcctccaagcccgggcttgttttggccgcgacgtcacttccgatttcttctttcgccttctggctaaaaaacgttccgcagcaatgcaactgaaactttcgggttttcttttttttgtccctctctccttttttttaatatttttatttttgccgcctttacgctccgaggcccatcctgccggagtactacacagacagggtcatttcagttgacggttctgggtcaccagagcagargaagccccaatttcgccctccggtcacacctcctactccagatcgccccgcccacctgacccgcctctgcgccgccgggctgcgtgagtctcatgagcgtgctctggtacgtcatcttcgcgcgacgttcggttcgctgtgtgtgtcgccggctcctt

SEQ ID NO: 750299 - DNA, 622 bp, Homo sapiens
tggccaggcgtggggtagagcctttcatccgggcctgccaagagcggggagctgtgggggagtggtggggaggcgggtgctctttgggctccctggaaacccaaatttggagctttgcggggtggatttgggatccaggtttcggcctgtgtaggacgtttattttcctgctggtatcttgggaaataacgagcatggaatgctagagtgagctaaacctatccttgctgaggatttcctctttttctagatgaaagaaacaatcatgaaccaggaaaaactcgccaaactgcaggcacaagtgcgcattggtgggaaagtaagttttaatagttcgggtytgtgggttttttttttaaggtttaggtattttaaaaaacatattccttttgcgcttcttatattatcggtgacaaactttgcctatcgagggaaattcacggagctagcaaatctcgaggagcgggggagacgagggttggagacacatcagtgagacgagctaaaaacatcgcctttgtgtaaacatgtttgtgttttcagtgttacagagtgtaagtagaacacaaaagtgtttcctaatttaattagtaaggaaaatgtgtcatttcagttagatcgt

SEQ ID NO: 750300 - DNA, 622 bp, Homo sapiens
tggccaggcgtggggtagagcctttcatccgggcctgccaagagcggggagctgtgggggagtggtggggaggcgggtgctctttgggctccctggaaacccaaatttggagctttgcggggtggatttgggatccaggtttcggcctgtgtaggacgtttattttcctgctggtatcttgggaaataacgagcatggaatgctagagtgagctaaacctatccttgctgaggatttcctctttttctagatgaaagaaacaatcatgaaccaggaaaaactcgccaaactgcaggcacaagtgcgcattggtgggaaagtaagttttaatagttcgggtttgtgggttttttttttaaggtttaggtattttaaaaaacatattccttttgcgcttcttatattatcggtgacaaactttgcctatcgagggaaattcacggagctagcaaatctcgaggagcgggrgagacgagggttggagacacatcagtgagacgagctaaaaacatcgcctttgtgtaaacatgtttgtgttttcagtgttacagagtgtaagtagaacacaaaagtgtttcctaatttaattagtaaggaaaatgtgtcatttcagttagatcgt

SEQ ID NO: 750301 - DNA, 628 bp, Homo sapiens
tgtgctgctagactgggatcacagtttgagaactattgctttaaaaaattgaacatgctaagtcaaaagcttggaatcctgtgatgtgggaaagattgagtatctattatgactatgccaatatctcatctaactctcatagtatatctctgtgagtattgtcattatcttctttacagatggtaagacagcttcagagaacccatacatacagtccatgcaagagctgggatttaaatgctcatcttgttcaaaacttgtattcattctttcaccatatgctgcctgctcagcattaagatgggatgaggtacttctattgagcagtcgaattctygtatcttctcattatgtctggccattcaggaatgaactatggtgaaaaaggggtagtaaagggaactcactgcagaaatgaacacaaaagctgaactttcatgctttatttaacaagaatgcatcagctgtactgcctactttaatactcattttttaacacacaaattactgattctagaataaggcctgtgaagttgatatactttcctttagcccactaacagcatttcactcttggtgagactgctaagaaaagttattttaggaactgggacctatacacaaatag

SEQ ID NO: 750302 - DNA, 623 bp, Homo sapiens
ataaagttcttcattggagtacatgatgcaattaagacaaaattcactgttataaacagcatgcactttctcacattgtttttgtttcagcaatctaagtttgcattggaaagcctcattaatttggaatttgtgatgtccaagcaaagatttaattgaagcctatttcttatgctgcatcttaggtgagaattgctgtgtgaaactatcctctatcatccagaggagggaaaggcagagtattttagctgcttcaaagaacaaggagaacaagaccatctttcaagctctaagcaacatttgttttcatagataccatgagctaattacaaataatttccatcttttaattaaaarttaagttcattagtacctccaattagcaacaattagccattaaattgtttttattgtaaaagacctgacacattgttatgtgttcccacaagccacacgtgaaaatcagtttcattttttggctcaaataccgtgcatttatgttgactacaaaactatctttctttacatgagttaattgattttttctttgtaataagttcttagagactttgctttacttattcttcatttattcaactaatatttacagagtacctacagtg

SEQ ID NO: 750303 - DNA, 579 bp, Homo sapiens
gtcacatgctcacctacctcatctgcatattgcctttaaaaaaaacacacccctggggaatgaaaaaacctccagggtattgagaagaaagtatccttaccaaacgcagtttggtttttatctctgatttacatgaatgatccttttggggtagagcaagctgtttagaattgaggggtttctgggattgtgacagtttagctgcatgttggaatgtctaagggcaaatattctaaaaagataacctgtcttgagttcaagaagagaatygaagtcttgcagctgctaagcattagaatgttgtcaaagtaccactttttggttgaaaaaaaaaaatgcttcaggacttccatcttaactctgaggttattctataatttatccctaggtgatttaagaagaacccttgttcttcttaaagtgtttacttctggtctggcacaacaaatacctgaaatgaaggccagtaagtattttttaaaaaaggaaaacaataaagatggttttgttaaaaagattcaggcagcagaaagaaaagtgatgtgtctctgaattataattaagtaaaagcttatctta

SEQ ID NO: 750304 - DNA, 579 bp, Homo sapiens
gtcacatgctcacctacctcatctgcatattgcctttaaaaaaaacacacccctggggaatgaaaaaacctccagggtattgagaagaaagtatccttaccaaacgcagtttggtttttatctctgatttacatgaatgatccttttggggtagagcaagctgtttagaattgaggggtttctgggattgtgacagtttagctgcatgttggaatgtctaagggcaaatattctaaaaagataacctgtcttgagttcaagaagagaatcgaagtcttgcagctgctaagcattagaatgttgtcaaagtrccactttttggttgaaaaaaaaaaatgcttcaggacttccatcttaactctgaggttattctataatttatccctaggtgatttaagaagaacccttgttcttcttaaagtgtttacttctggtctggcacaacaaatacctgaaatgaaggccagtaagtattttttaaaaaaggaaaacaataaagatggttttgttaaaaagattcaggcagcagaaagaaaagtgatgtgtctctgaattataattaagtaaaagcttatctta

SEQ ID NO: 750305 - DNA, 559 bp, Homo sapiens
tggcctatgatctaattatcaacaactagtcatggagcaaaagataatgctaattttgttaagaccgtggcatttcacaatccaattgatttgatcattcagcaacatgactatcaactatgcaacagtcagagttcttcatgatcatgatcatacatggtattaacaaattctgtttgtttgtttttttttttgaracaaggtcttgttttgttgctcaggctggagtacaggggggggatcttggcttactgtagccttgagcttctatcctcaaacaatcctcccacctcagcttcccaagtagctgggactataggcatgcaccaccatgcctggctaatttttttgtattttttgtagggacaaggttttgccatgttgccccaggctggtctcaaactcccgagttcaagcaatctgcctgccttggcctctccaagtgctggggttacaggcttgagtcaccacaccgggccaaccttaacaaattcttaaatagattataaagttttagcctcctgagaacatgtctgactggagtaatagattatttttt

SEQ ID NO: 750306 - DNA, 560 bp, Homo sapiens
acaaagcaatcatagagagaacttggttcttgtgttcagtggagtcacactaggtcataagaaagtggagtccacctgactttacagttaattcgtgctcaaaaccaagggtaaaaagggaattcttggacttgattaaattggtccctgaaacaaggtaaaaggtaaagcaacttcccctatcagtggagctgacttcagtgcccacatggcccaggctgggtcttggagcatattttgaggttgatgttgaacgctaaagttttaggaggcctcagagaccatttgaagatcagctttcagggatgtcctggcaagtaatgaaggaagcaagagttgactgctaagactttctctttttctgtcatcagttgtaacttcaaatgctcaagtgatcycattttagaaatatgtccaagtggtaaaagttgtggtaagagctaaagagataaaccaaaaatttggggcagttatttaggtttaacccaagttaagcaagtttgtaattattttcgctcatggtaattggtataacacataaaaatgagtatgtcagccag

SEQ ID NO: 750307 - DNA, 626 bp, Homo sapiens
actgtagttcatctgtgctctgaagaaaatcaaactatgtgcttgcagagaaagttcagagttatttgtcaccaattacctaaagctgggagttgagcttacacatagctatggccaattcctgtaaatacttgttcctaatttcacaagactgtcacttcctgaggatttaccttagaaagtgtatgtctaccacagaagaactgtaatacaaaaatgtttacccagagataatagtcttaagggacataaaactccatagcattgattagtttaaaataacctgttcttaattttcaaacaagtatttcaagttctgttaggttttctgtgacaaaaaaaaagcaagcagaaagattttttttcattaaaagatacacacacatacaacacattgaactgagctaatctcaattatactattaaatctctactggttattttaagaaaaraaacataaaagtaagttaccaagtatttaaggtagctcgcctggaagaaaattaggttgtctgaatataaagtgaaggttaaaaaaaatggaaaaaacaaaaaaaaactaaaattatcaatcaatggcatgtttctatatttcttacttaaattattaaaggccattaaaacaa

SEQ ID NO: 750308 - DNA, 624 bp, Homo sapiens
tagatcagtcttcttttggaattgaatgagcctgagaaaacatctagtccaaactcctcacctgacagatgaaaccaaaaccctaaaagatgatgtgatacaccctggattatacagcttgacatcacctgacccaggactagaacacaaggctcctaatttgcttctagggttcttctcattgtagccttaaaacacaagactgaaattttaaagcctaactctaagaaaagcacataaaacagggaactaaaatagcactaaaatagggctctgatatggaagtcctcacatcctgaatgactgggatggatcatttgtattgcaaaaattagccttaggaatctcctgtaagacttttcctgtttttcattgctataccctagtttccacttggccctatcacccacacctcatcaaactggaaatattataaaaccttgattaatgcatgaaatgcatggatttctcaaaggaatctgayccctgagatgggatgaaagttactaatatttaaatccaataaaataagagtaagaataaaagtaataataacagctaatatttaggaacattttctttgtaccaagagtatactgattgtattacgtttcatagtttgtt

SEQ ID NO: 750309 - DNA, 614 bp, Homo sapiens
ccattgaatagattaattggatatttgataagcactaaatatacatacacaatagttaaaaggttcctcaaagaattattaatgaattatgttctgtcaacgaaatgtataattctttattctctaagggcattcagtttatggatctaacaatttttgaagatcaacctaaggatatttgagttgtcatggaaattcataatagcatcatcaygtaagccaacctcttcaatgttggtatcttaattctactccagtttttatagaagtatatgacttaaaactataaaaatgaatgaaatcatgtcttttgcagccacatggatgaaactagaagccattaagtgaaataactcagaaacagaaagtcaaataccacatgttctcacttataagtggaagctcaaaaatatgtatgcatggacatagagagttggacgggtgggagggtgggagccgagtgagggatgagaaattacttaatggatacaatgtacactactcagatgatggctatattaaaagcccagactacacaatatatctatgtaacaaaattgtacttgtactgtctaaatctataaaaattttaaaaagaaaaagaaaaaaccccc

SEQ ID NO: 750310 - DNA, 614 bp, Homo sapiens
ccattgaatagattaattggatatttgataagcactaaatatacatacacaatagttaaaaggttcctcaaagaattattaatgaattatgttctgtcaacgaaatgtataattctttattctctaagggcattcagtttatggatctaacaatttttgaagatcaacctaaggatatttgagttgtcatggaaattcataatagcatcatcacgtaagccaacctcttcaatgttggtatcttaattctactccagtttttatagaagtatatgacttaaaactataaaaatgaatgaaatcatgtcttttgcagccacatggatgaaactagaagccattaagtgaaataactcagaaacagaaagtcaaataccacatgttctcacttataagtggaagctcaaaaatatgtatgcatggacatagagagttggacgggtgggagggtgggagccgagtgaggratgagaaattacttaatggatacaatgtacactactcagatgatggctatattaaaagcccagactacacaatatatctatgtaacaaaattgtacttgtactgtctaaatctataaaaattttaaaaagaaaaagaaaaaaccccc

SEQ ID NO: 750311 - DNA, 628 bp, Homo sapiens
ggacatcataactgcgtgaggctgggttttctcccaccaaagtagtataatgggatacttgaatataatctagctgccttccaataagctagacatctgaggtttatagaaacataaaacaatgccacacttctcactaaattatttgttttgggaaataattactttccataaagatatttcatttatgttaacatgtaatgggtttatgagttataacatgagttaacatgtatgggtttataacttttgatgagttagtttttaattttaaaattttaataaatatttttaaaatttacaagttttttcttgtttaaatatgattataatgattattttacacatttaatgggtataartgccattttgttacatagatatattgcatatcagtgaactctgggctttcagcgtaaccatcacccaaatagtatacattgtatcaattaagtaatttctcatcttctagacatctccaatgtctacgattccactatgtccctgtgcacacattggataactatatgcaggagaatgaaactggaccctcatctctcaccatatacaaaaattaactcaacatggatgaaagacttaaaggtaaaacctgaaactatacaaatac

SEQ ID NO: 750312 - DNA, 711 bp, Homo sapiens
agaattgataacagatgttcaaacaaaaacttgcacactattgtttatggcagcactattaacagtagtcaagaggtggaaataacctacatctatcagctgatgaatggataaacaaaaggtgatctagaataaatcactggttcattctacaacatggatgaaccttgaaaacattttgctaagtgaaagaagccatatgycaaaggccatatattgtatgatttcatttatgtggaatatccagaaaagacaaattaatagagagaaaaatcagattagtggtcgccagagactgaggggaagcaggaatggggagtggctactgaatgagtatggagtctccttttggggagataaacaattctgggactagacagtagtgatggtggctccgcattgtgtatgtattaaatgcccactgaattgtctactttaaaatggttaaaatggtaaattttatgttatgtgtattttaccacatgcatacacaaacctttcccaggttacaataaggcatggccatttttgtttcaataggatttgtatagattctttagatatgggtgtatttttaaaactatatagactattatgagtttaacaccacaactgcccatagtgtgatctgtggatcagcagcatttccatcagctgggagcttgttagaaatataagttcttggatccctccccaaacctagtgagtcag

SEQ ID NO: 750313 - DNA, 688 bp, Homo sapiens
attatctagacagaaattcaagaaacattggatttaaactgcactttagaccaaatggatctaacatttagagaacatttcaggcaacagcagcagaaaataaattcttctcatgaacacatggaacattctccaggatggaccatatgttaggccataaaacaagcctcaagaaagttttaaaaattgaaatcatatcaagtatcttctaagaccacagtgaaaattaggaatcaacaacaggaactttgggaacaaatatgtggaaattaaacaacatacacctgaataaccaatgggtcaatgtaaaaattaagaaagaaagtaaaaattcttgaaacaaatgaaaatggaaaaacataccaaaacctttgtgacacagaaaaagcaatgctaagagggaagtttatagcaattaacgtctatacctgaaaagtagaaagatgttgaataaacaacctaaaaaatccacctcaaaaaactagaaaagcaagaacaractaaacctaaaattagtaaaaggaaagaaagaataaagagcaaagcaaagcaaaatgaaatagaaactgaaaaaaacaatacaaagaatcaacaaaatgaaaaattggttctttgaaaatataaactcaatcaataaaccactagctagtctaaccaagaaaaaggatccaaacaaatagaagtaaaa

SEQ ID NO: 750314 - DNA, 634 bp, Homo sapiens
gttgtaattgggagattttgctatagacagtaagtatgcttatctaatcctacatgcccatgctgcaatatgggaaaaaagcgagtttctaacctctaggggaacccccattaaatatcacaaggaaaccatggagttactgcatgcagtgcaaaaacccaaagaggtggcagtcttacactgctgaagccatccaaagggaaggagaggggagaacagcagcataagcagctggcagaggcagggaaagaccagcagagagttagagagagagagaaagaaacagagagaggaagagacagagagacaaagtcaaagacagacagaaaggcagaaagtcaaagagagaaggaaagagaggaagwgacagacatgaagtcagagagaaagaagaagtcaaagagacagaaagagacagaagtagtaaagaagaaacagtgtaccctattcctttaaaagccagggtaaatgtaaaatctataattgataattgaaggtcttctctgtaaccctataacactccaataccaccttgttgtcagtgtaaacaagagcatagcccaaaagcactgaggccactgacaacctgtagccttcctatcaaaaattcttaacccagcaggtttcctaacaa

SEQ ID NO: 750315 - DNA, 622 bp, Homo sapiens
caggagctcttgtaaggcaggcctggtgatgacaaaatctctcagcaagtgcttgtttgtaaaggattttatttccccttcccttgtgaagcttagtttggctggatatgaaattctggtttgaaaattattttctttaagaatgttgaatattggcctccactctcttctggcttgtaggatttctgcggagagatctgctattagtctgataggcttccctttatgggtaacgcccgatttttctctctagctgcccttaacattttttccttcatttcaaccttggtcagtctgacarttatgtgttttggggttgctcttctcgaggagtatctttgtggtgttctctgtatttcctgaatttgaatgttgacctgccatgctaggttggggaagttctcctagataataccctgaagaatgttttctaacttgattccattctccccatcactttcaggtacaccaatcaaacgtagatttggtcttttcacatagtcctaatttcttggaggatttcttcatttctttttactgttttctctaatcttgccttctcgctttgtttcattaatttgatcttcaatcactgatatccttttttccatttgatcgaatc

SEQ ID NO: 750316 - DNA, 601 bp, Homo sapiens
accttttttttaggcaagtgaggtcttgaatgctaaaaatttaaaggcaaatatcagacttttcgttgatctaatttaagactttattcaaatttactaaatgctttgcctctgcttatttatgccagctttacaatttagagaagtggcacttttcgataattaaaaacaraaaataagcaagaaagaataaaactatttggtaaggagatgaaaataggaaaaatctaaagttaattttagaaaagtgcctcagagaataggtaaaaaatagaggtccagcaaagttaaagaactttccataaaagttgtgtcaaccatagtacttggagctaggtaacgttcactaagcacaggatgggtttttggtttaaatattatataccattttagagggagcatggaatcaaaaagttttgtgaatctcctcgtaacaacattaattgtaaaattaagataagagtacttcactcatgtaatctcagcactttcgggggctgagacaggcggatcacctgaggtcgggagttcgagaccagcctgacaacattgagagacctgatctctactaaaaatacaaaattagctgggcatggtggtg

SEQ ID NO: 750317 - DNA, 601 bp, Homo sapiens
accttttttttaggcaagtgaggtcttgaatgctaaaaatttaaaggcaaatatcagacttttcgttgatctaatttaagactttattcaaatttactaaatgctttgcctctgcttatttatgccagctttacaatttagagaagtggcacttttcgataattaaaaacagaaaataagcaagaaagaataaaactatttggtaaggagatgaaaataggaaaaatctaaagttaattttaraaaagtgcctcagagaataggtaaaaaatagaggtccagcaaagttaaagaactttccataaaagttgtgtcaaccatagtacttggagctaggtaacgttcactaagcacaggatgggtttttggtttaaatattatataccattttagagggagcatggaatcaaaaagttttgtgaatctcctcgtaacaacattaattgtaaaattaagataagagtacttcactcatgtaatctcagcactttcgggggctgagacaggcggatcacctgaggtcgggagttcgagaccagcctgacaacattgagagacctgatctctactaaaaatacaaaattagctgggcatggtggtg

SEQ ID NO: 750318 - DNA, 527 bp, Homo sapiens
tgattgtagattatgctatttaacatgtcatgactatttaacatgtctattttaacatgtcatgttataaccagttaaattgaacaatattcagatttgtgtaaaataactacaaactcactttaataatagtatcccttctgaggacaatgggattctgtgggaaaaaaaaatgttayctatgactccatgtaaaataatgctagttactgtgaaattagaactaattatatatcaaaatttaacagcatcatcttcaaatttatcataaccttgactcataagtagcatttgtgctccaaaatcagaatatgttttgactcggggcttgatggtcatgccagaaatcacagacagctaatggcagtgtcaagatttgagctcagggacaaatatcttgcagatgtttatagcaaaagttttgttcatatcataatgtattgttttatctaaaaattatattgttcttccccttatcaataaaaccaagatatataagatttgctttaatattgccatttttgtct

SEQ ID NO: 750319 - DNA, 599 bp, Homo sapiens
aataatttcaaaatggacaaaaataatttatttttaaaatcatacttccaaaattgtacctttgaactacctctttcaatggttagacattggcaactgaataaatgcaaaggtacattaataaattaaatttatttatttaataccatttacagtttatattttactcaaatccttttcacttccttaatktttccaactgatcacagaatacctgttttctattgttcctttgaacactttgtcatttttatttatgcacaattttctaacaatatattagtatatagtatacagtataaagacaactacaccactctggttattttaagcttaaaagaataatcttataatctatagaatcacaatcatggatctataataacctagtctcttagctcaagaaaaataaaattattattgtgtgatggttagatcttttaaaaaaaaacactaaatttcaattttactcacttttatacataaaatacttcaagaaaagcttactgtaaaaaattattgatgctaccattacttgtggtttagctttaataataaaagttctggatctatttcaaatgaattattttgttgtttta

SEQ ID NO: 750320 - DNA, 596 bp, Homo sapiens
cgtagagaatcagcagaagaaaaaaggccagtaatgcagacagaaggactgaccggagaggtgagaagtgaataggagaacgtgaatcatgtagtacaggaagaaacactgtttaaaaagccagcatgactcacgcctgtaatcccagcactttgggaggccaagacgggcagatcacgaggtcaggggctcgagaccagcctgtccaacgtggtgaaaccctgtctctactaaaaatataaaaaatagctgggcgtggttgtgggcgcctgtaatcccagctactcaggaggctgaggcaggataattgcttggacctgggaggcagagattgcagtgagcagattgtgccactgcactccagcctgggggacagagcgagacgccatctcaaaaaaataaatacatataaaagccagcatggagaaataaygtcaacagtgccaaatgaattgtgtatgccatttgtatatttatacctcaaattaaaatatatttcacatgtcataaatatgatcttgattgatgttcttgcttttagaaaattttagtgcacaaatagtatggatttattgtgaaataatgataaaatatac

SEQ ID NO: 750321 - DNA, 634 bp, Homo sapiens
caatatcctcaccccaccatacatccacctattttcctatttgtaagcactgacaaggccttctcctagccaagcaggacactaaagcactaattggcactagaggtatcacagcttgagttcaaccagagctggcaggttccatgactccagtgacagctctgtgaaaaagtgtcaggagcagagctctggcgtgccatcggctgactgcagcaccctggaactaatgagcagcctgtcagcaccagcatccggggccccgtgtggcgctgagatcattagaatggcagaggagaaagacttcctcagcaaagaggagctggggaggggagaagaggrcaaaatggaactaaagatatcaccttacccacagagggcaaccacccaacaccaaaggactgagaagaaaaagggagaaagagagaaagcaaaagtttttctaaatccatctatgccaattctagaccactcttggaatctccttttggttgggttgccctgtcagtaatcaatatgggctgtaaatccttgcaataatccaagaaggggcctcagtgattaaattaactctttagtcttggctgtgctatgaaacctggaagtcgcccaagtctctaggaaagagggacctagg

SEQ ID NO: 750322 - DNA, 634 bp, Homo sapiens
caatatcctcaccccaccatacatccacctattttcctatttgtaagcactgacaaggccttctcctagccaagcaggacactaaagcactaattggcactagaggtatcacagcttgagttcaaccagagctggcaggttccatgactccagtgacagctctgtgaaaaagtgtcaggagcagagctctggcgtgccatcggctgactgcagcaccctggaactaatgagcagcctgtcagcaccagcatccggggccccgtgtggcgctgagatcattagaatggcagaggagaaagacttcctcagcaaagaggagctggggaggggagaagaggacaaaatggaactaaagatatcaccttacccacagagggcaaccacccaacaccaaaggactgagaagaaaaagggagaaagagagaaagcaaaagtttttctaaatccatctatgccaattctagacmactcttggaatctccttttggttgggttgccctgtcagtaatcaatatgggctgtaaatccttgcaataatccaagaaggggcctcagtgattaaattaactctttagtcttggctgtgctatgaaacctggaagtcgcccaagtctctaggaaagagggacctagg

SEQ ID NO: 750323 - DNA, 671 bp, Homo sapiens
aaccaactagatctaattgaaaaaaaaattaatgagcatatatgaaaaagttaaccagaatagatcccaaaattatagatattttaaaagataattatgaaaaattaagacatttagaagagaataaaaatgtttaacaatctgwtaggaatttagaagaaaagaatacagtgtcaaggagaggcaagatttgaaatgataatggctgagtatttctcaaaagtgattgaagggatgacttctcaaatgaaaaaatttgaatcttaaccagactaactaaagtaaaaatgctctttcatataatataccattgtgaaacagaaagggaaaatcataaaagtaactaaaataaaagaacaggtgagcctaaaaagaaaaacattcagactagcaattgacttctcagtaacaaaagtagaggccagaagataatggaataatttcttcaaagtactaaaaattctaaaattctttacccacctaaactaccattcagtagtgagggtattgaaatatatatatataaaaacataatttaatatataatttaacatatataatttaatatatataatatttgtctattatatatcataaaatattaaaaggattaaaaggatttattcacaaaccctcaatgaaaaaatttctgctttaagaaggactccaac

SEQ ID NO: 750324 - DNA, 516 bp, Homo sapiens
ggtgcctgtagtcccagctacttgggaggctgaggcaggagaatggtgtgaacctggtaggcggagcttgcagtgagccgagatcatgccactgtactcactctgcctgggcgacagagtgagactccatctcaaaaamataataataataaaataaaaaataaatgaaatgctatctgaaatgctatttgaagggacatttgaaatgctgtgtgggaggtaagtaggtgaagagagaggaggaaaaggctctgggacctgaagaagcatgaaaaaacccagagagaacaagagcaacagtgaaaaaccgaggcagagattaacttgcccagcatcaagaactattaagggagaacgcctggattcaagtccagatgtccaacacatccaagttcatgctattaaccgtcacactacggtgcctccaatgcccaagggtgtctctcttatataacctttgagagcctaatggcagtcagctcaaaacagagtttttgaatagcactggatgtgtac

SEQ ID NO: 750325 - DNA, 618 bp, Homo sapiens
aacaaaacgtgagtaacagaacctaacacagagcccggacacacacacaacaggcttttaattcatgtctgttgacatcttacttggtcttaatgagcacataaacaggtagaggcaagctcagaataaagactcaagttggcttggaaaaggaacttcctataagctaaacgtggggcagatgatgggaacacagcgtggaggaaagaatgttatacggaaagtcaraaaactgaacatccagtcctggcttttggtgtgaacttaagccacttgttttctggtctccagtttgcttaccggcaaaatttcctggtacctcaattatgccttccacctagtaggtgcctaatggaaattttttggaatggatgagtccaattttcctgctgcctcatttgccttagttatcatcaggcccagaggcaagcgggtggtttcaatgcactctttttccccttcactcacctgggggcagggttcccttttgcttcacactcaatcaggatgttatcacgggggtccacgatgtgatccttcgctgactgcttggtgatggttggcggctgcgtcactgcaacagtgcacagggagcatggtcagggctgcagggacctc

SEQ ID NO: 750326 - DNA, 469 bp, Homo sapiens
actttcttacttcaactcctataaaaccactttgttgaattgtttgctcctgcccctggataaactatgggtcaatctaatagcatagatttccagttatgttatttactgtccctcagaactctaagcttcaagataaagtttacatttcctgttttggataattcttaaagaattactgggaaaaaaaatacatgggatgatgagctatgtttcttggatagaattstcattctgactgttcagccaaagacactgccatacttatatcttgtaagtaataggtatagtggacatgccagaggaaataagagttgttatttccaaccaataaggttttcaatggcccaccagctcttccactctagtgagctaagctggaatatttagtaccatacccagaggcttcttttgtacttacctctcaaaaagcctcccctttcatgctttccttcccctggctcttccc

SEQ ID NO: 750327 - DNA, 607 bp, Homo sapiens
gtgccctggggtcctatataaatttgaaaggcagtctaggcaggttctggtgccatgctgagctcagagccagtggacatggcttacatatgacctactgaaacaccagctgaggtggccaagggcgtgcaacctcccacaacactaggcaccaggagagactccttccctctgcttgaggataggggagggaagagtaaagaagactttgccttgcaacatggataccagctcaactacagtagaataggacactggggagagtcctgatgccccccttccaggccctagatcccaaatgacatttctatacacaccttaagcataaaggaattcatcaccttgaagagaaggactcagttctggcaggattcatcacctgctgactaaagagmcattgggtcctgaatgatcagcaccaatacccaggcagtactcaccatggaccttggcgaggctctgagatatgctcgcttcaggtgtaacccagcacattaccagctgtagttgctatggggaaagcctccttctgcttgagaacagaagaggaaagatgaatttgtcctgcagcttagatgccagctcagccacagttgggaagagcaca

SEQ ID NO: 750328 - DNA, 567 bp, Homo sapiens
tggagtgaccagcacccagctgcagtgactgtatggaagctttttagggcacacgctgctgtatgcccagaagcttcagaaaattgactagaagttgatgactgaaggccctaggattttagtcttgtgagagccaattgcttcttcttccatcttcttctgcctttcattggccacttttatcaggccccttgccatcactggactctcaccagactctcactgctattctaaattctgaattccaccaaggccattgtatcaraaactccacttcttggccaggtgcagtggctcacacctgtaatcccagcactttgggaggccaagatgggtggatgccaagtccaggagtttcagatcagcctagacaacatgcaaaatcccacctctacaaaaattacaaaaattagctgacatagtggcatgtgtttgtagtcccagttacttgggaggctgaggtgggagagtcacctgagcatgggaggtggaggctgcagtgagccatgatcgtgccactgcacactgcactccagcctgggtggcagagtgagattctgcctcaaa

SEQ ID NO: 750329 - DNA, 615 bp, Homo sapiens
taattttgttcctgcaattccctctgcttagatatccatctatggcagcaatagtctatatggcacttttgtgctaattagaaaaaggcaactttggacaaatgcaaccctggattagggcacatagtttgataaatagaatgcaatgtggatgtcactcctcctttcagtttttatatgtagttcctttgtgcagtgcacagaccttgcagcagccctgatctctcctattctaaacttcactgatttctaagcattaataactgcccactgtgggcaaaactggagatccagaaaagtatgtatgtaataataaaactacaataatgcttagtgtgtgttaggaagtcactttgagttggagttttataaatctgttctatactcacaacatccctttgagcttttttgcaaagaggtgcgcaaaggttcagggagattgtgtatcayggccagtgttatacagctaacaagtgataaagcctgcatttgaggacaagcagactgactttaaaacttaatctcattacctcaaccctaatgtgtgttttgtaaattactgggaacagctcaagtgtaggctcctggatcctgcgcatacatttctctccttgc

SEQ ID NO: 750330 - DNA, 634 bp, Homo sapiens
tgtatgacaaatgctttttttttaagtaggctaattaaattggctttttcttccttgcaatcaaagaatcctcaaaccattacgggaggtaaaaataaaaacactgagtaagcagctactatgtgcttcgcactaactttttgaggtgggtatgaagaaaatgaggctcatttaattaatagacctgactcccaaaccgaaactctttacaatatacctcattttcagtcaagtaacatcctctctgttccaggcctctaccccatttatttcccaagaaacattctcagattattctaaaaatgataacttttctccttttaccatgtccagtctctaatctacaaatttcaaatgcytttactccagaagttttttgttgttgttttttgaggcagagtctcactcagtcgcccagggtggagtgcagtggcacgatctcggctcactgcaatctcccatctctcaggctcaagcgattcttgtgcctcagcctctcgactagatgggattacaggcatgtgccataacacgtggctaattttttattttttagtaaagacagggtttttccatgttggccaggctggtcttgaactcctggtctcaagtgatccacccgcctcagcctcct

SEQ ID NO: 750331 - DNA, 576 bp, Homo sapiens
tcagtcgcccagggtggagtgcagtggcacgatctcggctcactgcaatctcccatctctcaggctcaagcgattcttgtgcctcagcctctcgactagatgggattacaggcatgtgccataacacgtggctaattttttattttttagtaaagacagrgtttttccatgttggccaggctggtcttgaactcctggtctcaagtgatccacccgcctcagcctcctaaagtcctgggattacaagtgtaaggcaccaagcctggcccagaagtatttttttaataaacttttatatgtaaggatgactgggagaatcgagacacttggatctttccaggctgtttttaaactgataaagcatttttctttctcttccccatattaccagctcattgacccttaactcatgcccaggcttaacttaaagcttttctcgacctgtcctcacccttcaatccttccaggtagttgattaataaaatgcagaccacaagacaggaaaaaaaacaaaatcagttaccctatccaaagttacttcaattacttttgaaaaaccaaacaccacacgcccta

SEQ ID NO: 750332 - DNA, 617 bp, Homo sapiens
tatgttttcatcacaaagagggatccatctctgttgacagaaataatgacttatgggccaatatcatgcgtttaacattcctgctgcttaatgatacctgagcaataaggagtgctgagaccaggacccctccaccccttaacacacaccacaagaggtgagcaccagggcatgctggcagacatcakgccaacatgtaccagtaatggaaggttgttgacagatgtctctgattctctgctacagcttgcaggccattctagaccactattaattatttttaggagttgtgttggtccctaatttttaattaaaaagatttggtccacattactctctaaaaataaatgtattgtctcttccctcccctctctccaacactctcaatcaaaaataggtttggcataccatggtacaaggcatggtctctgggcctttctgcaatcctgaggagttcagggggctagaagctaatcatcccactgcttctttgcactgctggtgttttctcagttcaggactcctggttgcctggcctacaagaacctccaaacggctctctctttagagaagtctctaaccattagtgaaaaggggagggactgacatcctgcaac

SEQ ID NO: 750333 - DNA, 640 bp, Homo sapiens
aaagcttagcatgaacttagtaatttttctctgcatctagtgatatgactgttgctgtgctagtatttccaaatggatcatgtttccatcagctcattttattgcatcagcatggaaggtgataatttggctgaaaatgactaaaatctaatatatggttaacaactaaaaattaatgcaaaataccaataacaaagcctttctaacatatggaatgagaagagagacttacagcaatggctacttagartcttacaatttgttgtatttctaagtcagccttttttaggtcacatgaataactagactgagaaattcaaatttcctttctatgacatattattaaaattctatcattctcaaaaagaattttttttctgtagtaaacgaggtaaaaattttgcctagcttttgctagaaaacagctcagagcctatttgtgaattgacgatagagaaaaccattccttcatcacctgaggcatttcccttttattctgtgggtgaagtctcagtagtagtagaaacagctgaagtaggctctctggccaaggtttaggagtaggattttgtcacgttgtattttcttaccacatattgccattttaaatttccaataagtagtaacatttgttggagtg

SEQ ID NO: 750334 - DNA, 640 bp, Homo sapiens
aaagcttagcatgaacttagtaatttttctctgcatctagtgatatgactgttgctgtgctagtatttccaaatggatcatgtttccatcagctcattttattgcatcagcatggaaggtgataatttggctgaaaatgactaaaatctaatatatggttaacaactaaaaattaatgcaaaataccaataacaaagcctttctaacatatggaatgagaagagagacttacagcaatggctacttagagtcttacaatttgttgtatttctaagtcagccttttttaggtcacatgaataactagactgagaaattcaaatttcctttctatgacatattattaaaattctatyattctcaaaaagaattttttttctgtagtaaacgaggtaaaaattttgcctagcttttgctagaaaacagctcagagcctatttgtgaattgacgatagagaaaaccattccttcatcacctgaggcatttcccttttattctgtgggtgaagtctcagtagtagtagaaacagctgaagtaggctctctggccaaggtttaggagtaggattttgtcacgttgtattttcttaccacatattgccattttaaatttccaataagtagtaacatttgttggagtg

SEQ ID NO: 750335 - DNA, 640 bp, Homo sapiens
aaagcttagcatgaacttagtaatttttctctgcatctagtgatatgactgttgctgtgctagtatttccaaatggatcatgtttccatcagctcattttattgcatcagcatggaaggtgataatttggctgaaaatgactaaaatctaatatatggttaacaactaaaaattaatgcaaaataccaataacaaagcctttctaacatatggaatgagaagagagacttacagcaatggctacttagagtcttacaatttgttgtatttctaagtcagccttttttaggtcacatgaataactagactgagaaattcaaatttcctttctatgacatattattaaaattctatcattctcaaaaagaattttttttctktagtaaacgaggtaaaaattttgcctagcttttgctagaaaacagctcagagcctatttgtgaattgacgatagagaaaaccattccttcatcacctgaggcatttcccttttattctgtgggtgaagtctcagtagtagtagaaacagctgaagtaggctctctggccaaggtttaggagtaggattttgtcacgttgtattttcttaccacatattgccattttaaatttccaataagtagtaacatttgttggagtg

SEQ ID NO: 750336 - DNA, 642 bp, Homo sapiens
agaaaggtctgtagggcctctaggtaatcaatccctctcacacctgagccgttggcaatcacagatctgttttctattcctgtatttttgccttttcaaaatgccatttaaatggaatcacatataatgtagcttttatagtctggcttctttaacttaacatacaaatattgattatatctatagattttcctytttgttgctaagttgcattccattatatggatagaccagtttgtttatccattcaccaagtgaaagacactggaatgttcccagtttggggtgattacaaataaaacccacaataaaaatttgtatacatttttgtatgaacatgtattttcctttcaggaaagcaccacaggactgctgggtcatatggtaggtagaaactgccaaactattttccaaagtgactgtgccattttcattaccaccatcgatgtatgagtatttgttttcattgcttccattctagccaatacttggtattgtcatttttatgacagttctaataggagagtggtggtatctcacatggttttattttgcatttccttaatgactaatgatattgagcatcttttttgtgtgccactttgctatctgtatatattcatacaagtaaatttttagaaa

SEQ ID NO: 750337 - DNA, 571 bp, Homo sapiens
cagaaaggtctgtagggcctctaggtaatcaatccctctcacacctgagccgttggcaatcacagatctgttttctattcctgtatttttgccttttcaaaatgccatttaaatggaatcacatataatgtagcttttatagtctggcttctttaacttaacatacaaatattgattatatctatagattttcctttttgttgctaagttgcattccattatatggatagaccagtttgtttatccattcaccaagtgaaagacactggaatgttcccagtttggggtgattacaaataaaacccacaataaaaatttgtatacatttttgtwtgaacatgtattttcctttcaggaaagcaccacaggactgctgggtcatatggtaggtagaaactgccaaactattttccaaagtgactgtgccattttcattaccaccatcgatgtatgagtatttgttttcattgcttccattctagccaatacttggtattgtcatttttatgacagttctaataggagagtggtggtatctcacatggttttattttgcatttccttaatgact

SEQ ID NO: 750338 - DNA, 604 bp, Homo sapiens
taaacatcaataaagccattgtccctctaaatcaaaagccataatttaaattatagttgtctatctctactaaatggagattttaaaattagctgcttccagaaccaaaacatctacaaaattaaaggtgagaattttrgtgtttttctctctagtgattaaactttcaaaacatctctataaaaatttcttgtactttgtctgctgatcttgattctttttgagtatttttctcattgccatattttcctctcagtgttcagtcctaaacgagaagctcgaacaactgctgcaggctttgcacacagattcccaggctgcgcctgttctccctggcctcagccctctcattgtggaagaagatgctgtggaatcgtccagtgaagagtccctgggtgaaagcaaagagcagcttggggatgacgttacaaaaccttcctcccagaaagccgtcaaaccaagggaaatcatgttgcgggcaaatagtttaaagaaagcagtgaggcaagtcattgaggaagccggaaaaggtacacattaacaaatttagctttggaagaagttggcagcatttctactgcaagcataacggagtttccatagt

SEQ ID NO: 750339 - DNA, 604 bp, Homo sapiens
taaacatcaataaagccattgtccctctaaatcaaaagccataatttaaattatagttgtctatctctactaaatggagattttaaaattagctgcttccagaaccaaaacatctacaaaattaaaggtgagaattttggtgtttttctctctagtgattaaactttcaaaacatctctataaaaatttcttgtactttgtctgctgatcttgattctttttgartatttttctcattgccatattttcctctcagtgttcagtcctaaacgagaagctcgaacaactgctgcaggctttgcacacagattcccaggctgcgcctgttctccctggcctcagccctctcattgtggaagaagatgctgtggaatcgtccagtgaagagtccctgggtgaaagcaaagagcagcttggggatgacgttacaaaaccttcctcccagaaagccgtcaaaccaagggaaatcatgttgcgggcaaatagtttaaagaaagcagtgaggcaagtcattgaggaagccggaaaaggtacacattaacaaatttagctttggaagaagttggcagcatttctactgcaagcataacggagtttccatagt

SEQ ID NO: 750340 - DNA, 578 bp, Homo sapiens
tatgtaaataaacatacttacttcacaatctttaagtctttaaaaattatgtccttaagaaagtctcaaatgtattggccttatgtttctattttgatctctggctccatgtgttaatgactctgatatttttctgacaaataaaaggttttaaaaattgctattgcttatttgggttcttcctaggttatttcttctcattagtaacatttctggggaaagatgtcatgctcttagtgtgcatccaacatgaaaaaatatttcaaaataaaacaatagtaattttttaaaaaccctcttacctttgaaaagaaccatcgccttatgccataatcttcctcttgctatttggctgtggttattttttaggattggtatatgtctggcatctasaagacattaaaatatttttaatgaagagtcagtgtcatgtgggaggaaaaaattcgtatcctgggatatgggtggaacttcatgaaagtgattgtgtctttcttatccaagggaagaagtttttgttctttctgaatgaacttgagggaaaaaggcaatcaatgtttttccagtgtaacctgata

SEQ ID NO: 750341 - DNA, 578 bp, Homo sapiens
tatgtaaataaacatacttacttcacaatctttaagtctttaaaaattatgtccttaagaaagtctcaaatgtattggccttatgtttctattttgatctctggctccatgtgttaatgactctgatatttttctgacaaataaaaggttttaaaaattgctattgcttatttgggttcttcctaggttatttcttctcattagtaacatttctggggaaagatgtcatgctcttagtgtgcatccaacatgaaaaaatatttcaaaataaaacaatagtaattttttaaaaaccctcttacctttgaaaagaaccatcgccttatgccataatcttcctcttgctatttggctgtggttattttttaggattggtatatgtctggcatctagaasacattaaaatatttttaatgaagagtcagtgtcatgtgggaggaaaaaattcgtatcctgggatatgggtggaacttcatgaaagtgattgtgtctttcttatccaagggaagaagtttttgttctttctgaatgaacttgagggaaaaaggcaatcaatgtttttccagtgtaacctgata

SEQ ID NO: 750342 - DNA, 556 bp, Homo sapiens
tgctgctttttcaaaggcaagggggataggatctggtagcacagttcaaacttctgctcatgtatgttctgctcatgtgggtgctgacacggcctggcacagaccttaagccagagactgcaactacaaacattcagcatgggaactggaaagcatgctttcttaaagcagatggggcttacccttctcttcaggrtaagaaagaaggaaatgggattgtatgcttgcctctgaggctcgataaggtcagaagaacctgacttgcccagcctttgccaccactggctgtcttttgccagtctccattccactagccctgtcctcaggatgtgtgaacagccattcccttcattgcattcttaaataccacgttttatgctaccatcttcacaggtgaaatacaaatgtggtcatagatcattgggatcaagtcttccaggtgctaaaatcagatatcttaatcaataatcatcttattaagatgaaaataagttttattttaattctctatgaaaacccctttaaaaggataagatctccccagatttttaggact

SEQ ID NO: 750343 - DNA, 645 bp, Homo sapiens
gtagtgaattacttctagatctagaccttcagaggcatggaagcttcaccttcttgaaaaccagctaccatctaaggaatctcagatcaaactactgagtgacaaaaggccatgtggaaagagaggccataaggaaatgtaccaaggcacctctgcagacatgtgagagtggcttaggtgttccagcctcaaagagctcctagctgaatgtagtcacatgagtgatcccagaaaaccatgggagycagaactgcccagctgattccaaccaaacccagaatcacctttgttttgcttcacagagttttggagtggttttttatgtaatgatagatatctgaaatagtagtatagcattaggtatttgaagccaagcaatttaatacaagaatgtatttttataaaatcattggaatggcaagatgaacccccgctcaggggcccctactggactactgagtccacctcataataactgtgtttcagatgtcaggaagtgtctgtggctgctaccacagtcactgcctcaactgcctcttaaacctgatggctggtgacagcacactgaatttttgagtttggacttcaaaactgcctctaaacattcacatcccttcctgccttgcttcccagctggagggtggc

SEQ ID NO: 750344 - DNA, 537 bp, Homo sapiens
aaccacttagtataaacctcatttcctcacctgtaaaaatagaaatactcatagctaatttggagggttcttcaagaactcaactcaccttttataaagacattttggtaaaatgtctagtacatggtaggtattcaatgattaatagcagttattattaatggaagagaggacaagtggacaaaaaactaaaatacacagacagtatcttattatgtaggagagcatctaacagatgtacactgctgagtctcctggtaaaaaactgcttgggctatrcttgcatgtgaatggatctaggagaaaacacctcctaagggagatggtttcagatctgaatcttgaaatatgagaagtgccaggggaaaaaaatgagacaaaaggaaatatcagatattggtgtccctccctggtcccattcatgaccttgtaggtaggatgatgactccagcagttctgtgctgtatttctagaacactgctattagcctttaactttcctccccttcatgtttctggcttcatggtatactgggtt

SEQ ID NO: 750345 - DNA, 607 bp, Homo sapiens
ggaggtgatacatagaaacttataccaaaaacaaagcaaattcaactatatgtagatagagctatagataaatacatatcacacacacacgtatatatactcatatatacgtgtgtgtatatgttatatataatatatatatattatatatataatatatatgatatatakagagagaacattatacctttagtggatgtacgtgttttgggggaaatcatactgtggagatgaaaaacatcatattaccaagtaaaaacatgtagttttatggctagaaaaagtatagactccaacaaattactgctaataaaacgtctgttaatttttaaaacataatcaaatatagaaaaaaactggtatgcttgtttggggttttgtttctttgccttctagaagagtagtttttaggattttctctaaacgccaggcttcaatataataaaactttgtgaaaactgagtaatacagttgaggatataatgtgtcttttggcaaaccagatataaatacagtatttttgtcagccttcaataagtttcttgtggatagctgttttattctcagattttattttcatggaactgatttactctgataggggcta

SEQ ID NO: 750346 - DNA, 623 bp, Homo sapiens
cgggatacatgtacacctccctctatgaggcagtgctgtgatcatccctgttttactgttgaggaaactgaggcacagagaaattaagtgattccctcagagaatcacagctagtaagtggcagaatcagaattagaactggcatgtggcaggcggtagtgaggcaaccctggaaaattccctttgagagctggtctgtccctcacaggaaagtctgtgactttttcttggatgacagtttcagaaaccagctaacaattgagcagattgttttaaggtgatgatttaaattgcattttggtaggaattgaaaccagtctttaatgaatttgataaacgaatttttttaaggtgctgtgtttactgtgtgaagtgttcactggcagcagtgacttaactgcctaaattggctgtcaaagcatatatttagaatacagaaaygtaatgggctccctttatcattacttgcttccccctacatgacataaaatgttggtgaacaccaaaatgcccccagaaaagaggctactttgggtccaattagaaagaggaaaatgaggccattaccccaggacactctgtgagtgtggacttggttgcccacgctggaagagctgccactc

SEQ ID NO: 750347 - DNA, 602 bp, Homo sapiens
caactctttcattttatatgaatccagattcgagaacgtactgatatccccaagatcacagatgattaatctagggttaacagctgtaacatatatgttcagagtataatattcttaaacagaatcccccaaaacttgtcagcattcaaattaaaacacacataccacacacatacacacaaactctcatgtcccattgaaaacttctcactaaaacatacatcaagtttccaaaccacttcactggtgrttttgagtcatatcaagaaccagatgccctctcagtaaaaaaacccaatgaacatcttattcataatggagatataggggtactagcaatgatccaggcatgtctgtcaaaataaagtgtctttcccctttaaatatctttgtaaggaataataaatagttctcctaataacaaatattggccatggaaagttgttagggaccacccacactatgtaaataaatattgtaaaactaacatcaatgtttgtttttgtaattttaaaaattttattggaacatctgtggaatataaagtaacaaaaggctcaaaagattttccattttaattaagggagaaaagatgcacaaaa

SEQ ID NO: 750348 - DNA, 602 bp, Homo sapiens
caactctttcattttatatgaatccagattcgagaacgtactgatatccccaagatcacagatgattaatctagggttaacagctgtaacatatatgttcagagtataatattcttaaacagaatcccccaaaacttgtcagcattcaaattaaaacacacataccacacacatacacacaaactctcatgtcccattgaaaacttctcactaaaacatacatcaagtttccaaaccacttcactggtgattttgagtcatatcaagaaccagatgccctctcagtaaaaaaacccaatgaacatcttattcataatggagatataggggtactagcaatgrtccaggcatgtctgtcaaaataaagtgtctttcccctttaaatatctttgtaaggaataataaatagttctcctaataacaaatattggccatggaaagttgttagggaccacccacactatgtaaataaatattgtaaaactaacatcaatgtttgtttttgtaattttaaaaattttattggaacatctgtggaatataaagtaacaaaaggctcaaaagattttccattttaattaagggagaaaagatgcacaaaa

SEQ ID NO: 750349 - DNA, 650 bp, Homo sapiens
tctttccccaaagaaaccactggatccaaatggtttcacaggtgagttctaccaaatatttaaggaagaactcacatcagtttcccataatcccctccaaaacataaaagcagaggaacgctttctaacgcattgaatgaggccagcattactcctaatgccaaaattagataaatatattacaagaaaggaaatttgtacacccttatccttcatggaggtagacataaaaatccktaataaaacattagccagtataatttagcaatgtattgaaataattatacccgaagaccaagtggtctttatttcatatatgcgaggttggttcaatttttgaaagtcaacacaaaatatgatcatatcaattgacacaagacacaacatttcacaaaatccaacactcaagcaggataaaaactgttagcaaactaaaaatagaggagaacatcttcagattgatgaagaacatctacaaaatagctactagcatcatacctaacagtgagaaactagatactctcccccaagacagagaaaagacaaggatgttccctgtcactgctcctattcagcatcataccagcagtcctagctgatgaaataatacaagacaaggaaatgaaacataaatattggaaaggaatata

SEQ ID NO: 750350 - DNA, 519 bp, Homo sapiens
tttgttgttgttgtgttgtgttttgtgattcagccctgtaaacggcatgctcctcccaggaatgataatgctacactgtaacacagatcattggtgtttcaaaaaacccatccatccatgtcttcatttatttgcaaaacaagggcaggaaaaactagaattaaatygttaattctctctcggtctctcagggcaatatgttgggcagttacttgagtgagatattttttatcaaaccaaatatgctgaggcaggaataacatcaaaggtgtttgtgatgtactgttgctctcattagttacctgcagatcaaacaggtatctgttctaacacttcgattttgaaacttaatgctgtgtttgttaaatttacttaattaggacctcttaacacctcagatagtcgcttaaaacaacaacaacaaaaacaacagtaatacccagctgttagccctgcggatgaaacaataaatgcaaagttaacactttttaaaggtgaatatgtacattttgatgcctc

SEQ ID NO: 750351 - DNA, 647 bp, Homo sapiens
ttcatagaagacccatagacccaataatcttaggaagaaatgtgacataatctcaagttagtaattcaataaaatcccatttttacaccaagttagtatagatttaaatcttatagcatcaagtgtttgaagcgttatggatcaccagggtttcatgaattggcgtagcgtaaatttttgtgacttctcttaaaaaacatcttataaagttgaatactcacrtactgtatgttccagtaatactacttttacgtttttacccaagaaaatctgttgcatgtgtctaacagtggtatgtacaagaatattcttagaatcaacattgataataacaaaaatcagaaaagaactcaaatgtacatcaacacactttgaatagcaaggccttatattatattgtctacttttgtatatgtttgacattttctgtaaaagagaaatcaagaatgaatgattgaaattaaaaggttcatgtgtgggaataggagaggttaaaaaggacgaggtgattgtgcaattaaagcaaaatggctattcttaatagtttatttacataagaatagaatttccattagacccttgaaacaggtccttactttaaacaagatgcaagtaatgtgctatagagagtaggatccctataagtt

SEQ ID NO: 750352 - DNA, 514 bp, Homo sapiens
cttaatcccatatttctatttcattgagtagccacgcccagcttcaagcaaatgaacttttattcagcaatgacgtcttcagtgacgctgggttactatgtagcactgtattggcttttatgggattcctctgctacatgtgttgaagggtctgyggaaagacctgtgtaaggcagtagataagaatatgaattttgtttttatgacaaagcagtgactcggctaatgctattgagtagaatttttttggagtaaaattggtagtgtagataaaatattgctgaatgtctcagggtgtatgtgtaggaagaatgtgctgaagagacaggatagccaaatggctaagatagccaaatcagtgtagcacttgctatgtgactttgagaatgttacatattagtaacatttctaaccctcagtttcctctcatgcataaaacatggaaaataactttcaataccttataagactattgtgagaattggctgtgcttagcatagtacctgaaaatcat

SEQ ID NO: 750353 - DNA, 599 bp, Homo sapiens
tctagaaacaattttgaaagaaaatgtttgtataagaaacagagataaagaggatggcaattttttagaatgtggtcagccatctaaacaagaattaaattagaaatgcaaaagtcaaatacaagtcaacctaaaaatatgtaattttttcagtaatactttctctaccttttcactaagttataaatataatcaagaaaaaagcaaaataatctccacagcaatacatatacttttgctcaattaactgaatawattccacgtaaataatctaaagtgtatttccaacaagtcagtcaagatactgagtacagtattttccattctatatcagaaggataaaatattagatatttatccacatctatcaataagaattaagtacactgggcctaatatttctcacacaatgttttaaaaaatccacatcaataaaaagacaatattcataaatgtaaggtttatattcaagtgtggattacacaaccaagggagacaaatgatggaacagagttccgagacctgagttctaagcccttcgcagtaactaattagttttatgtccttaggtaaaactaaaaacatcttgggcctcagct

SEQ ID NO: 750354 - DNA, 599 bp, Homo sapiens
tctagaaacaattttgaaagaaaatgtttgtataagaaacagagataaagaggatggcaattttttagaatgtggtcagccatctaaacaagaattaaattagaaatgcaaaagtcaaatacaagtcaacctaaaaatatgtaattttttcagtaatactttctctaccttttcactaagttataaatataatcaagaaaaaagcaaaataatctccacagcaatacatatacttttgctcaattaactgaataaattccacgtaaataatctaaagtgtatttccaacaagtcagtcaagatactgagtacagtattttccattctatatcagaaggataaaatattagatatttatccacatctatcaataagaattaagtacactgggcctaatayttctcacacaatgttttaaaaaatccacatcaataaaaagacaatattcataaatgtaaggtttatattcaagtgtggattacacaaccaagggagacaaatgatggaacagagttccgagacctgagttctaagcccttcgcagtaactaattagttttatgtccttaggtaaaactaaaaacatcttgggcctcagct

SEQ ID NO: 750355 - DNA, 603 bp, Homo sapiens
cggcacaaaatttcatgcgcgtccgtgtaaagagaccaccaaacaggctttgtgtgagcaataaagcttttaatcacctgggtgcaggcaggctgagtctgaaaaaagtcagcgaagggagataaggatggggccrttttataggatttgggtaaataaaggaaaattacagtcaaagggggttgttctctggtgggcagagtgggggtcacaaagtgctcagtgggggagcttttgagccaggatgagccaggaaaaggacttttacaaggtaatgtcatcacttaaggcaaggaccagccattttcacttcttttgtggtggaatatcatcagttaaggcaaggaccagccatttatgcttcctttgtggtggaatgtcatcagttaaggtggggcagggcatattcacttcttttgtgattcttcagttacttcaggccatctgggcgtatatgtgcaagtcacaggggatgcgatggcttggcttgggctcagaggcctgacaatgtctaatgttggagagaggatggagtaacagaaatgctcacacactactgggggagtgtgaatttgtacaaccatgttggaagactatttagct

SEQ ID NO: 750356 - DNA, 603 bp, Homo sapiens
cggcacaaaatttcatgcgcgtccgtgtaaagagaccaccaaacaggctttgtgtgagcaataaagcttttaatcacctgggtgcaggcaggctgagtctgaaaaaagtcagcgaagggagataaggatggggccgttttataggatttgggtaaataaaggaaaattacagtcaaagggggttgttctctggtgggcagagtgggggtcacaaagtgctcagtgggggagcttttgagccaggatgagccaggaaaaggacttttacaaggtaatgtcatcacttaaggcaaggaccagccattttcacttcttttgtggtggaatatcatcagttaaggcaaggaccagccatttatgcttcctttgtggtggaatgtcatcagttaaggtggggcagggcatattcacttcttttgtgattcttcagttacttcaggccatctgggcgtataygtgcaagtcacaggggatgcgatggcttggcttgggctcagaggcctgacaatgtctaatgttggagagaggatggagtaacagaaatgctcacacactactgggggagtgtgaatttgtacaaccatgttggaagactatttagct

SEQ ID NO: 750357 - DNA, 507 bp, Homo sapiens
gtgaagcctgggttggagagaggaagactgggaggcaagaaagtaaacttccaatgactatacaaggatggagtcagaggccacgtgcatggcctttcaggaggtgtcctagggacagtcccaggaacccaggcagattaaagacctggaagagagcatcctctcctctagtgggacctgactgccctggaacaaggcttccctgccatatcccagcaggtatctgmggcatagaagctcaccccacctactgagagacataggagggtcccaacagcttcctttattggccttggacagagctaagcaactgtcttcttctttcagaaactgtccttgacttcacaatgacccatgtttctcctctaggaatgaccaccccttcctgcctcccatttttgtcctgggcctgaccagcaatcactgtttctgaatccagcctgaagagggaaggaggtcccacagcttcccaggaaaacctggaacactcactgtgctttggaggtc

SEQ ID NO: 750358 - DNA, 468 bp, Homo sapiens
aagcttttgatggagactatgaggttttctagatataggaacatgctgtctgctgagataatctgacttcctctcctcctatttggatgacctttatttccttctcttgcctgactgtcctggccaatacttccaatactatgttgcatgggagtgttgagagagggcatccttgccttgcactggttttcaaagggaatgcctctagcttttgcccactcagtatgatgttggctgtgggtttttcatatatgacttttattattttgagatatgttccttcaatacttagtttattgagagcttttaacatgaatgaatgttgartgttgaattttgttgaaagccttttctgcatctattgagataattatttggtttttgtctttaggtctgtttatgtgatgaatcacatttattgatttgcatatgctgagtcaccttgcatcctggggataaagcctactt

SEQ ID NO: 750359 - DNA, 681 bp, Homo sapiens
tgtaggacgtggctgaagacccagttgggaggtctcacccagtgaagagaaatgtggttggggatctgcttaaaaaagaagtctggccacattttcacagagcagctgtgctgtgcttggggtctgcttcaggcctcagtcatcttagacactccaaagcccaaaggctggaatggccaaattgcccaaacagcaaagatggcggcccacccctccctctgggagctttgtcccagagaggtttgaaacctctgtcagctggagaacactgtctggggtgcctggaggtcccagtcgtgagrtcttatcaagtgaggaggaacaagatggaggacccacttaaagaagcagtctggtcacgtttttgtagagcagctgtgctctgctggggtaccacttcctctcctggttggcttggactctccaaagcccgaaggctggaatggctaagtcacccaaacagcaaagatggcggcttgcccctctgcctctgggagctccaccccaggaggttttcaaaactctgttggctggagaacactggagagggtggctggagaccacaagttgggaagtcttatgtagtgaggaggaacaagattagggaaccaatttaaaaagcagtctggccatgttttcatagagcagctgtcctatgctgggggatcccttctgcctctg

SEQ ID NO: 750360 - DNA, 512 bp, Homo sapiens
aaaaagaaaaagaataaagaaaactaagagaatctatcaccagcaaacctgtactataaaaggtagtttttcaggctgaaaaacaactcaagtcttctcgaataaaggaaaagtatcccagtgattatttagaacaaaaattacagcatcatcttcttgggtttataacatatggggatataatacacaaggcagctatgtcagaggcatgtgaaccacakcaactccatcttacataggaactgggtaaaatgaggctgaaacctactgggctgcattcccagatggttagtgcattctaagtcacaggatgagatacgaggtcagcacaaaatacaggtgataaagactttgctgattaaacaggttgcagtaaaggagctgggctaaacccaccaaaaccaaaatggcaaccagagtgacctctggtagtcctcactgctacactcccaccatgccatgacagtttacaaatgccatgacaatgtcaagaatttaccctatatggtcta

SEQ ID NO: 750361 - DNA, 512 bp, Homo sapiens
aaaaagaaaaagaataaagaaaactaagagaatctatcaccagcaaacctgtactataaaaggtagtttttcaggctgaaaaacaactcaagtcttctcgaataaaggaaaagtatcccagtgattatttagaacaaaaattacagcatcatcttcttgggtttataacatatggggatataatacacaaggcagctatgtcagaggcatgtgaaccacagcaactccatcttacataggaactgggtaaaatgaggctkaaacctactgggctgcattcccagatggttagtgcattctaagtcacaggatgagatacgaggtcagcacaaaatacaggtgataaagactttgctgattaaacaggttgcagtaaaggagctgggctaaacccaccaaaaccaaaatggcaaccagagtgacctctggtagtcctcactgctacactcccaccatgccatgacagtttacaaatgccatgacaatgtcaagaatttaccctatatggtcta

SEQ ID NO: 750362 - DNA, 512 bp, Homo sapiens
aaaaagaaaaagaataaagaaaactaagagaatctatcaccagcaaacctgtactataaaaggtagtttttcaggctgaaaaacaactcaagtcttctcgaataaaggaaaagtatcccagtgattatttagaacaaaaattacagcatcatcttcttgggtttataacatatggggatataatacacaaggcagctatgtcagaggcatgtgaaccacagcaactccatcttacataggaactgggtaaaatgaggctgaaacctactgggctgcattcccagatggttagtgcattctaagtcacaggatgagatacgaggtcagcacaaaatacaggtgataaagactttgctgaktaaacaggttgcagtaaaggagctgggctaaacccaccaaaaccaaaatggcaaccagagtgacctctggtagtcctcactgctacactcccaccatgccatgacagtttacaaatgccatgacaatgtcaagaatttaccctatatggtcta

SEQ ID NO: 750363 - DNA, 538 bp, Homo sapiens
gaacgcacaggttagttccataggtatacttatgccatggtggtttgttgcacctatcaacccatcatctaggttttaagccctgcatctttgtctactttttaatgagattgtttgttttttgcttgttgatttgtttcttatagattctgtatactaaacctttgttggatgcatagtttgcaaatattttctcctattctgtaggttgtcttactctgttgacagtgtcttttgctgtgccgaagctctttaatttaattggcctcatttgtcaatttttgtttttgttgcaattgcttttagcatctttgtcatgaaatatttgccaaagcctatgttgagaatggtrtttcttagtttatcttccaggacttttatagttttacatttaagttgttaatccatcttaaattaatttttgttatgatgtaaggaaggggtccagtttcaatcttctacgtatggccagtcagtatttccaatacctttttttttttttaaataaggagtcctttttccattgcttgtttttgct

SEQ ID NO: 750364 - DNA, 630 bp, Homo sapiens
ccagggataaagtctacttgattgtgatggatttgctttttgatgtgctgtttgacttgacttgctagtattttgttgaggatttttgcatttatattcatcacagatattgcctgaagtttcctgtcttttggttgtgttgacacatttggtacttttatactttctgtctcttaacaaattcctgtagtttttaatagttttgtctttgattttcatactaaagatataattaatttttacatgaccatcacagtataaaaatgttttgaggttgactacatacttacttctatcagtgagtttcatatttttatatatttttattttgctgcttagtgatcttatttttctgyttgaaagactccttttagcatttcttgtaaggcaagtgtgctgctgataaataccttcaacttttgtttgtgtcagaaagttttctatctccattcaatttttgaggacaggattactggctatagcattcttagttagcattatttttttctttccgctttttgaatatatcattgctgtagcctgttgtttctgttgcaaaatccactgaaagtcttatagatgtccccttgtatgtgacaacttgcttttcccatgcagctttccatattc

SEQ ID NO: 750365 - DNA, 630 bp, Homo sapiens
ccagggataaagtctacttgattgtgatggatttgctttttgatgtgctgtttgacttgacttgctagtattttgttgaggatttttgcatttatattcatcacagatattgcctgaagtttcctgtcttttggttgtgttgacacatttggtacttttatactttctgtctcttaacaaattcctgtagtttttaatagttttgtctttgattttcatactaaagatataattaatttttacatgaccatcacagtataaaaatgttttgaggttgactacatacttacttctatcagtgagtttcatatttttatatatttttattttgctgcttagtgatcttatttttctgtttgaaagactccttttagcatttcttgtaaggcaagtgtgctgctgataaataccttcaacttttgtttgtgtcagaaagttttctatctccattcaatttttgaggacaggattactggctatagyattcttagttagcattatttttttctttccgctttttgaatatatcattgctgtagcctgttgtttctgttgcaaaatccactgaaagtcttatagatgtccccttgtatgtgacaacttgcttttcccatgcagctttccatattc

SEQ ID NO: 750366 - DNA, 598 bp, Homo sapiens
ctgggtgcggtggcgggctcctgtagtcccagctactcgggaggctgaggcaggagaatggcatgaacccgggaagtggagcttgcagtgagccgggatcgcgccactgcactccaacctgggcaacagagccagactctgtctcaaaaaaaaaaaaaagwagcatagttgaataaacaaggctgataaactctgcaacaaagtaaatttagtttggcaaacaatagttttcattttagagtaaaccagcctcgtatatatggctaaatcagctctggactccttaattctcaacactccttttacctatgtagactcattcattgtacagtacgcttcatctctctaacccaactgcattgctttctatttttttagtcatgttcataacaatccatcttcctttttctatatttagtctatttttatacccactttaaaaaagaaagcctcttcacaatatcaattttctgtgattcttctcaggcaaggcctaacctctttttttgttattttgaaatgaccatagtatgagaaacaaaggggtagaatgaaaaaaaaataagcaaactttttataaggtttagaaatccttatt

SEQ ID NO: 750367 - DNA, 646 bp, Homo sapiens
gggccacggggatccagggcactcatggaggggtgccaggcagagggaggagttgtgaggccagaggggctggcacacagagggtgcaagtggaaggggagaggcgggtgggcggggcctaggagaaggaaggagtttgccttagtcccatgggccctggagcacctccaaagggtttaattagggatgtgacggagctgtatttccgcaagttcattcattttttgttttttgcttgggttttttttttagggggggacaaagccttgctctgtcacataggctgaagtgcagtggcacagtctcagctcactgcaacctctgcctcctgggttcaaatgattctcctgcctcagcctcctgagtagctgggattacaggtgcccaccaccatgcctggctaattttttgtatttttagtagagatggggttttgccatgttggccaggttggtctcgaactcctgacctcaagtaattcgcctgccttggtctcccaaastgctgggattataagcataagccacatcgcatggcctcattcattctttttttaatccagtaaatatctgttgagtacatgctgtgtaccgggcactgttctgggtctatagcagtgaacaaaaccaaatcctattcctcgtgg

SEQ ID NO: 750368 - DNA, 632 bp, Homo sapiens
ctctgttgcccaggctggagtgcagtagcgtgatcttgactcactgcaatttccgcctcctgggttcaagcaattctcctgcctcagccttccgagtagctgggactataggtatgtgccaacacgcctggctaatttttatacttttagtagagacggggtttcatcatgttgcccaggctggtcttgaactcctggcttcaagcaatcctcctgcctcagcctcccaaagtgctgggagatgtagtctcgccctgtcrcccaggctggactgcaatggcacaatctcggctcactgcaacctctgcctcccgggttcaaacgattctcctgcctcagcctcccgagtagctgggattacaggtgcccaccaccacacccagctaatttttggatttttagtagagatggggtttcaccatgttgggcaggctggtggacatcatatattaatctgatttaatcctcatgaccctcttagtgctcatgacagatcaggaaactgaggcccagacatccccaatgatacgtagccaatagagctggggtcaaagcccagatctgactccaaagaggatggcaggaacaggatgggaccatggatgggatccccatggtgccagtggtcgcct

SEQ ID NO: 750369 - DNA, 547 bp, Homo sapiens
atccatttttttcagggacctgcagcaaagtttgtaactggccagtttgctgggtcgtcttgaacagcaggcttataggtgtccaaagcctgtgttttgtcctaatgtacctctcttgatgacagaacaatacagaaagacatgcaaagcagaccggatttgttacagcttaagactagcctcacaaatcctttttcccatgaatcaaaactttacagaagataaacagtgatttttaccattcattcaaccagtttgcacagaatgagcgagagagaggaaagcattgcctgaagcagggtggggaaggcgagtyacttagagaggccagggaaagatccacacactgcagtgacactgaaaagttcaggtgaccgcttgtcggtaatgaagggatcttttccagcagtcccatcagctctcaagtttccccttttagggtgaaaaaagctccccatgtcccacgatcctgtacatgcctaattctgtcacccatagcggtcagcaaagagtacaaggcagattattccaaacagaatagcagtta

SEQ ID NO: 750370 - DNA, 442 bp, Homo sapiens
aactgggaacaaagagggagagttaattgggaagccaacatcatttattcactgactcatttatttatttaacaaatatttatttagtatctattgcacctcattctagtagatgccaaggatataatggtaaacaagatggattcaatctctgacttcatggagcttaaaatttattggaagactcaagacaattaggcaagtagatagaagaaaatgtagtaagtactattttacctccatataaaacacatttctaatattagggctgtcagaatgatggtaaatggtaratgagttggccttggaagtattcaagaagaggttgttggggatattgtagaagttgttccaggattttggcattaaaagtcaaacaggattccaattaccattaaaatcctgtttgacttttaatgccagtgatcatatatgtcttgta

SEQ ID NO: 750371 - DNA, 628 bp, Homo sapiens
taattgccatagacatacttagcagctggcagaacccccacattggctccctgactggtagagtgaggactactgtggtgggaaaggccaaatggaagccactgaagctacttctacctagaaaaatagtaaatcaaaaacaatattgcaaccctggagggattgcggagattagtgccaccatcgaggacttgaaagacacaggggtgatgattcacatcacatccccgttcaactcccctatctggcctgtgcagaagacagatggatcttagagaatgacagtggattaycataagcttaacgaagttgtgactccaattgcagctgctgtaccagatgtggtttcacttcttcagcaaattaacacatctcctggtacctagcatgcagccattgacttggcaaatgcctttttctccattcctgtccataaggcccaccagaagcaatttgccttcggctggcaaggccagcaatataccttcactgtcctactacaggggtatatcaactctccactttgttccataatcttattcagagagaccttgattgctttttgcttccacaagatatcacactggtccattacattgatgacactatgttgactggatccagtgag

SEQ ID NO: 750372 - DNA, 545 bp, Homo sapiens
accttctacctcagtaaaatttctagaggtccagtggtgtggggcctgtcaagatactccttctaatgtgaagggtaaattgctgcatttggcccctcctacaacccagaaagaggcacaacatctagtgggcctatttggattttggaggcaacacattcgtcatttgggtgtgttactccaactcatttattgagtgacccgaaaagctgccagttttgagggggtccagaacagcagaaagctctgcaacaggtccagcctgctgtgcaagctgctctgccacttgggccatgtgacccaacagatccaatgatgcctggggtgtcagkgacagatagggatgctgtttggagcctttggcaggcctccataggtgaatcacagtggaggcctctaggattttggagcaaggccctgccatcttctgcagataactactctcctttggagagacagctcttggtctggtactgggctttggtggaaactgaacatttaactatgggtcatcaagtcaccatgtgacctgaactccctatcat

SEQ ID NO: 750373 - DNA, 522 bp, Homo sapiens
tttaattcctcttttgggaccagcaaaaaataactggtaacaatagagaatttacagtaaaaaggcatatgaccaaaaaaaaacaattgaacaaattatccttataggtacaattctttgattgattcttgattcttcaattgaaaaattgtccctgcagctcagatttctcaattgtaataaaacctgtgggacaaatgcaaatttaatcgttttagtggtttaattttgaggcaatttttatttcatttygatcaatagacatttatttcaagatacactgcagcctattattgtgaatacttcaaacctactctgatttcatccatctggtataataacattcagtctcctcttggtttcaaagatgttcaagtcagccataataaccgacttccattttgtgtcatctcttggcgtgcacacccaaaatattgaatgctattgagagtgatggcatacccaaaacactgaatgctaacaagatgaaatgaaaaatgcagtgcaaagccatgagaggag

SEQ ID NO: 750374 - DNA, 619 bp, Homo sapiens
ttacacccatccaagtttaatgaaagcagaaaaacaatgaaaatgcaaggtatacacaaaaggactccaaagttataacagctaagagctcttcttgaggatggaggaaagaaaatactacttgataatcaaatatatacaacataaaatttaaaaagtaaacaaagaagttggaataaaggaagatattacatgaaagaatagtgggaaccatttgtttagttaaacatagatgtaaagctaaacatctgcagactgaaagaacacactgttattatgacaaagaataatcatattmtctgtggtgccttgtaattatttaattgaatgaaagtgttctaagtttaaaagaaaaaatacattaagaaaaaaattatagcaaaaacataatgcaccagaaaagtgcaagaacattttagtaaaaataagggattagagatagatttcatggcagtaggaaagagaatgcttttatcattttttattgggtgttaaaaggtatgatttcatctttaaagaaatatatcagtaagaatagtcaatatattttcttattttaaataaagaactttgtttcacctaaacatatttagctgaatagttgagtatcatacttaat

SEQ ID NO: 750375 - DNA, 619 bp, Homo sapiens
ttacacccatccaagtttaatgaaagcagaaaaacaatgaaaatgcaaggtatacacaaaaggactccaaagttataacagctaagagctcttcttgaggatggaggaaagaaaatactacttgataatcaaatatatacaacataaaatttaaaaagtaaacaaagaagttggaataaaggaagatattacatgaaagaatagtgggaaccatttgtttagttaaacatagatgtaaagctaaacatctgcagactgaaagaacacactgttattatgacaaagaataatcatattctctgtggtgccttgtaattatttaattgaatgaaagtgttctaagtttaaaagaaaaaatacattaagaaaaaaattatagcaaaaacataatgcaccagaaaagtgcaagaacatttyagtaaaaataagggattagagatagatttcatggcagtaggaaagagaatgcttttatcattttttattgggtgttaaaaggtatgatttcatctttaaagaaatatatcagtaagaatagtcaatatattttcttattttaaataaagaactttgtttcacctaaacatatttagctgaatagttgagtatcatacttaat

SEQ ID NO: 750376 - DNA, 613 bp, Homo sapiens
tgatttgctatacagaataaggtaactggttcagccttgcagacagttaaatggcagaaccaacatatttaaccccaaatgtcattctagaacctattctcttaaccatgaatgctctgtttgcttacacactcatttttaacacaaagttaaaagttattcaagcatctcacaaactccatgtcacagataagaaaactgaggcatgaagaggttaaaaacataattggtgatgaccaagtgtggtggctcactcctgtaatcccagcattttgggaggctgaggcagatggatcacctgaggtcaggagtttgagaccagcctggccaacatggtgaaactccatctctactaaaactacaaaaatcagccaggtgtgggggcaggtgcctgtagtcccagctacttgggaagctgaggcargagaatcgcttgaacctggggaggcggaggttgcagtgagccaagattgcaccactgcactctagcctgggcaacagagagagactccatctcaaaaaaaaaaaaaaaaaaaaaaaggaaagaaagaaaaaaaaattaattggtggccgggtggcctaattccaagacctattctcttagtcactatgc

SEQ ID NO: 750377 - DNA, 613 bp, Homo sapiens
tgatttgctatacagaataaggtaactggttcagccttgcagacagttaaatggcagaaccaacatatttaaccccaaatgtcattctagaacctattctcttaaccatgaatgctctgtttgcttacacactcatttttaacacaaagttaaaagttattcaagcatctcacaaactccatgtcacagataagaaaactgaggcatgaagaggttaaaaacataattggtgatgaccaagtgtggtggctcactcctgtaatcccagcattttgggaggctgaggcagatggatcacctgaggtcaggagtttgagaccagcctggccaacatggtgaaactccatctctactaaaactacaaaaatcagccaggtgtgggggcaggtgcctgtagtcccagctacttgggaagctgaggcaggagaatcgcttgaacctggggaggcggaggttgcagtragccaagattgcaccactgcactctagcctgggcaacagagagagactccatctcaaaaaaaaaaaaaaaaaaaaaaaggaaagaaagaaaaaaaaattaattggtggccgggtggcctaattccaagacctattctcttagtcactatgc

SEQ ID NO: 750378 - DNA, 613 bp, Homo sapiens
tgatttgctatacagaataaggtaactggttcagccttgcagacagttaaatggcagaaccaacatatttaaccccaaatgtcattctagaacctattctcttaaccatgaatgctctgtttgcttacacactcatttttaacacaaagttaaaagttattcaagcatctcacaaactccatgtcacagataagaaaactgaggcatgaagaggttaaaaacataattggtgatgaccaagtgtggtggctcactcctgtaatcccagcattttgggaggctgaggcagatggatcacctgaggtcaggagtttgagaccagcctggccaacatggtgaaactccatctctactaaaactacaaaaatcagccaggtgtgggggcaggtgcctgtagtcccagctacttgggaagctgaggcaggagaatcgcttgaacctggggaggcggaggttgcagtgagccragattgcaccactgcactctagcctgggcaacagagagagactccatctcaaaaaaaaaaaaaaaaaaaaaaaggaaagaaagaaaaaaaaattaattggtggccgggtggcctaattccaagacctattctcttagtcactatgc

SEQ ID NO: 750379 - DNA, 672 bp, Homo sapiens
ctggtctcatctcccattacaccatctccccaaaccccagttcttccacagttgtcttaacttatcctatcttctaatggtgctgaacttcttagagtccctgagatatgctaggtcttttcactagctgtttcctctccctggaaaagttctatgcatctttcagggtatagcatcaatgcttcctgctgtgaaagtgttccctgatgtccccaggcatttattcatagaacaagtatttcctttgcacccactatgaattasaccctgttctaggtcctggacatagcagtgaacaaatcagactaagtctcttccctcatggagtatttattctaatggaggggactaaaaatgaaagaaagacaatatatacgatgttagggaatggcaaaaatgaagaggatggaaatctggggaagaggatgagggagccatctcatttatgtaaactatgatgtattagcagaatagactaggttatgttgcaatagcaaacaattctctaaaatctaagtagtttataacaacaaagatttgcctctagctcatgcttcatgaccactgaaggtcagctgaggcttagccccactcgagaaataggcctgagcaaacatttctagttgccccagcagagactaaagaaaatgaagcaaagcatgcaccagctgt

SEQ ID NO: 750380 - DNA, 628 bp, Homo sapiens
tataacagcctctaacagctgcatggaaaatctggtagcagaggcccaggatttctggcttcgatcatcatttttagggagactataaaaatgaacagaagactttcttacttgaaaaacatagattccaagtctgaaacaatttaatcttcctacatgagtcaacccttggaaagaaacagactcaggtggtaaaccgcaggccatttacataccccatggtttgacttttactttaaggagaggaaagatgggttgatgagctcataaataaaagtaacatattacccataatattagaggagaatgtactagggttctttaaggctctgtttaagctagtaaattttctgcctaaagtgtgtggtataaaatcctcagatgtgaatacacagtttttccacttccacccatgtcgatttcagagatttcaaattaacagagtgtgttcctcratcaagttcatctaaaatgcaggttgtaacttttgctgctaagagaaatgctaatatttaatgtaaatgagaaaagcagttcatccagaagatatcaaaaagatctttagtacattccttcacaaagatgattcctttccttttcggaaaaataaaattactcccctctaatt

SEQ ID NO: 750381 - DNA, 570 bp, Homo sapiens
acacatctttaccttaatagagtgttcaaaatagtgaaaatctactttgaaagagcacaggtaaggctgtaagcaaacttaaaaacaaaaggttggcccaacatatttcttataagaagggcagagtgaattcagcatccgctgcaacaggaattcagcatcttgtaggtgacacattacataatgaaaatagtgttttttacattttaatattatcattcataaaaccaaaaccttgctgatgaatttaaataggaactgcatctgtgaatagaaactgctttatttcttcctttctgattgctatgcacattttattttcccccttattgcactggatgacacttcctgttcaaggcagggaaggagcagtgagagcattgagagttctttgaacaaayttgtaaggcagacttcttcagtttattgtggtataggacatcataaaaaccttaagtgttcaacttaatgtacctatgttcaaatcaatgtatctattatattaatgtgtctatgttcaaattaatctatagaaagcacaagtttttttctgtatttgtatttttaaag

SEQ ID NO: 750382 - DNA, 621 bp, Homo sapiens
taattaaaatttttagaccaaagaccctttcaaatcaataagaaatatactaagatccccacagaatggaagtttagaaaagaccttaaaaccatctgttcacagaataaatacaaatggccaataaatgcaaggaaatatgttctgcctatagaaatctaatacataaaaatagatccatttaggagatctatcatgtttcatgtttttaccataaaattaactgaaatagcaacagtgctctattactaaactctaacgaaagtgtgttgagacaggcatgcctccatgctagtaatatatagtgacacaattgctctagaaaggaagctgacaatatgaaacaactgctttatagamtatatatgccactaaatccagtgtttctatgtatagatatctcatctacagaaaaaagcagagatatggacaaggattttgtataatgatatacatctcagccataattgctataaaaggggagagggtatgtaatgtttacatattcaaagtaatcttgcttttttcatactcaataaaagcccccttatcggaatgaaatcaatagttagtgggaaaaagttgataagcaaaaataattttttaaatgatgcatacata

SEQ ID NO: 750383 - DNA, 488 bp, Homo sapiens
gacttcacaagagtttcatgtagtggaaagagtgtgaagttgatttaccaactttttcaggttctgaagcagatgaatcatgagtaaaataacttgataggtatatattgaagcctaaatgttggtatgagtgtacttgtcttagtccacgtgacggacaatataccatattcccgttagaatgctgggagatactctccccatcattactccaaaggtcatacaaattagtacatgaattctactcattagctaaaatcagataattctaaaatgcattgctctcaatggttaaatattttyttgaattttaaaacaaactaagtaaagcctacaattcaaaaatgactctgtatggtttcattaaaacttacattttgacactttctcagaaaaccaacacttcataattaatgaatgttcagccaaatgttgaccttctgaataactggagaagtgcaaacttaggaggaaaaaaaatggcttta

SEQ ID NO: 750384 - DNA, 669 bp, Homo sapiens
tattaggaaccccctgcactatctccctcccccaactgctagagagtttgtcattgggagggaagaggaccttattttcccatgatctagcatcacaaattcctgtaattcatagcgcaaatactctaaagtttcatctcttttcatgcccagtcaatgcctagtcaattcttctaattccttctgggagaaagcctcagttaagtgctaaattgtctttagtacctgttaattatcctgctaaactatgaaacattctgagtttccagtgtagaaaacagcatctgatgttgacttttcttctgaaaggcaggaggtgaaagtagaagagctccaaggaacaggaaggtagtgaatgatagtcatggcactgtatgaaaccatgaattctgaacctcacygtctgggagattttttctgtattagttcattttgcaaagatttagcatgacattggcacacaaatgggttctgaatcatttagtcctacaatatttagagaatatatttcttcaacctctgtttataataattaaatttccacttttagagttttctttgctctatttttatgtttttttctattttagagaagggtgcataaactataactttttcatagcaagtttaaatgaaaatttagattcttgggaaacaaagcaggcaaaa

SEQ ID NO: 750385 - DNA, 623 bp, Homo sapiens
tcagtacaaatagagatagcctccatgtaaaggaaaagaataaagtgagtccctaacttcattgcaggccccagcaccatgcctaccccagtggattccagaaccaggccagtcctcatgtccccagacctctctctggcccccatggacccagcatccaggcccatgtcrctgccaaactagcccctgtagcctgtggcctcaggcctcaggctcattctaatatcagaccagccctcacagctccaggcctgctctgggccaccccagtgccaggaaggcccccataagtcaggctgcaggccagccctagtagtcccaggctactagggactagagttcatgtaagccctcctacatgaactcaggtacgaggctcattcatatggacccaatgtccaggccctccccagtagacccaggctccaggcttgcccctacaaaaaaagacatcagattgacccctgtggacttaggcactaggcccatgaacccactgacctaggcagcaggccagcctgcctgaggactcccgtggcaagcccactgcaaaccccaatggataacctggtcagaatctctggacaagctgtctggtgaagggctttccttgccagtctgta

SEQ ID NO: 750386 - DNA, 623 bp, Homo sapiens
tcagtacaaatagagatagcctccatgtaaaggaaaagaataaagtgagtccctaacttcattgcaggccccagcaccatgcctaccccagtggattccagaaccaggccagtcctcatgtccccagacctctctctggcccccatggacccagcatccaggcccatgtcgctgccaaactagcccctgtagcctgtggcctcaggcctcaggctcattctaatatcagaccagccctcacagctccaggcctgctctgggccaccccagtgccaggaaggcccccataagtcaggctgcaggccagccctagtagtcccaggctactagggactagagttcatgtaagccctcctacatgaactcaggtacgaggctcattcatatggacccaatgtccaggccctccccagtagacccaggctccaggctygcccctacaaaaaaagacatcagattgacccctgtggacttaggcactaggcccatgaacccactgacctaggcagcaggccagcctgcctgaggactcccgtggcaagcccactgcaaaccccaatggataacctggtcagaatctctggacaagctgtctggtgaagggctttccttgccagtctgta

SEQ ID NO: 750387 - DNA, 550 bp, Homo sapiens
cattttaacaatttttttatgcatgtggctgttacatagccacataatatatgtttacataggtcttatgtacaagggaaggttctaagcacattatacagattatcttgttttatgtcgggaataggtatcattattcgtttcattttacagattgggaaactgagttccagaaaggttaaataacttaatgtaggtcacacagctagtaagtggtgtagrttatattctatcctaagttgactgacttcatagtctgtgatcttaaccatagttccaacctgctttctgttacagatgagtatgctacagatgccttctgcttatttagggttaatgctttcatatattaagaatcccccaagactcaatttcataaagatattttaaattattatcttaaggtttgatggtttgccttcagtatttaagtgctttacctacctaatattgattccagtctatggtacaaagcatgggtttaacttaattttttgacatgttcaattgtctcaacaccttttattaaaaagcttatattttccttatt

SEQ ID NO: 750388 - DNA, 550 bp, Homo sapiens
cattttaacaatttttttatgcatgtggctgttacatagccacataatatatgtttacataggtcttatgtacaagggaaggttctaagcacattatacagattatcttgttttatgtcgggaataggtatcattattcgtttcattttacagattgggaaactgagttccagaaaggttaaataacttaatgtaggtcacacagctagtaagtggtgtagattatattctatcctaagttgactgacttcatagtctgtgatcttaaccatagttccaacctgctttctgttacagatgagtatgctacagatgccttctgcttatttagggttaatgctttcatatattaagaatcccccaagactcaatttcataaagatattttaaattattatcttaargtttgatggtttgccttcagtatttaagtgctttacctacctaatattgattccagtctatggtacaaagcatgggtttaacttaattttttgacatgttcaattgtctcaacaccttttattaaaaagcttatattttccttatt

SEQ ID NO: 750389 - DNA, 642 bp, Homo sapiens
gaactccatgccccaatatgtgcctttatttaaatggccaggccactggaaaagacattgtccatttttacaccagccatccgatggaccggctctttttggtttggactgtttctccactagaggaagccccaaagsctcactcttaagacaataatcaaccagtctctcagacagaagaaagaatatctccatggtgggcatttcaagtcaagtctatatcctcatatctgaacctatctgccacttgggccattttcagaaaaacatttgcaagaatgagtcctgttttctctgttcgatgctccttctcccacgggagcctctcagttgactgaaacccctgttctcaaacccctgactctgtgccctgccacctctgtccacttcttccttgtcatgatctttgatgagacaaattattttacgctgactggtaactctattctgacagcactttctttttttaaaaattcatattgtgtttaatatctaggacagactaaacatataatttaaattaacttcaaaacataattttaaatatgattaacattgatctttttaagatatgcctgaattaaatttggtcaaaacacaaaaattatttatatactgctattaaggaatttgtcactctca

SEQ ID NO: 750390 - DNA, 378 bp, Homo sapiens
gctgagcaaagggggaaaagcccattataaaaccatcagatcttgtgagaactcattcacgatcatgagaaaagaatgggggtaacctccaccatgattcaattatctctcattaggtccctcccatgacacatggggatcatgggaactaaaattcaagatgagatttgggtggggacacwgccaaaccatatcagacttgttatgtaaatttaaaacaattgtaagagtttctagtcactcagtcatctctcttaaacatccttataaatggaagtattattattattattgttattattgagacaggggtctcactctgtcacccaggttggagtgcagtgtgcagtggcacaatcattgttcactacagccttg

SEQ ID NO: 750391 - DNA, 598 bp, Homo sapiens
cagttgctcaagccagacccaactgagagtcacccttgagcctacccttctcttaccaccaatctactgccagtattgttgattctatctccaaagtacatttcaaacaaatctacttctctgcatctctattgacatcatctagctcaagctgacaacttcctctctcaaacccacarccagtgaccccgagtgcaggctcacacagcctctgtcaactccaccttacttgtctgttttctgttcctcaagtacaccaagttcattcccaccccaggacctttgcacttgcaattctctctgctctgtcttctgatcttctcatgcctggttccttcctgtcactctgatagtagcttaagtatcacctgttttgagatcttccttgcctactcaatctaaaaaattatgagagacttaagttcaaattctagctccctactttctaacagtaaggaaaaaataaagagtgagcataggaagcaggagagtgaacaacatgtaacactaactgatatggtttggctctgtgtccccacccaaatctcatctcatagctcccataattcccgcatgttgtggaagagactcggtggga

SEQ ID NO: 750392 - DNA, 598 bp, Homo sapiens
cagttgctcaagccagacccaactgagagtcacccttgagcctacccttctcttaccaccaatctactgccagtattgttgattctatctccaaagtacatttcaaacaaatctacttctctgcatctctattgacatcatctagctcaagctgacaacttcctctctcaaacccacagccagtgaccycgagtgcaggctcacacagcctctgtcaactccaccttacttgtctgttttctgttcctcaagtacaccaagttcattcccaccccaggacctttgcacttgcaattctctctgctctgtcttctgatcttctcatgcctggttccttcctgtcactctgatagtagcttaagtatcacctgttttgagatcttccttgcctactcaatctaaaaaattatgagagacttaagttcaaattctagctccctactttctaacagtaaggaaaaaataaagagtgagcataggaagcaggagagtgaacaacatgtaacactaactgatatggtttggctctgtgtccccacccaaatctcatctcatagctcccataattcccgcatgttgtggaagagactcggtggga

SEQ ID NO: 750393 - DNA, 633 bp, Homo sapiens
taatatgtattttttttaatgtaaagaagaaggcggccgggcgcaatggctcacgcctgtaatcccagaacttggggaggccgagacgggtggatcacgaggtcaggagatcaagaccatcctggctaacacagtgaaaccccrtctctactaaaaacacaaaaaaattagccgggcgtggtggcgggcgcctgtagtcccagctactcaggaggctgaggcaggagaatggcgtgaacgcgggaggcagagcttacagtgagccgagttcgcgccacctcactccagcctgggtgacagagcgagactctgtctcaaaaaaaaagaaggcaaagcttgtgtaccctgagttatactcctcgatatccacaggttttccaacctggtgaggtatcgacccttccttgaattaactcctattctactttcaagaggattacagctatcacacttggggcctccctttggggatgttcctcacatgtaactggtaggcccctggccccctattttctgtccgctcttcatgaagagtggttgagctccccaacctcttcctgtactctttgggatagggaagcttcccacatctcattcaacaacatgttaaaaatattgcttgctgctcaccaa

SEQ ID NO: 750394 - DNA, 633 bp, Homo sapiens
taatatgtattttttttaatgtaaagaagaaggcggccgggcgcaatggctcacgcctgtaatcccagaacttggggaggccgagacgggtggatcacgaggtcaggagatcaagaccatcctggctaacacagtgaaaccccgtctctactaaaaacacaaaaaaattagccgggcgtggtggcgggcgcctgtagtcccagctactcaggaggctgaggcagragaatggcgtgaacgcgggaggcagagcttacagtgagccgagttcgcgccacctcactccagcctgggtgacagagcgagactctgtctcaaaaaaaaagaaggcaaagcttgtgtaccctgagttatactcctcgatatccacaggttttccaacctggtgaggtatcgacccttccttgaattaactcctattctactttcaagaggattacagctatcacacttggggcctccctttggggatgttcctcacatgtaactggtaggcccctggccccctattttctgtccgctcttcatgaagagtggttgagctccccaacctcttcctgtactctttgggatagggaagcttcccacatctcattcaacaacatgttaaaaatattgcttgctgctcaccaa

SEQ ID NO: 750395 - DNA, 595 bp, Homo sapiens
atggattataggttttgttttgtttttaagttttcagaatgttttcatgatagtttaagcccatacaaatatcattctttagaccacagattggcaaagtatgacctgtgggccacatctggccagcggcctgtttttgtaaataaagctttattggaacacagccacactcgcttgtgtacatactgtctgtagctgcttttgtgccacaaggcagagttgagtagttrcaacagagaacatatgtggtccacaaagcctaaaatatctgccatccggccttttacaaaaaaatttgccaactccctttttagaccaacattgacacaatctcattttcctcactaatttaacaggaggaagtttatatattaatgcaaaaatagaacacatggcccttcctcaaaatgtaccccctctcatatcttataagcatgtcactgcttttctatacaagaagcattttttagagtagctgtaaagaacagagaatttgagtcctgactccatgctctccagctgtgtgactttgggccagtccttcagtctctcatgcctcagtttttctcatctgtatagggggattgtgatcata

SEQ ID NO: 750396 - DNA, 625 bp, Homo sapiens
caaatccagagctcacaccccctcgccatctcctttatcaaactcacacaccaaaccaatatttccctggccttaatagagggccgtgcacgaggaaccaccccatagctcagagcctgctaaaatattcaaactgttcaatcctaaacttccccagtgtagctacgctgcatcacccattcttccctgcaaaaccccactaaagactctgggccatgctccccactcttcctcttctgcctcctgactggcccggtgctcccctgagtagcccccgagcatgacctgccctcctgtttctaggatctgagtataaagttctttcctgacaattatccaggtstgcatgtcttaccatatccgattaaaatcaatccttggcccattttaacacaattctctcactgtcttccttcttttgcgagttttatgacttttgcccactactatatacaacttgtcattttttaaatcatgaagtcatctttgcatattaaagttataatttctttatcacgttacaaatattgtagcagttggagctctgtgaattattagtcattgttagtgtttagatgactacccagacatttgaatgtatgtgtgtgtgtgtgtgtgtgtgtgt

SEQ ID NO: 750397 - DNA, 571 bp, Homo sapiens
ccacccagttgttcttccccccaaattaaaaggaaagttgggagaggaatcacaggtttttttaattgacggattagaaaacgagaagaacgtgtttaatcccagtggctagagtatagcattgcatcggatgtagccacctcctarctttttgattaagtgttgcttgtggaaagtgctaggttcacatgagaggtcttctgagctcagtgtcgttttaaaaacagtgtgcggttttccagtggaaaacccaaagttccctgaggtgccggctgactgggcaagtcagtgtaggggaaactgcctgctccacagccctcccctgggcacattttgttcctgggttcctgtagtgcccctcagccctggttagaccacctaactagcagtgtaggggacagggtggccagtaacctgagagaggacctgaggctgcaaagccccacccagacacagactggttaggagccaatggtttcaattccctttcttgggaatccagagtgggaaaggtgagtgaatgacccgcggagagccagtccaccgaccagacaatggctgctggagcgct

SEQ ID NO: 750398 - DNA, 622 bp, Homo sapiens
aaaagtgaaagtagagaggccaatcaggaggctattacaaaaattcagagaaggaatgatagtagcttgagacaggatggcaacattggagcaggtaggaactaattagattctgcctgtgttttgaaggtaaagccaactgttttttcaaacggattgaaaatggaatatgaaacaaagagaggaattttcttgagttggttttcactcccattctcttcctggtaatttatctatcaaagctttcaattttgttcaacttcctgtcaatgtaatccaaaaaagactaaccagttcagtgtagaagaagcctcttaattgcacattctctgtggatttgggctaaatttatttggcactgtattaccactcagttgacttyaattgaaattgcagaaaaaagcattatgtctgctaactgtctgcttcttcaaaaatgtttttctatttctttcatcaatgttttgtagctttcattgtcaagagtttttacctccttgcttaaatttattcctaggtcctttattattttttgcagctattgtcaatggaattgctttcttaaatttagagctaatttgttattggtgtacagaagtgctactggtttttggatgttgat

SEQ ID NO: 750399 - DNA, 602 bp, Homo sapiens
aatagatatttctcaaaagaagacataagatggtcaccaagtatatgaagaaatggtcaacatcacgaatcattaaataaatgtaaattaaaataatgatgagataccacatcaacatagtgagaatagctattatcgaaaagacaaaaaacatgccactaccacatgagcatatgcacatgtgtggaaactgttgcattgttgctactagtgtgcatggatgatgatgctccatcaccacacatgcgcatccagacatgaatcctctcccacgctagagtacatgtgcatgctggccccacttccaccaycccactcaagtgcttttgttagcaacccccataagagtgttggttgcctgtggactgtgagccctcagcccctccagcatagcaggtgcttaatcttgaggggtcagagaataatacaatgccctgatacctgccgcttatggttagggtatgcagtcagcagtgctaagctcaggtatggccaccagaaatcatccagaatgaaaccattcatctgaactcaacttataccacagtcaaatcctcaaaggcatccaggtatataaaataaaattaaaaaaaaaaaaacat

SEQ ID NO: 750400 - DNA, 502 bp, Homo sapiens
tttccataatgaatgagtttaaattccagataaagaacaaaatgcacacacacaaacaaaaagtttagtgttcatctttaggagtgagaaaaaacggagacatttttgaagactgcatttcactatgcaagcccccttggaaatttcagaatgataaaggataaaatggtggtaggagctsgtgaaagaaaggtaatcagacaaagatctagtctacagcaacagcagaacgggaaaacaaagagaggtccagagaaacatcttcttctcttcagatgttccctaacatattttttgtttactaatgttttctgggagttacttgagtatttctttaagttgcacattatttcctgaagccatttagtgacacagtttttcttttcttttctaaagcttgataattcttagattaagaagtttctctcattccccagtttttatttcatatttttaactagtttatacaaaatctgtgctcttatttatttccctaacactg

SEQ ID NO: 750401 - DNA, 517 bp, Homo sapiens
gggtgtcaattttagatctttcctgctttctcttttgggcctttagtgctataaatttccctctacacactgctttgaatgtgtcccagagattctggtatgttgtgtctttgttctcgttggtttcaaagaacatctttattctgccttcattttgttatgtacccagtagtcattcaggagcaggttgttcagtttccatgtagttgagtggttttgggtgagtttcttaatcttgagttgtagtttgattgcactgtggtctgagagacagtttgttataatttcygttcttttacatttgctgaggagtgctttacttccaactatgtgttcaattttagaattaagtattatgtggtgctgagaaaaatgtatattctgttgatttggggtgtacagttctgtaaatgtctattaggtctgcttggtgcagagctgagttcaattcctggatatccttgttaactttctgtttcgttgatctgtctaatgttgacattggggtgttaaagtc

SEQ ID NO: 750402 - DNA, 536 bp, Homo sapiens
tttgattaactggaagaagggtatcagtgattgaagatcaaatgaatgaaatgaagcgagaagagaagtttagagaaagaagaataaaaagaaatgaacaaagcctccaagaaatatgagactatgtgaaaagaccaaatctacatctgattggtgtacctgaaagtgatggggagaatggaaccaagatggaaaacactctgcaggatattatccaggagaacttccccaacatagcaaggcaggccaacattcaaattcaggaaatacagagaatgccacaaagatactcatcgagaagagcaactccaagacacataattgtcagattcaccaaagttgaaaggaagggaaaaatgttaagggcagcctgagagaaaggtcaggttwcccacaaagggaagcccatcagactaacagctgatctcttggcagaaactctacaggccaggagagagtgggggccaatattcaaagttcttaaagaaaagaattttcaacccagaatttcaaatccagccaaactaagcttcata

SEQ ID NO: 750403 - DNA, 613 bp, Homo sapiens
attgctccagcatacaatggagtacagatggttatatatccttcttcttagggaaaagggagatagggaagtgtggattattttaggggggatataaatgatttttaggacaattccacaggcttgaagaacatacagtggcttgggacaaagtttgttgggcccacaaagcacataatggtttgtaacaaaagtatgaccctgtgtgttggcagatttcagtctttattcctgtaagtttagttaatgcaaactaactaaagagggaaacagctaggagtaattgttttctttgacagttccaaactttagtcagagagggaacttcagagatcaacttcattctatgctttaggagagacagaggattaagagacaggaggtgagtggtgcaggttagagagaacttgaagtttcttcaatacagcatgtcaaagtaccatatttyggggtattggtttctgattcccaacattctgaagactgctttgtctgaaattaatataggcattcaaattgtcaattgattggtgttagcatgatatatctttttccattcctgtagctacaacatatctgtctttatatttaaagtgagatcttataaataaca

SEQ ID NO: 750404 - DNA, 605 bp, Homo sapiens
tgatagcagcaggaggcagacaaaccctaggcagacaggggagcatcctcagtgaaacacaaccttcaaactaaagacaagttaaagcctgaaaattgagctacaagtcttggataaatctacagaccagattgagaaccgctcttcctgatcagcgtgctttcttctgattgagccctacccttcacctattttacatatacctacccttccctaattgtttttttacactgtcatgcccatctttgagtggttccttttttatgctttttgtatactcacaaaccaatcagcacacagtcccccattctgagcccataaaacccccggactcagccacacttgggagagctacccaactttgggtacgagactatccccttcaagtcccctttccactgaaaactgttctgtcactcagtaaaactctctgccctgctyaacctccagttgtcagcataacctcattcttcttggacatggtacaagagctcagaacccattgaacacaggtacgaaaaaggctgttacactgtagccctctgcattccgctggcacctggcagacaccccatgcaacaggaccccactcaccaaggtgcagg

SEQ ID NO: 750405 - DNA, 578 bp, Homo sapiens
ggtattccacagtgctaatgggaagaagtatgttttggtactcagaaaacatgcctggcatcagtaatattttgcaaagtagaaattgaacttcttgttggccctcgataatttttctcttgagttgaaaagggagatttaamcatggcctataaggctctacctaatctgttcccagcccctgtcattacctcagctcctacttttgtttatacgttcagttccagcacccctggcctcatcttcactgttcctcaaacataccagtactgctcctgcctcagagctttgttacttgctattccctctgccaggaataaccctccatgaactatccatgtaccttatttctcacatcaagtctttgtgcaaaagtcaccttctccagttggcgttccctgatcatattatgtaaactacaaaccttttcccagtgcttcccagctttatttttcttctaactcttggtcagtatctaatatgttatttaccttgcccataatttctatccctgctaacaaataagtttcttaaaggtagggacttttttcaactgttttgttcaccactatagcctc

SEQ ID NO: 750406 - DNA, 656 bp, Homo sapiens
gctaaacaacaattacattggcaggatctgtctgatgtaactgttttggaactggagtctagtgaaagcttgcaactttcaggggaatacttagatggtaaaatgtgattacttttggtcaatttcagcccttaatacagtagcagctaccatcccccacccttcatcctcatggcaggcagctgtgtatgtgtttctcatgcagctttcacacaggttaagggagccagggtaggcaaaaaggatcctgttctgcaaatatcagkgatctgtgctcttatcactgatttctacttttgaccacagaggtgtggacaaagaggtagcagctattattcttgcacctacccacattgttgcaagcccctcctcctctagctaaagtgactttcaggaaatttaaaaggtggtgtcttcctctccctcctttcattttctctttttttttattttttgagagccatacattgacaagtaggacattcaaaagcaaccacatatatgagggaaattagaaatcaccataaacacccaggggaaggcacaggctcagaaaatgcctgagaagaccttaaatttacactcaggctgatccttggcacaaagatatcctaaataataaaaaaaaaaaaaaaaaaaaaaaaaaaaccccccca

SEQ ID NO: 750407 - DNA, 760 bp, Homo sapiens
ttttagagttatcacacttttagattcaaatctccagttttcaaaaaaatcaaagggcttacagagatcctttaaagtttacccaatttaaaggaaaaaaatttttccaacaaaaactttccctgaaaaaaagacctgagggtagatctacaaaataaaaactttaaaataactgtcttttaaaagggctcaaagacctaagggaagatttggagaaagtcaaaaaaattatgtatgaccttattttaaatttaaatagagagacaaccccctaaaaagaaaccaaaaagaaaatacttgaaaaatacaacaaatgaaattwttaaattattagaggtatttaaaggtagatttgagcaggtagaagaaagaatcaatgtacttgaagataggacaatggaaatgatcaagcctgagcagcatgaagaggaaaggttgaagaaaagtgaacagagcctaaggaacatgtggaacaccatgaagtggaccactatttgcactggggaactggagaagaagaaagagaaaaagaggcagagagaatatttgaataaaatttgaccaaaactttccaaacatgatgaaagtcatgaatataaacacacaagaggcttgatgaactctaagcagagttaactcaaagagacccacactgaggtacatactcaaactgttgaaggccaaggacaaagacaggatttttaaaccaacaagagaagtgactcaccatatacaagggatcctcaataaaattatcagc

SEQ ID NO: 750408 - DNA, 640 bp, Homo sapiens
ttcagctcagggagaggcaaaggtcctttttctttcctcggtatctaatggaaattcattattaaaaaaacagaagtggcagtgcatttatttcattttagaagttttttgtacaataaggtggggatgctgagggcaattttcttttcattactttatatcaagtggattcagtctgctcttctgtatgctttccggttttagttacttcactggctaattgggtggaaagctttctcyttaaccattttattttctcttttcagtgatcaattgctgatacagaaaacaacagaagaccctattggaggacatgccacccagagctagtctacatgttgcgcctcagtgtcatttcatgaccagagtatcagttccaaggacagccatggaaactgagccaggtattggactcaacattgtattatgtactgcaatattttaccccacagctaaatcaagggacaatggaagagactctccttggttttttttaacatgagtggatgttgaattctattgaaagccttttctgcatctattgagataatcatgtgttttttgtctttagttttgtttatttgatgagtcacatttattgatttgcatatgttaaaccaatcttgcatcccagggataa

SEQ ID NO: 750409 - DNA, 624 bp, Homo sapiens
gtattctgagactttgctgaagttgcctatcagcttaaggagattttgggctgagatgatggggttttctgcatatacaatcatgtcatctgcaaacagggacaatttgacttcctcttttcctacttgaataccctttatttctttctccagcctgattgccctggccagaacttccaatactatgttgaataggagtggtgagagagggcatccctgtcttgtgccagttttcaaagggaatgcttccagtttttcccattcagtatgatattggctgtgggtttgtcatagatagctcttattattttgagatatgtcccatcaatacctaatttattgagtgtttttagcatgaagggctgctgaattttgtcaaaggccttttctgcatctattgarataatcatgtggtttttgtcattggttctgtttatatgctggattatgtttattgatttgtgtatgttgaaccaaccttgcattccagggatgaagcccacttgatcatggtggataagcttttggtatgctgctggatttggtttgccagtattttattgaggatttttgcatcgatgttcatcagggatattggtgtaaaattctcttattttgttgtgt

SEQ ID NO: 750410 - DNA, 489 bp, Homo sapiens
actcactcaatatcatgagaacagcatggaggaatctgccctcatgattcaattacctcctactgggtccctcccacaacacatggggattatgggattacaatttaagatgagatttgagtggggacacaaagccaaaccatatcactgaagaatgcatgagcatttcataatagaaaaattgatcaagaagaagaaataagtagtgagyttgaagacaggctttttgaaaacacagtcagagaagaaggaaaaaagtagtatacaagaatgaagatgcctacaggatccataaaatagcctcaaaaggtcaactctgagaattattggctttaaagaggaggtaaagagataggggtagaaggctcattcaaaggaataataatagataacttctaaaacccaaagaaagacattaatgtccaagtaaaggaagtttatagaacaccaagcagatttaaaccaaagaagaggcttcaaagtcatcta

SEQ ID NO: 750411 - DNA, 658 bp, Homo sapiens
aaggtgtcagagtggatcccacagaatggcatccgtacagagaaggaggtttgggtcccttgatgttaagtttctagagggtttggggaatgcttccaaacaactgcaaagagggctgtgtctattaggaacacattctctacaaactcattggcaacactggtgttcaaactgcactgaaggcatgtaaaaacatggtttttattgttgttctctagaaaataaatatatttggtaccaaaaaacatcccatgaaacttatgatgatgataacaatagcgatttttctgtgtgaatatacagctgtgaaaatatactttcattcaaagactctttaaactgtggaaaccactttagaaagggataattaagttgtattgtgtttataaagttcagagtactttagtaagtaatgtgagaactaatttgtaaagccaggggggagttcaggggkaaaaagtaacgcaacaatggtgatttatatgtgattttcttccaaagctaatagttactcttcttctaaaattcttaggacataattttaaaatgctgaatgacaaaatagggctctaaataccatcactcacctccctcagctcaattctgcagcaggctggggttggctgggaaagaagaaaagcctgtggctagtgttcac

SEQ ID NO: 750412 - DNA, 596 bp, Homo sapiens
aagtctagttggccctaaaatgtagtctttttattgtatcatgtagtctacttggaattcttaacattgagggagaaaaaaaacccactgttgcttttcagaggggaggagatatttttctatttttatagatagttgaattttaaccagaatgagtagaagtgcattatgttcagaaatttgtaaagttttttcaggtttcatttgggwactctgagacttaaggcccttaagctctgggctaatactgggtgccatccaacagcaacaggaaaactagctctcgagagatctgatatatcagaacagatgcccagttgcatatacatttaattttaacaaatagttttcataactataggattttctatatttattaaaaaaaatctggcacatgagaaaatatcaaattgtgctattccacctccatatgtgccagttatctataaatatagaaatgcaataattatcactaaaactgttacttgttaaatttttaaaaacagataaattatgaatatggatttgaaaaatagtttaaggagttaagaaatggataagaatctagaatcactggctgtaactcagatgggatc

SEQ ID NO: 750413 - DNA, 685 bp, Homo sapiens
tccttgaaaaaagaattccccaagtctctaatcatctctctagtcgtaatctccataattgtgtcccttccagattccttcttggcacagcccagagactgatttgctccatgtggttaaaaaccttttattttatgccagttaggacttgttttcacggcttgccttcttgggccttaatgctacattggatgccattgatcttcacaggctccttttctatccccagtgagtgattgtagcccttgtttcatcttcttaatggaggggycgactaaacctgtctgacgggattctaactacagggttccactagggtaccgcctctgcttcattttcttttctccatttagttgatcagttcaatataaaaccattatgaagagaattatttctgccataacattgcctcaaataaaaaatggggttcattggtcttaattcatccttagactattggttctgaaccttggacaattttacccccactcttgcccccaggggacacttagcaatgtctggagacattttcagttgtcacaacttgggggagaggctgctaccatcatgcagtaagtagaagcccagggatactgcttaacaccctgaaatgtatgggacggccccccaacaaagaatcatctggtcccagtgtcagtagcaaagaggctgagaaacctgctgt

SEQ ID NO: 750414 - DNA, 605 bp, Homo sapiens
tgtccacatgcaagtccccactgtgccaagacatgtggttccttcctttgctgccacccgtgaagtagcaaaggcctagagttgagagtgaaatgcaaagggcactttccccaaggaattcattagagttgcaaggaggactagaatagggcaggttttgtttctccatccatatgcaccagggctgccacagttactttctctgagctgctcccatacccaatggaaatcattctaagcagtgagttggcacaagctgctttttaaataaaagtgcttcacaccccggacatctcaaaacgatagcaaatagaaccagagctgaagagataacagttggactatttgagctaatggtcgttttagctccctataaacattttattattaattccataaatrgttaatatgaaaccctttataatgctttcacttaggacttggtaaaatcatccacttgttaggtctataactgggaaaattgcaatacaaatataagtgatcatcatattttggtcacatgtggttaatttttcttagataaaacactgaggaacccaatatggaaatgtcaaaattgcctcggagtgaaaaactcaatttga

SEQ ID NO: 750415 - DNA, 594 bp, Homo sapiens
atggggaaattttttttttcctcctctatagaacatataccaactgcaagaagaaagaagaatatgcctggttttgggcctggcgcggtggctcacgcctgtaatcccagtactatgggaggctgaggcgggcagatcacctgaggttgggagttcgagaccagcctgaccaacatggagaaaccccgtctctactaaaaatacaaaaaattagccctgcgtggtggtggcgcatgcctgtaatcccagctattcggtaggctgaagtaggagaatcgcttgaacccaggaggtggaggttgcggtgagccgagatcgtgccattgatctccagcctgggcaacamgagcaaaactctgtctaaaaaaaataaataaataataaaaataaaaacagtatgcctggttttaaagcttcaaagaatttactcattctcctgtatgtaacattctagaaatgcatctggagttaaagccttcttggagacttaagaacaaatgcacttatgcatggccttttgaaacctaatgtttctacaaggaggcacgtccatacttgcaactccttctagaagcttccccaaatctcctgcct

SEQ ID NO: 750416 - DNA, 583 bp, Homo sapiens
aaacgagagtagttagaagtactggatctacccttgggcttctcccaggaggtgactgcctgtgtgccacacttttttgcttgcaggctccagaggacgctgagacttggaaaggcagacctgcccaccccagtgtggagcaggggtggcttgtaggtgggcctgacccctgggctctttgctactgcatgtgttccatgcaaccccaagcataaaaacatggacttgtgaaatcaaagggaggcttcagaccttctggtttacccatctctttttacagaagaggatactgaagctcagaaaagtcaccaattactcaagttcacttgtgggtttcctctttttttatcctgartgagcttcttaccacctggtcccttgccttctcttcctgccatccctcagcctcagtgcgctcttcattccaccatagagtgtgccctgctggaccccactttggttaggcttcctccatttcagggtagtgagctgctagcccctttgaagagttcttactagtttacgggtgcctcaggttgatttcctggggttttggataaagccacctttccatctcttcact

SEQ ID NO: 750417 - DNA, 633 bp, Homo sapiens
cttggagcttgccctgtgatttgctaggtagttcctctcactaaaggtgaagttggccattctattggcttgagtggaagtgacagtgcgccagttctgaacctcgaccttaagagaagctgcatacttttgcatcctttcaccatgagaagagcttattgagggtacttgctgcccctttaatctgagcctcagaataaatacacattgaatagagctattccaccctatctatagacttgcagtatgaagcagagccaaccaggtgccacagatcgaggctgaactgccctacccatgagcaacataaattcttttgttaattagcactgagcttttggtgattatttgttatatagcaatagctgactcttgtaattgtgctagatcarttttcatcatatggataaatagaaaatggacattcccaagttttaccctatacactatggcaatgataattttagcttgtaaagttttaaaagcaagtttatcaagcacccattttgatcataaaaatatattaaatacctaatagaatgtctattgttgaacaatgaaattctgggtgaaggcctgaataaaacaatagtagcaactattggcaaaggtaagccaggcattacagcaggc

SEQ ID NO: 750418 - DNA, 618 bp, Homo sapiens
aagatattagctaggcccctttccccctccccccagctttttcccttctggtatgtgaggacacagcaacaaggtgccatcttggaagtaaaaatctgtcaccagataccaaatctgttggtaccttgatcttggacttcctagcctccagaactctgagaaaataaatttctgttgtttataattactcagtctaagatattataacatttagcccacttgagctgggtgtggtggttcatgcctgtaatcccagcactttggaaggccgaggcaggtggatcatttgaggtcaggagttcaagactagcctggccaacatggtgaaaccccaaatctactaaaaatacaaaaaaattagctgggcatggtggcgcatgcctgtagttccagctactcaggaggctgaagcaggagaatygcttgaacccgggagatggaggttgcagtgagctaagaccttgccatggcactccagcctaggcgacagagtgacactccgtctcaaaaaaaaccccaacaaaacaaaacaaaacaacaacaaaaacatttactccatttgcaacacaaatggactaagacacagatcattaaagaaatttacatcttcctagaact

SEQ ID NO: 750419 - DNA, 600 bp, Homo sapiens
tgaaagaacatggtttttggaaacagacaagtcagtgtttccataaatggtgaatacatttactcattaattcaattaacatttatgggtaacagctatgtgccaggtactgtgctaagcaataggaagcccaaaggaaaatataacattggtctttagccttaaggaacatacagcatggttgaggygatgaggactggtacacggatgactaaagctcaatactgtaagtgccatgagaaaaatatacacaggctactttgagagcactcagagaatacatctaacccagcctgaatagagaggtttcctggaagcagtgacaaatgattggagactgaaagaattagcaatagtaaggaaaagaaagaatgggaacaaaaagaaagcatcttatataacttccaaaggagaaagggagagaaagcctagcacatctaaggaacttccagcaattaggtagcatggagtgtaggggtatgtatgtgtgtgttgtggaagggggtaagggggactaaatgaggctggagataccagaggctctgaatactatgttaaggagtttggtagtgtgtaatagcatgaaagaatgagagcttt

SEQ ID NO: 750420 - DNA, 600 bp, Homo sapiens
tgaaagaacatggtttttggaaacagacaagtcagtgtttccataaatggtgaatacatttactcattaattcaattaacatttatgggtaacagctatgtgccaggtactgtgctaagcaataggaagcccaaaggaaaatataacattggtctttagccttaaggaacatacagcatggttgaggtgatgaggactggtacacggatractaaagctcaatactgtaagtgccatgagaaaaatatacacaggctactttgagagcactcagagaatacatctaacccagcctgaatagagaggtttcctggaagcagtgacaaatgattggagactgaaagaattagcaatagtaaggaaaagaaagaatgggaacaaaaagaaagcatcttatataacttccaaaggagaaagggagagaaagcctagcacatctaaggaacttccagcaattaggtagcatggagtgtaggggtatgtatgtgtgtgttgtggaagggggtaagggggactaaatgaggctggagataccagaggctctgaatactatgttaaggagtttggtagtgtgtaatagcatgaaagaatgagagcttt

SEQ ID NO: 750421 - DNA, 600 bp, Homo sapiens
tgaaagaacatggtttttggaaacagacaagtcagtgtttccataaatggtgaatacatttactcattaattcaattaacatttatgggtaacagctatgtgccaggtactgtgctaagcaataggaagcccaaaggaaaatataacattggtctttagccttaaggaacatacagcatggttgaggtgatgaggactggtacacggatgactaaagctcaatactgtaagtgccatgagaaaaatatacacaggctactttgagagcactcagagaatacatctaacccagcctgaatagagaggtttcctggaagcagtgacaaatgattggagactgaaagaattagcaatagtaaggaaaagaaagaaygggaacaaaaagaaagcatcttatataacttccaaaggagaaagggagagaaagcctagcacatctaaggaacttccagcaattaggtagcatggagtgtaggggtatgtatgtgtgtgttgtggaagggggtaagggggactaaatgaggctggagataccagaggctctgaatactatgttaaggagtttggtagtgtgtaatagcatgaaagaatgagagcttt

SEQ ID NO: 750422 - DNA, 634 bp, Homo sapiens
gaaattgtagttaatatatgtaattaaaactactggacagccaggtgcagtggctcactcctgtaatccccacattttgggaggccgaggtgggtggatcacctgaagtcaggagtttgagaccagcctggccaatatggtgaaaccctgtctctactaaaaatacaaaaattaggtgggcacggtggcatgcacctgtaatcccagctactgaggaggctgaggcaggagaatcacttgaacctgggaggaaggggttgcagtgagccaagatcgtgccattgccctccagcctgggtaacaagagtgaaactctgtcaaaaaaaaaaaaaaaaaaaaaaacctactggacataaaagaaataattctgtatacagcgtgtwtaaagaaaagcaagatttgtctttgatgaggaaagttgtaaagggttgaaaatgtgcatttgttgaaaaaaagtaattttgcctaatttagaagttacttaaaagttgtttcaaattgcgtgagtaaaaaaagataaagataaaactagtaaatatagaaagttcggaagacaaatacaatagaaaaaattgtttaagatataaaaggcttatggaaatcttgtgtggtcaaaagttgactgagattggat

SEQ ID NO: 750423 - DNA, 624 bp, Homo sapiens
tgaaaattaaagacaaacaaaatttaaagcagtgatcagaaatgacactttacctacagaagaaaaacttgaatgatagagaatttctcagatgaaactacagaggccagaaaaaaaggagtgtatttttcaagtgctgaaaagaaaagaactatcatatccagttaagacgtattttgtgaatgaaggaaggaaatcaaagctttctcagttgaataaaattaagaaagttttttaccagcatctacacttcaaaagaatagctaaagaaagtttactaccagaaaataataaaagtaagaatsttggaacctcaagaagaaagaaagaacaatggagaaaagtaaatatatgaataatgcaacatatcctccttcacctctagaattttctaaatcatgtttgaggacttaagcaaaataatataacactgaatatggttttaaatgtatatagcagaaatgcaaaataattgtattataaatgggaaaaggtatcagaacagatggaaggttaaatttctacaactcatttgaactggtaaaatgataacaccattaggcttataagttatgcatatttaataaaatacctagagcaacctgtaagcaagctatataaaga

SEQ ID NO: 750424 - DNA, 626 bp, Homo sapiens
gttggagtactgcaccttccccagaaaaggcccctgctgagctgaccctcggcctggtgcgggaagggctgtgtgtctctgcagcagaaaggagcttcccagaacagccgctctgtagtctgcaggaagaagccaattggccaagccaagcgtgtcagagaggagtgcagacggcttggctttcatgaccaaagaatgtgacggggcagtagacacagtcatattgttgcagttgtgtgtcctgcactgagtatgtgggttgatggtggccccaaagagayatgtccccctctgaatccctgtaaatgtgaccttatttagaaaaaagctatctccatgattaagttaaaaatcttgaggtggggggatcaccctggattatccaagtgggccctaaattcaagaacaaatattttataggagaaaagtggaggagatttcacccagacagaagaggaggagacgacgtggccccagaggcagagcctggagcgatatggccacgagcccaggagcacagcagccaaggggagctggaagaggcaaagacgcttcctcccccagagcctttggagagtgcagccctgcagacatggggcttttagacttccggcctccagagcttt

SEQ ID NO: 750425 - DNA, 565 bp, Homo sapiens
tctgggtgatggaaatgctccttttcttgactgaggtgtgagtcacatgaactaagccatgcctgtgtagaaattctggaatctgctcttactgaaacccctactctctccacatatagcattcatttgatcgccatgctaatgtaatgaatactcattaagttcctatcatatgcctgacatgacacaagaatggataaagcaaaaacgaaaagtccttccgtcttttggaagccyctggtggctttctctgtgacctcaccgagggactgcagggttgtaagtgtgagtggaacagcaccttgaaggagaattacatgacaactatatgaggggacttcagaagtgccaggcacagcagtctcacattgccatcgttattgttattacccagcaaaaccaagatcgcagccaattctgccaaggtcggggctggagggagcagacagaggtctcatcaacaaggtggcatctggccatgaggaacccagaggctacggtgaagatggcagggcaggatgctgcaccctggctgtgcccgctctgggccagcgcctctgtcatg

SEQ ID NO: 750426 - DNA, 526 bp, Homo sapiens
gggcacctcgagccacttctctgagtggcttcatttctttggtgtcctttctcggacaggttattgagagtttcagaggctgtggcaagtctgacttgggactctgcggggaagggacccagcctcctcagtttggcctcccctccaccacatggcagggggcgaaactgtcccccatatcaggcagacacacttctatggaacaacacttctgcatggttttggggacgcccatgcctcctcagaggactctaggcacacaccctcagttacaggacatctgctgcagccctgcctmgctcatggggagttagaccccactcctctgataggtgagcttctgtaggaaacacagcacctgctctttgtctatagaacaatgggcgcaggcacacctctgcctgataacaagctcacccacttccactatatgacagtaggagcacccgtctcctctgtgtggtaacaggtacacctgatcatcctctgcagaacagtgcaacccccgcctctccactgggacatt

SEQ ID NO: 750427 - DNA, 647 bp, Homo sapiens
aaaagggatcccagagacagctcttgctttttttccggcatgtgaagatacaataagccagcaatatgaaagccagtcagcaatctgaaagccagaacctaaccatactgttaggaaatttacttatttcctaactataaacaataaatttctgtttataagccaaccagtctacagtactgtgttatagctgcccagaatgagacttcatcttaaaccatttttaagtgtgtagttcagtagtgttaagaacattcatattgttatacaaccaatttccagaactccttcagcaaaattgaaactctgtacccagtaaaccagaactcccyattccacaccctcttcccctagcccctaccactattctactttctgtctctgtgaatttgactattctaggtacctcacatatgtggaataatacagtatttatctttttgtggttagcttatttcacttagcataaggtccttcagaaccttacatttccactaacagtgcccaaggcttccaatttccctatgtccttgccaacaattattattgttatcacagctaatgggcatgaggtggcatcctatctattgtggttttcattgcgtttccctaatggttagctatattgagcatcttttcatgtgctt

SEQ ID NO: 750428 - DNA, 594 bp, Homo sapiens
gaaccttacatttccactaacagtgcccaaggcttccaatttccctatgtccttgccaacaattattattgttatcacagctaatgggcatgaggtggcatcctatctattgtggttttcattgcgtttccctaatggttagctatattgagcatcttttcatgtgcttcttggccttttgtatatcttctttggagaaatgtctattcaagtccttggctcatttttaattcttttttgttcttgagtttcagaaacactttaygtattctgtatattaaccccttaccagataaatatgtcaatatttatttccattttaggtgttgcttgttgagtctattgatagtgtcctttgatatacagacatttttaatttcaatacagttcaatattactactgttacttttgttgtctgtgtttttggtgtcatcttcaagaaatcattgccaaatccaatgccacgaagctttctatgttttcttctaagagtgttatagttttaggtcttatgtttaggtatttgatccactttgaattgactattttctatggaatagggtgaggatccagcttcattcattttgccagtg

SEQ ID NO: 750429 - DNA, 598 bp, Homo sapiens
agctccctctgttgatgagatttgccatggggtccattcctcctgccccttcagagacacgctcggctccctggcttccccagccctcacctacctctgcgtgcggcttccttgtctcagccttctcttccctcctggggtctctcccagaagcctgccccarcctccctcctttcccactctgtactcccttcagacgacctcgtgcttcacagggtttaaatccttcttctgggcaggtgtgtgccacaccccatgggtgttcctagacagtctcctctgcattcattctggaggtcctgcattctgcttcctgaatcttagaatctggaatctttagccacaaactcaactttccagaaccaacattacctacatcttctatgaatggaccttatcctgatatctatatttttgtcaaccagtctgacaacttgccttctctctcaagctgaaaaaggaggctcatctttgattcttgtctctcacgtctacattcgaggagaagccatgtcttatctgccatcagttctaccttgaaacatttccagatttcacttccttctctctcctcaatgccaccagcttgtgccccaca

SEQ ID NO: 750430 - DNA, 598 bp, Homo sapiens
agctccctctgttgatgagatttgccatggggtccattcctcctgccccttcagagacacgctcggctccctggcttccccagccctcacctacctctgcgtgcggcttccttgtctcagccttctcttccctcctggggtctctcccagaagcctgccccagcctccctcctttcccactctgtactcccttcagacgacctcgtgcttcacagggtttaaatccttcttctgggcaggtgtgtgccacaccccatgggtgttcctagacagtctcctctgcattcattctggaggtcctgcattctgcttcctgaatcttagaatctggaatctttagccacaaactcaactttccagaaccaacattacctacatcttctatgaatggaccttatcctgatatctatatttttgtcaaccagtctgacaacttgccttctctctcaagctgaaaaaggakgctcatctttgattcttgtctctcacgtctacattcgaggagaagccatgtcttatctgccatcagttctaccttgaaacatttccagatttcacttccttctctctcctcaatgccaccagcttgtgccccaca

SEQ ID NO: 750431 - DNA, 586 bp, Homo sapiens
gaaaatatcttttaaaaatgaaagagaaataaagatattttcagacagacaaaagctgaaagaatttatctccagcagacctacttcacaagattaagtctttttaaaagagtatttaaagtgaaattcaagctatttaaagtagaaatgttaaaaatgactgtggggcccagtgtgatggctcatgcctgtaatcctagtactttgggaggctgaggcgggmgagtgggcaggcagatcacttgaggccaagagttcgagaccagtcggaccaacatggtgaaaccctgtctctactaaaaatacaaaaattagctgggtgtggtgctgaatgtttgtaatcccagctactcagaggctgaggcacgagaatcacttgaacctaggaggcagatgttgcagtgaggagagatcctgccacttcactctagtttgggcgacagagtgagatggtctcaaaaaacaacaaaaacaaaaaatgtactgtggggtttatagcatatgtagaggtacggcatatgacaaaaggacacaaagtgcaggagtttggtaattagaaatatattgttgtaaggttcatatattg

SEQ ID NO: 750432 - DNA, 553 bp, Homo sapiens
aatatatatgtgatcatttaataatacttaagattcaagtttacatgtatgatttactaatccaatatgttattggtgcacatttatgttattttaagttttacatatatttgttaaaaataaatgtataatgcacatgattttacatatctttmtatatcatttgattatttccctaggaaaaataccaagaagtagaatagctaggtcaaatgttcatttacgtatcatgtatcatttttgataaatagctccaaaataattccaaagggttacaaatatatacatataaacatataaatatgtatattatacatataaatatatactcgattccatcaaataaactccaaaaagtatttatctcaatgtatttatttacttttaatgctggatttttaccctaccttaaagtaaataaatatatttactagaatttaacatagctttttaagctttctaagagattaaaaaaagtaattacttgaagaaaaactcattaaatggaaactaagactaagagaaataagatgaggacaggtataatattaaa

SEQ ID NO: 750433 - DNA, 641 bp, Homo sapiens
  misc_feature 1, 2, 3, 4, 5, 6, 7: n = A,T,C or G
nnnnnnngtcagctcagtgggtaatatgggaaaaactggtttctgagtggctagcagcagggactcaaagaattggacagataaagcccactctagtaaatgctgaaaacaaaaccttattttaaatttgacatcattaattctacactctaagtatattttgtcttcatctgaataaaatcaatggttgcacatccaaacgcttatcattctgaagtatttttatgcagaagggtggagattttttttaaatcagtttcccatgatagcaaggctttaatttagattatacagaaaatgattttgcttgacattaaattactaaacacaaaccaagactaattttcttttcctgaattgatatatttgagcaagtaagcttcccttttgctttttctttggctaagatggggaggagaygcaaagaaggtgggaacatagccctgtttctactaaatagatgccatttcaaaaaaaaagttttctgtagatccctctcaaagcccactcactatataagcagacccttgatggcagttctttttcattttgatgtggatggatccaaaatgaagaggcagcctaaaggcagaacaatactggatgaacaacaaccagaaaaaccccatcatcgtcataag

SEQ ID NO: 750434 - DNA, 599 bp, Homo sapiens
tattaaaaaatagttttaagccaagaaatttaaagagctatacaaaaaggaaaaatacctagaacaacaacaaaaaaagaaactatctaaaaaatggaagagttgtaattacattcaggtgaaatgtttgtatagaaaatcgaaggaaaaccacagattaatcattaggatgttgagaaaaggtttatcgggtttatcaggtacttattgttactaattacatttctttacacagcaataaacaattagaaaataaaattataacactattttatctatacatgtatatatatatgtatgtatatactagcaatgcactggtaattgtatatatatagactagcagtacagygcagaattctcacacaatggaagtatcaatggcttgtacattagcaatgatagcttcagtagatgctcaagcagcctcaacagcagagcaatcatgagttctggtgacatcagttttttctacttctctttcacacctaaggttgtataggagctgctacagttattacactgagaagctttcccttctcctctttgttcctgttatccttctccctcttttgtaattaattatctgtattaaattt

SEQ ID NO: 750435 - DNA, 578 bp, Homo sapiens
ctatacatgtatatatatatgtatgtatatactagcaatgcactggtaattgtatatatatagactagcagtacagtgcagaattctcacacaatggaagtatcaatggcttgtacattagcaatgatagcttcagtagatgctcaagcagcctcaacagcagagcaatcatgagttctggtgacatcagttttttctacttctctttcacacctaaggttgtataggagctgctacagttattacactgagaagctttcccttctcctctttgttcctgttatccttctccctcttttgtaattaattatctgtattaaatttcttgtttgaaatatctgagtagtttctatgaatattgactgatatcagatatttaaggtataagaaaacttaaaccttaraaaaccaagagaaatctattgatttgctaagtttattattcttttggtgtacttcagcaagcatctttaatggttacctttggccttacatagtatgagaataaattgttttagtgttaaaaaaaaaaagtttgtctcatgttcaacatcaatctgctcttcttgtattaaaca

SEQ ID NO: 750436 - DNA, 626 bp, Homo sapiens
  misc_feature 1, 2, 3, 4, 5, 6, 7, 8, 9, 10, 11, 12, 13, 14, 15, 16, 17,18, 19: n = A,T,C or G
nnnnnnnnnnnnnnnnnnnctttacttaaattataaagtatgcacatagtgcaaaatattccaactacatagaaagttatacatttaaaagcccaaaagccttttggttcttcacctttccattcctagtgccacactttagagacaattgtgtttaaatctgtccagagtctccttggtggttaatccaaaaatttaatatgttatactaatttctatgtttgtttttaacctttatatagtatctgttgacttcatgttaagaaaaattgagaatttagcagttataattctaacaacctcctttaccccccatgcttcctgattttgttrgtaatattattatttttgttttaaaacacttaacctctatttcttgatcctaaactttgaacagttctactacataatataagcagtttagtgttcctccctgatccttctctcatcatctttcacctcctactactaggcttaacatgtcaaaatttctgtgttttaaatcttgttctataattataattcttcaaggatttatccataagttgatattaaacttagaaaattttataaatagaatttataatagtatgattatattaatcttaggattaaaatgaaaagta

SEQ ID NO: 750437 - DNA, 614 bp, Homo sapiens
tacatatagttagagccttcaacattgctctttcaaaacataagagaactagaaaaatcagcaaggatgtggaaaaactcaacaacacgatcaacaatcaggatctaatcacatttatgtgaaggattttcaagtttctagggaacatataccaatatmactatatccagagacataaaataaacctcaacaaatttaaaagaatgaagataacatagattatattttctgactaccatggaaccaaactagaaatcagtaacagaaagataagaaaatctccaaaaactggaaagctaaataacacacttttaaataattcatagatcaaagaagtttcaaggtaaattaaaaaaaatacattgagctggaaaaaatgacaatacaacataacaatagttgtaggacacagctgaaatactggggaaaaataaattcatagcattaggttcacacattagaaaagtgaaaatgtctcacatgaataatctgggttcccatctcaagacctagaaaaggcaaaataaatccaaagcaaagagaggaagaacataataaatttaacagcagaaatgaataaaattgaaaacagaatgatgacaaagaaaagtcaa

SEQ ID NO: 750438 - DNA, 603 bp, Homo sapiens
atcatttacaaatacttcaaaaagtaaaaaagtcagtctaccaaaacatgtgcagtgcttgcatgctaaaactacaccttgcttattattattattttttaatttaacctaaataaatggagagacataccacatttgtggataggaagattcaacatagtaaatatatcaattattctcaatttcatatgtaacatattgaaattccaatcaatatctccacaagacttttacrgacaaaggggaacagttttcaaaaatttatatggacaggcaaaagaactagaatagctaagaccatttttataaataagagtaaattgggaggaatcactctacttgatttcaaaatcatacagttacagtaatcaaggctgtacgatactggcaaagggaaagacacatagatggatggaatagaatactcagaaataatcctatgtaaatatacccaacttatttttgacaaaggaactaaagagagtcaatggagaaaaaatagtcttctcaacaaacattgataaaacaaatggacactactgacaaaagaaaaaataaacccaacctaaacctcacaccttatataaaaattaactctatatg

SEQ ID NO: 750439 - DNA, 531 bp, Homo sapiens
gacaagcagccaacaaacataagaaaaaatactcaacatcagtaatcatcagagaaatgcacaatgagatactactatctcacaccagtcagaatggctattatcaaaaagtcaaaaaataatagatgttggtgaggttgtagagaaaaaggaacacttatacactgttagcgggaatgcaaattagttcagccactatgaaaagcagtttgaagatctctcaaagaaccaaaaactgaacgaccatttgacccagcaattccattactgggtatatacccaaaagaaaataaatcattcttccaaaaagacatgtactcgtgtgttcatcacagcactattcacagtagcrgaaatggaatcaacatagatgtccattaacagtggattggataaagaaaaatgtggtacatatacaccatggaatactatgcagccataaaaaagaacaaaatcatgtcctttgttgtaacatggacgcagacagaagcagttatcctaaatgaaccaatggagaaacaggcaaccaaa

SEQ ID NO: 750440 - DNA, 647 bp, Homo sapiens
tattaatcatgataaaaagaatacacattactctgctaccctgttcatggagagcaaaaactcaagtcacaaaggaaagtatttgcaacatgtatagctgacaaagagctttatatccagaatatataaaaatctttcaaattcacaataaaaaaagggagaatccccccttcaaacatttgaaaaagcattttataaaagaagatacccaaagggcaaataaacacacgaaaagatgtttaatttcattcgtcatctaggaaacgcaaattaagccacaaaaagatgcttctacgtaccttttagaattgccaaaatattaaaggctgacaaagcaagtgtggatggaagtacatatcatacactgctggctggagtgaaagctgaacactgccacagcctatgagccagccatcctacctctaggtacacacaatamcaaaatgtgtgcacatgtaactaagacacccacaaaaatgttcatggcaacactgtttataaaattcaaaaacttaaaaacaaccacaagattcattaacagtaaatggttacatgtacatcaattcatagaactgacaattatacagcaataaactactactatgtactatgagataaagctcacaaaaataaggctgaactaaaga

SEQ ID NO: 750441 - DNA, 577 bp, Homo sapiens
catgtaactaagacacccacaaaaatgttcatggcaacactgtttataaaattcaaaaacttaaaaacaaccacaagattcattaacagtaaatggttacatgtacatcaattcatagaactgacaattatacagcaataaactactactatgtactatgagataaagctcacaaaaataaggctgaactaaagaagtcacatacaaaaatgkatattgaattttcatataaatgaaaaaaaggctgaaccatctgaaactgccactattttatcatttccgatcacaaaaacagcaacatcatatggtccaaactaatgtggcaatggagatcaggatagtagttaactgtaggaggtgggagggtacattactgattaggaaggggcatgatgggagtttcattatgtttcatttcttgacctgagttgtagttacaaagaagtgtccactttgtggtaattcaaagagttgtacaacttgtgatttgtatctgtttttgtacatgttatatataaagtaatactaaaacaaaaaactagccttttagtgaaaaagtttcttaaaagacatgaat

SEQ ID NO: 750442 - DNA, 521 bp, Homo sapiens
taagtcttgacttgtgaaaggtaaagcattatttgggaaatgaaatcacatgctatacctgctagatttgtttttggcacagtaactgggtgtccttaattaagtcgttatttattaagtcagttcctcaaattctatcttcaggtttgcatttaaaatggtgctaaattaaaatactatattcattttaattaacaaagtttgtaaaactgaaacaaatgttcccaaaaagacattcactgaaaaagctttactstggttgagtaaaaaaataatactgcaagtcctcacctcccgcaaataggatttttaggagcatatacgacacaaatattcccattttaaatattttcaccaacacaatttcggggtataaaatgatgtaacagtaaacaacaggaactatggttgtagttctaatagtattccaacacaaaataataatcctatctccatactgactcatttaaagcacagaaaaccactttgatgtcagataaccatataaatccatttgtagc

SEQ ID NO: 750443 - DNA, 608 bp, Homo sapiens
tgttttggactcccaatcttttcagactatctgcatgatgttacctgaaatatcatgccctctggatggcagagaccaagaaaaagaatatccacacttagtcaccagtcaagctctcaaggacataaaatatggtgagagragactttcgcctggtttttattttaggagcccacagcaatgtttgtcttaacagacactggtgtagtcagaatactaaaactgaatagtttacagggctagctcaaacagtgggcttgtagggattctaggaccgggtattagcgtatggttcccctctttatgcagaacaccacagaaagacaaagccaaggaaaacagcaacaaaaaggctatttctgaagtgaaaggaatcaaacaatatgaatatttataccacaaagtaccaaaagcacactagagtcactacaccccaaaactagtcacacaaatccttttttccctttaatcaaaaccttgagacaaaacagtcatttttaccatccattcaaccagatttcacagagtaagtctaggagcctgatttataagttcttaacttttactggcttgttaggatcctgggatctcttcactgtggccttcat

SEQ ID NO: 750444 - DNA, 608 bp, Homo sapiens
tgttttggactcccaatcttttcagactatctgcatgatgttacctgaaatatcatgccctctggatggcagagaccaagaaaaagaatatccacacttagtcaccagtcaagctctcaaggacataaaatatggtgagaggagactttcgcctggtttttattttaggagcccacagcaatgtttgtcttaacagacactggtgtagtcagaatactaaaactgaatagtttacagggctagctcaaacagtgggcttrtagggattctaggaccgggtattagcgtatggttcccctctttatgcagaacaccacagaaagacaaagccaaggaaaacagcaacaaaaaggctatttctgaagtgaaaggaatcaaacaatatgaatatttataccacaaagtaccaaaagcacactagagtcactacaccccaaaactagtcacacaaatccttttttccctttaatcaaaaccttgagacaaaacagtcatttttaccatccattcaaccagatttcacagagtaagtctaggagcctgatttataagttcttaacttttactggcttgttaggatcctgggatctcttcactgtggccttcat

SEQ ID NO: 750445 - DNA, 623 bp, Homo sapiens
ttcctaggtattttgtgtttttgtggctactgtcaatgagattgagttcttgattcggttttcagcttgaacattgttggtgtatagtgatgctactgattcttgtatattgattttgtatcctgaaactactgaagtcgtttatcaaatctaagaatattttaaaggagtctttagggttttcttggtatataatcatgtcaccagtaaacaaagataatttgacttcatcctttccaagttggatgccttttgtttctttcscttgcccaattgctctggctaggacttccattactatgttgaataaaagtgatgagaatggacatccttgtcttgttccagttctgacaaatattttcaacattcccttatttagtgtgatgttcagtgtggatttgtcatatgtggttgttattttgagctgtgttccttagatgcctagtttcgtaaggagatttgttttttttttatcatgaagggatgttgaattttatcaaatgggttttctgccatctattgaggtgattgtatggtttttggttttagttcaatcacatcacatttgttgatttgcatatgttgaactatccttgcatccctggcataaaacccagtttatc

SEQ ID NO: 750446 - DNA, 627 bp, Homo sapiens
aggatcccctgtaaggcagtcctggtggtgacaaaatctctcagcatttgcatgtctgtaaaggattttatttctccttcacttatgaagcttagtttggccgtatgtgaaattctgcattgaaaattcttttctttaagaatgttgaatattggaccccactctcttctggcttttagagtttctgctgagagatcagctgttagtctgatgggcttccctttgtgggtaacccgacctttctctcttgctgcccttaacattttttccttcatttcaaccttggtgartctgtcaattatgtttcttggagttgctcttctcgaggagtatctttgtggtgttctctctatttcctggatttgaatgttggcctgccttgctaggttagggaacttgtcctggagaatatcctgaagagtattttctaacttgtttccattctccctgtcactttcaggtacaccgatcagacgtagatttggtcttttcacatagtcccatatttcttggaggctttgttcatttctttttactcttttttctctaaacttctcttctcacttcatttcattaatttgctcttcaatcattgctaccctttcttccacttgattgaatcagcta

SEQ ID NO: 750447 - DNA, 547 bp, Homo sapiens
agtggtctgaacttgagttcccataagccttgccactgcaagcaaaagtgctctggggctctaactaaacttaaaacacagtctaggttgcaaagaatgcaactcctagatgagtcctagtgctgaactgggcccytgccagtggactggggtaggggggatatgacctactgagacagaagccagcatatttaagggagtcctggcatcacccctcccctaacctcaggctgtacagctcacagctccaaaagacactccttccctccactcgaggagaggagagggcagagtgaggactttgtcttacatcttggataccagttcagccagagcaggatagagcaataatcagagttatgaggcacccccttttccaggccctagatcctggaagacatttctagacacacttaaggccaaaaggaaatctgctgccttaaagggaagaacccagtcctgacaggattaattacctactaaccatcagcaatacccaggtactacattgaggaccctgggtgagactctgatactcactgcattc

SEQ ID NO: 750448 - DNA, 653 bp, Homo sapiens
gattaatatgattataataattccatgtaaaagaatgtcagatccatattttaatgttaaaattcaatgagttttttttttttttggcaaatatatgtgttactaagtgctaccctctgtgttgtttcaggataaagggagaaaaagacatacttgkttcctgttctaatggatcttttattctagtaaaagtcagattaaaatgaagatcctagaaaagtaaacccaataattacgattagcaataagaatgcattctaccaacaaagggccctgatattggggtaggattaggaaagaatcactgaggatttgatatgttctagctaggagttacaggatgagagtcagtttgagaaggaggaaaggcatggagaaggcatccttagaagatggagcatttcattgaaccgatttctggagcttattaagattattccatcagtaataagcttaatatctgtgattccccaaattatgtagaattttagagctatgccatgagaaaacaaatcaaccaaataccaaatgtatcaatcatattttctttgctacagtcatgtatgaaaataggcagaaacatggatccagttctgggtaacacaggttgtaaaccttagttataaggaatgacccctttaactccattaact

SEQ ID NO: 750449 - DNA, 653 bp, Homo sapiens
gattaatatgattataataattccatgtaaaagaatgtcagatccatattttaatgttaaaattcaatgagttttttttttttttggcaaatatatgtgttactaagtgctaccctctgtgttgtttcaggataaagggagaaaaagacatacttggttcctgttctaatggatcttttattctagtaaaagtcagattaaaatgaagatcctagaaaagtaaacccaataattacgattagcaataagaatgcattctaccaacaaagggccctgatattggggtaggattaggaaagaatcactgaggatttgayatgttctagctaggagttacaggatgagagtcagtttgagaaggaggaaaggcatggagaaggcatccttagaagatggagcatttcattgaaccgatttctggagcttattaagattattccatcagtaataagcttaatatctgtgattccccaaattatgtagaattttagagctatgccatgagaaaacaaatcaaccaaataccaaatgtatcaatcatattttctttgctacagtcatgtatgaaaataggcagaaacatggatccagttctgggtaacacaggttgtaaaccttagttataaggaatgacccctttaactccattaact

SEQ ID NO: 750450 - DNA, 593 bp, Homo sapiens
ctagcagttaaaaaatgtttaatttctagttttaagagtcatgacaactttttctttttaacacaatttctcttagaatcattaaagtcaattgctaataattgcattggcattgtgataacttgagrtgtaaccaaggaaaagcatgttcaatatgggttactaattacactaataacaatttatgcaaattagtgactaattttacattagcatagtggtaatcactttaagatcgtttagtaagaatgatggcccaatcaagactaggaagtattttttttaaatgagatagagaaatgaaagatatagggtttattgcaaatagtttttaactgaaatccaaatattagtaatgaactattttgaaaggaatgtattgagtaaaaccccataatttatcattcattttcttctgagtattttccacacattttgatctctagaatatggcacctgggctagaaatctctcagggaccgtctccatcatgatttttctggaatttcctgtttgagtcaggatgaaaatatccccgatatgctctgtttttggggatttagccccgtgcttccacaacttagagaatcaag

SEQ ID NO: 750451 - DNA, 531 bp, Homo sapiens
caaagaaatagaaagtatggcccaatgaaagaaagaaacaataacaatctccagaaactgataatttagaaatggaggtaaacgaattacctgaaaaggaattcagaaaagctttcatgtagaaatggagaaataaatctataggccaatatctctgatagattttgattcaaaaatccttaayaaaatactcacaaacagattccaagagcacatttaaaggatcgtagaccatgaccaagtgggaattatctctgtgtaaggatggttcaacacagagaatcaatcaatttaatacaccgcatcaacagaattaaggataaaaatcaaatggttgtaccaatagatgcagaaaaacatttcacaaaattcagtacccttttatgataaaaacactcaacaaaccaggaataaaaggaaattacctcaacataataaagaccacatatgaaaagcccacagctaacatcacacttaatagtgaaaaactgaaagttttttgtctaagacaaggatggccactcttgtcac

SEQ ID NO: 750452 - DNA, 670 bp, Homo sapiens
agggcagcttaggcaggatagagtagggcatgaaagacaagggaaattggcaagagaggtgactccaaaagcttatgcacaacaatgccaagagtcatcctcagtggttaggggatgggttgtccacggatagggaaagaccacatggtgcttaccagattaaagtactacaggattaacagtgcaatacaaatactataaaatgagcagtgctggagaagagcaggtctagacatactttggagtatgtcttgacatctacctccttcttacctttggcattctgctatcacaatagtaagaaatccctggcattagctagacaccataaaatcttcacattaggtttgaggaccaatctctctaatttctactataggtctaccctagcaaagcataaaatgaagccccatcaatatctgggcttcatccagatctgtactagcaaagygaaagttcaagtccaagtaagatcaatatgatcagtcagtaattagcctaccttctaaaacaagaacgaacagttttcagaaaaagatttttaaaatctagaggcttaacaatgtattattcaaaatgtccagtattttcatttaaaaaaatcacaaggcaatcaaagagacagaaaaatttgatccttagtcaagaaaaaagtgattaatggaaacca

SEQ ID NO: 750453 - DNA, 623 bp, Homo sapiens
attgaaaattagttcatggtttatgttaaatatctgtctatccatctttggacacaatatccatatgtttttctttcactacatcttatctctaaactcccattccagaaccacacaatctgaacacggtatttccacaatcacccaaatggttcacattcctcaacctgcagaagaataaggcactttcgtgatcactgagcagtcattgtctacacacactttctcttcccatcaatcatcagtggtactccctctcctagtcaacagaataaccaaaggtacgtgggcttgaaatgatgggtgcttatcaggtgtagtcaatgactctgtatcagaaaaactgggtccattggaagctagwgaggcattagtgtaactcatacttacacagaaacacgggtctcaggttctggtgagctccaccactttaactaaatgactctctgatcaaccacttaaatactctgggcctcagcataaaatgaggagtttcgtctgatcaatggttctttatcatcatgggtattactcagagagctattcaatatatgcacattaataaataaacaaacagatcaatggaataaatggaggatgcataaacagacccaaatagctgc

SEQ ID NO: 750454 - DNA, 641 bp, Homo sapiens
gctagcagggagggccacaggggagggccacgtacatgactgtgggatgaattcagccttgactcagttcctacttccaccaaagtaaggagtgtacagcatcattgtgccatctggatatttttgtttcacggaaactccctagatgttaaccacatcctgttttccttcaaagcatcacttaaacatacagtgtttagcatacagagtggggatactaagtcttctttctctacatctccagcattccttgatcccaacttaattctctccacttaattttgacgaaaaatttaactttctaccttcttcttggctccatagctacctttgcatcactgaagrctcacaaatggtttctgcctcacaatgagctatccactctatgtcctaacctttggaggtatagaagggggaggatttgaaagttgagtctttccattttcctttcccacaggtttcagatagtagctgaacatggcatagaaatttaggaatttctcttcctcaacaaccccacctgacacaagcatcagccacggtgagcttggcgatgatctcccttcccctttgctacgtaagtgtgttctttgatatgactcaattaaccaaaaattagccatcatgtatctttaaatggc

SEQ ID NO: 750455 - DNA, 630 bp, Homo sapiens
gccctctctgctcaatgcccagggataactccaggcatttgaagcacccacatgcctgaaccagcagcctgagctatcccgtccttcttgtgcagagatcatggtttagcgaggccttttccactccattttcatgttccaagtaggtcttcagtcagtcagagcacctgctcacctgaatcagtagcctgagcctccctgacccttctagtggagattgtgctaacacagggtcctctccactctccacccaggccaatctctaggcatttgaagcacttttttgcctggatgagcaacctaagacgcctcagccgcatgtgcagagattgtggtgcagaagggccctctacactgcatgcccaggcagatctcaggcaactggagcacctgctcacctgaattaggagtttaggctgctcactcccttccccatacagagatcttggggatgaggaggtttctcagctccacacctaggcggcacwcctctgggtgcttggcgaccacccactggattgttcctcttcttcctcagtgctggtgcttgtgtctgtcatcagggaatctgtaggtggacctgcccaatccagccctacccatctttccccaattcccgaggtcagagca

SEQ ID NO: 750456 - DNA, 629 bp, Homo sapiens
acaatataaggagaaaactgtattcaaaacaggattataaccagttcaagtcaacagattcttaaaatcaaaatcaaataaaaccagagatgaaaccaatcagaagccagaatgaaatcagaaacactgacaactagacaggtaaattaatgaatgagttaaacagggtgagactaaagaagtgattctattaggagaaaaagaccagtggccatgcatttcaaatatagacaccrtatatactacactaaaagaaatgtgaaattgcattcattgtcttgtgtttgatataaccatgttatttaaattatatgatgaatgtgacatgctaagcattaatttataataaaacataaatgacttgggaatgttttcccaatgtggcatttttgttctttgttgtcatttaaatgtcatttcatggctacaatgacagtggctcaaaaattcgtgaaagaacaatgaaaaaaataccagagagctcaaatgtttttgcaaataaccctgagttaattagaaaaatctgcaccatttccagttcttcttctcatgtgtcagctctcattaaattaaaaaaaaattgcatttcaaagttaaggaatcctatggttaaaaaaacttttaaaatg

SEQ ID NO: 750457 - DNA, 550 bp, Homo sapiens
tgaaggtatattttatactcaatggtaaaataactgaagattttcaacacggtatatagactttagagagataaagatattgcctggaaaaaaatgtaaggttgtatgtgtagaaggagtcaaatctacaataggataaactgtgaaaacgttgattcttcaagaccatctttcattctgaatacacgattactaaaagtagcttacatcaaggttaagctctgaattttcttaatgtgttcaaaagaatgttttaagaaagagaaaaaattcagtaatttgagtaccyatcttttaagataatttctaatgaagtagaaaggaactctgaaagcttgttatattatacagatataccatgatttagctaaagagaaaaaagatagtagttggtgtttggaatttgcattgaaatggcttttcctcatggagaattaaaaacaaaaaaagtgtcatgataaagggttaaaaatgtatgtaagattaatgaaatcattagtcatttttgaaaaatggtttaaagttgacttagcaaatatttctgcaacgc

SEQ ID NO: 750458 - DNA, 498 bp, Homo sapiens
caacatggcacatgtatatatatataacaaacctgcaagttgcgcacatgtaccctagaatttaaagtataataaaaactataaaaaaagagagttattggaatttgcttcatattgtgcaaccccaatgatggcctctatatttcccacttgataaagttaaaattcctatatttgtgatatagcactgtgataagcacgcttaccaaaaggaagagtgttgtggaaataattagggtggagatgggagcaatttacktttgagtggtcagggaaggccattctgagaatacaatgcttatgattagttatagaaggtgaggctattcagacaaatgtgtagagaggctgaggtatgccaaaaaaaaaaaaatccaaggaaaggggtaaggcatgtaaagttcttaagaggagagagatagcttggagatttaggaagcctgaataagagcagtgtgacagacataataagtagtgaagtagagagaggtgccttga

SEQ ID NO: 750459 - DNA, 612 bp, Homo sapiens
tcagtactaccttgaatttttaaagcacaaattaaagaatatatttcatggagaaatacatagagcaaataaacaatatgtgcatagctacacgtatgataaatatgtcatcaaacgcatttatcataacaatgaatgtgaatgcacttgtttcacttattagaagaaaacgatgtttaagagtgttgcaagtcagaccccaagtttcagctttttacaaggagcaattctaaaatgaaggttttgaaaagaccaaaaagaaattagcagaagtataccaagcaagtgggatcaaaatgagaacagaagtatcaatcttgttrtcaaaataggatacaagcgtcaatgcagtaaccatgataagaaaggacaaacttaattgctaagagctataatccataatgaatatgtaaatttattactacttatggatcaaaaaacacagcaaccaactctataaagctggtaataggagatccaaggagatattgatataaacatactagtaaaatcacactttaatacatcactctcagtacaagacaaatgaagtggacaaaaaaaaataattgaggagataaaagatctaatcaatataataaatgtggtaga

SEQ ID NO: 750460 - DNA, 617 bp, Homo sapiens
cagctaatgggtttattgttatttttaatcggttaataaatgcttttttaagtttcaacatctaatatcataaatattaatacatatagctgaccaaatatgttggaaggtttttaataaattttaatcatctataggagtcttaatgaggtcaaaaagtgtgataaaccctggttaaggttacagtgcattaaattggatgttgtgggcaatattgtacacaaggagatgaactaaagaaactgttgaaaaattctagtgggaggtgatggggctctcgacaggggttatgaatggagagaagtaagcaaatttgaatgatattttaaaagcaatattgaaggagtgtataactaattggataaaaaattgaaagcaaacacagatcacataagtttccaactcaggcaacttaaaatcactcatcaaatgggagaacacaaaagacaggccttattcatttaacaygaattgacttttcaaagcattttcttgttttctgcgagaactcaagcatatcctgaagtgtacagcttcatgctatattacctttctttttatgtatgttgtttctttattgtaaacattggtgctttaccctattgagaaacattgag

SEQ ID NO: 750461 - DNA, 611 bp, Homo sapiens
gggcaagagttctatggtccccaataggtaagaactatgccctaatcagcatgaagctgttacagaagaaagatcattggtccctctgcctcccaaaaagatttatggggatcacgtctctcagtgggaagtgtggtaggagaatagggtctggagacaggaaacctaaagccagtttgtgccgactccctggaacttgaccagagggaaaatcctgcctctccatgcccaactaacaagggaccaaaagacacttcccctacaaaccacccccctccactgtgtcaccaatggaaagcacctctggttggccatgggccactcctttatttgcatagggcgtcagctcagcctctggttgaccacaggttaatctacttcagcctctaattggccacaggccaatcctttattcacatagctggtaaccgwtaggaaacctctaaagggtaattaaaccccagaaaactttgtaatcaaggctcctgagccacttgctcagcctgctcccaccctgtggagtgtactctcacttcagtaaatcactgcttttgctgtatcattactttgttgctttgtttgtgcattttgttcaattctttattcaatat

SEQ ID NO: 750462 - DNA, 629 bp, Homo sapiens
aaatataaatactcatccacttataggcctgtagtcatattaacattactaataagattatagtaatagtaatactacttaacatttatatattaaaaatatttaatatataagtattttgttatttatacattagtattgataacattttaaaatataaatattgaatatctcatgaycttataaaatattgcattgaatcttgtgatataataattctagagttttaatcttatatttgaaattttaattttcatggctttcaaaacagaaaattttactaaaagatgataaacacactctaatggaaaaagtatgtagttgatttcaagaagtagatatgacatttcttcatcagttcctcacattaatcacttagaaatttatcattgttagccaatacatttcctcctttgatttttttttagttttctgtcaaagcatctagagaatattatatagataaatgttcaaaaagtcatagaaaacccaatgaattttaaaaataattttttataaaggttaataaattacctttcctagtttagttgaaaactgtgccaatattgtagtttgttacacccttctatcatttttggcaactacgtcacataagtaagacatttata

SEQ ID NO: 750463 - DNA, 629 bp, Homo sapiens
aaatataaatactcatccacttataggcctgtagtcatattaacattactaataagattatagtaatagtaatactacttaacatttatatattaaaaatatttaatatataagtattttgttatttatacattagtattgataacattttaaaatataaatattgaatatctcatgatcttataaaatattgcattgaatcttgtgatataataattctagagttttaatcttatatttgaaattttaattttcatggctttcaaaacagaaaattttactaaaagatgataaacacwctctaatggaaaaagtatgtagttgatttcaagaagtagatatgacatttcttcatcagttcctcacattaatcacttagaaatttatcattgttagccaatacatttcctcctttgatttttttttagttttctgtcaaagcatctagagaatattatatagataaatgttcaaaaagtcatagaaaacccaatgaattttaaaaataattttttataaaggttaataaattacctttcctagtttagttgaaaactgtgccaatattgtagtttgttacacccttctatcatttttggcaactacgtcacataagtaagacatttata

SEQ ID NO: 750464 - DNA, 437 bp, Homo sapiens
tttatattttttcttttcaaatttaacttgttaatatatcttaaattaatttttgtatattgttttggagtagaaatttcatcttattttttccatattaataagcagttgtccagcatcacatattgaatagtcgtttttatacacwctgatccccaatttgagcacttttgtatcactatttttaaaaaattataatattttaggcacatgtatatttggaatttctattgcattgtatttgctaatgtgtttatgcttgcaccaatagcacactgtctttattattctaactttatactcactcttaatataggctatagacttatgtctttcaaaataatgtcttaactgttcttggacttgtcgttttcatataaagcctgagttaatttgtgagattgctcatcaacccccaaataaaaagtgtttagatt

SEQ ID NO: 750465 - DNA, 508 bp, Homo sapiens
acctggccaaaagtcggtatctttaaagtatagcatcttcccatttatacgcatggtacatttctctatttatttatatttcagtgtctgtcaataaatatcaattcctatctttagaaaaaactaaggggatttcacatttagtttgctttattcctaaatggcttatygtttgtattttaaatttacgtttcatattaaatctgtaattgtttctgttgctgtagtgtaaaaatatgactttgttctgtgtgcccatgacctcattgtctctcaaattttttcattgcttcttcattcatagctaaaccttgacccatgagtcttaaaaaatatatatttctgaggtttctttgaatgcaggagtggatatgagaccacagttctctgtaattatgaatggttagcggaaatgtgcagaattcccaagtaaactccctattagtcaggagttagctcttttttcccactttaaaaaattccttctccctgaactttggactcaatg

SEQ ID NO: 750466 - DNA, 593 bp, Homo sapiens
agaggtgctctgctttttagagtttccagtttttcttttctgttttttccccatctttgtggtttttatctacttttggtctttgatgatggtgatgtatgatgtacaggtgggtttttggtgtggatgtcctttctgttgtttgttagttttccttctaacagagaggaccctcagctgcaggtctgttggagtaccctgcygtgtgaggtgtcagtgtgcccttgctggggggtgtctcccagttaggctgctcgggggtcagggatcagggacccacttgaggaggcagtctgcccattctcagatctccagctgcgtgctgggagaaccactgctctcttcaaagctgtcagacagggacatttaagtctgcagaggttactgctgtctttttgtttgtctttgtcctgcccccagaggtggagcctacagaggcaggcaggcctccttgagctgtggtgggctccacccagttggagcttcctggctgctttgtttacctaatcaagcctgggcaatggcgggcacccctcccccagcctggctgccgccttgcagtttgatctcagactgctgtgctagcaatcagc

SEQ ID NO: 750467 - DNA, 468 bp, Homo sapiens
agatacatgtttattcctcactaaaacaaataggcaaaaatataatgttatctaagaaaacaaatgattcagtatgtaaaaattattttaagtattgataaaggagataaaggaatagaaatcaaactagctttgctttagtatcagttcttcagagttctacaacatgcatcccataagataaraaaatccactcaggaataatagtgtagttttactcattagaagttatgacattaatatattaaacatgagcatatatgtgtagattattttgaaaatataagttctgactctctgagcattacatgtgcagcttcaccaagccaataaatttgggagaatactttgttgtaacttttttcctttagtttgttgatagtggttttttttttaatgttagttttgttttcttttccatccttgagtcgttaaagaaaaatgtgtccataattcagtcttatgaag

SEQ ID NO: 750468 - DNA, 643 bp, Homo sapiens
taatattttgctgaggatttttgcatctatgtttatcaaggatattagcttgagtttttttgttgtttttgtgtcactgctggtacaattggtatcagaatgatgttgacctcatagaatgagttagggaggagtccatccttttcarttttttggaatagtatctctaggaatgatttcaactcttctttatacacatggtaaaattcagcttttgaatccatctggtcctggtttttttctggttggtaggctttttattacgaatgaaatttggaactcgttattggtctgtgcagggattcaatttcttcctggttcaatcttaggaggttttatgattccaggaatttattcatggaaatgaacaaatgcttgttcattatagtctgtgagggctttctatatttctgtggagtcagtggtaatatctgctttgcactttgtcacttctctttggcttttcttttctttttcttttttttttttttgagacagaatcttactctgttgcccaggctggagtgcagtggtgcgatcttggctcactgtaacctctgcctcccacgttcaagcgattctcctgcctcagcctcccgagtagctgagattaccagagcatgccaccacacctggctaattt

SEQ ID NO: 750469 - DNA, 532 bp, Homo sapiens
ttttttttcatatatctgatggctatttctatgtcttttaagaaacatctactcaggtcctttgcccatttttaataggattatttgatttttgttgttgtgttagtattttgaagtccttgtatgttttggatattagttccttatccaatttataatttgaaaatataatctcccagtctatgggttgtctctttactctgttaattgtttcttttgttgagcaaaacctctttagtttaatgcaatctcatttgtctatatttgyctttgttgcctgtgttttggggtcaagtatatgaaattgttgcccaatgtcgatacaactcaaagtggtctgcacattcactgaagttcctatcaaaatttcaatgtcatttttcacagaaattaagtaaacaatcctaaaatttatatggaactacaaaagcacacaaatagccaaagcactcctcagcaagaacacaggtaatggcatcatgctagctgatttaaagacatattaaaaagctatagtaatcaaaagagtatg

SEQ ID NO: 750470 - DNA, 529 bp, Homo sapiens
agtgcgatgagcctcgtttctgaaaagcgggaaaggggccgcgtcaaaggatgtactaaaataacccgacggcaccgagggcacgtctgcggttacgaggagcttccacggcaactgagagctttctattctcgtttgtttttaaattatgcacaaattctatttttatccaatttgtggtccaccaactgaaagagaaaactaacccccaaaaccccctctttttagctgcttttacctcacacttgcagagacagaaatccactctgccacagatacatcacaaaactctttaaattactaatttctacaaatgagatatgctgacagctcctgacrttctccgtgcaggggaccgttttctcccgcgtttcaatggaaagggctccttctgtggaaacgcagagccagcctctcccgtgtcgctgctgcgcacacacgggccacttgatttggaataattgttgagggtacattttaaagatatttttaattactgtttcaagtttcctgagtcctccagaacacc

SEQ ID NO: 750471 - DNA, 622 bp, Homo sapiens
cttcacagggcctgagagctgagtgtggtttcataacgtggttcattggcctctgaagatgctcagtgctgggggaattgggcttgaagccatcacgtccaacacacggtccctggaccatgtcctgtagggagtgttaggaggagtctagctctatttttaaatgacagtgttcatgacagaatttctcgtagggaataaaaatgtgtgtgcttcccagttacttattgtgttgcttaattaagaaatctctttagaaacacagacrggagcatgaacttctcagccacttcctgcctggcttctgggtggttctgtgttgcattactggaggtctgggtgtggaattttgagaatctcttgatccttttcagtttaattctgaaacagggttcttccttccttccagattacagtgtggacactcacacacagtaagggacaaagaaagtgtatccccttccaaagatccgcccaccaggccccggacccataatcaaagcctgatactgggacaatggacccagcggccgggccagccctcccctagttatcaccccagagctgtggctgggctctctttgttccgaaacggagctgatggagcaggacgctgtcgcca

SEQ ID NO: 750472 - DNA, 555 bp, Homo sapiens
acgaattccctgctacaaatatttggggcatttccccttttgggattagatcattattaaggcatcaccttaggtgtagatggctactgctatagtttgaatgatggtgccttctccaaaatttgtgttgaaatttaatccccaatgcaattgctaaggggtatggcttttgggacagtcttcatgaataggtttagcacccttataaaaggtctcaaggctgaaagaagtggtcacttgtccttctgctgtctgccatttgaggccacagtatctgtcccctgcggagaacacatccacaaggtgttatcctggaagcagggagtagccctcaccagacaccaataccakcaccttgatcttgtacttcccagactccagaactgtgagaaatgaatttctgttcttttaaagttacccagtctcaagcattttgttagagctgcacaaacagactgaggcaaccattctttgcatagagtaggacactgccaaggttgacttcaagtaaagcttgttaggccatttagagaaaaagggcaataccttagctag

SEQ ID NO: 750473 - DNA, 510 bp, Homo sapiens
aacgtctaattgaagagtaaatataatgcaaaagcacaaaaaaaggggcatagaagcttgaaaagtatttgctaagtacatttttacatgttttaatattacatgcccaaatattacatgcctcaaattaaaatgcaaatagcaaattagaaataaatatttgaagcctgtatgaacaaaggtgttctatctttaataaaatgatcttatgtatcagtaaagaagggaaaattctctgayggaaataaaggcaaaatatttttaacacatggcaacagaagaaataccaaaatctaggagacctacttaagttttatgctccctttgaattaagaaatgaaaacaattcatgtagcagaagaaggcatgataaacctgtttttcctaaactatgagttactttatatcggcataaaaattatagacagcaatttgacactatttataaagaagcttagaaatatccttggctttcagcttgaaattttatttcaatggctgtctcctagg

SEQ ID NO: 750474 - DNA, 473 bp, Homo sapiens
ttttgggtaaatactcagaagtgcgataattggatcatatggtggttctctttttagttttttcaggaacctctacacagcttttcataactgctgtactaatttacatttccaacaacagtggccaagggttctgttttctagacatccttactaacatttattttttatttttttgataaaagctattatgacaagtgtgagataacatctcattgtggttttaatttgaatgtacctaataattagggttgttawgcatgttttcctacatctgttggtcatctgtctgtcttcttttgggaaagtctattcagtttccttgcccattttttaacttactttttcttgctattcaactatttgaattcctgatatattttgaatattaatctgttattgaatatatggcttgcaaatattttgtccttatttgtaggttgtcgcttcaccttgtttgtttaagtggaaaa

SEQ ID NO: 750475 - DNA, 596 bp, Homo sapiens
ataaaatggggaaaatatttttaaagttggaaaatgtatagaacagtttatacttgatattcaaactttttaaaaataaattattcatgagaaaggaatagttgacaatattttcattagttgtctttacatatcaatagcaaacattggcatgtatacaggttattaaacaaaacaggcagtggcttatctgccaaatttgagttttctcataattattttggctatctaratcctttgcattttcatatgaattttagaactaggttgtcagcttctaaaggaaattctgctgggattttaactgggattgcattcaatctatggatcaatataggacagttggcattttaacaatgttgagtattctcatctgtgaacacaactctctttcctgtaatttctatcttttaaaatttctctcagctatgttttgtaatttttcagtataaaagtcttgcataaaaactcctatgtatctacgtgttctatattttagtgctatcatatatgttgcaatattttggaaacttgctaatctcacattatgtctaacagttttttaatagatttaatcagattttcataaataaaat

SEQ ID NO: 750476 - DNA, 596 bp, Homo sapiens
ataaaatggggaaaatatttttaaagttggaaaatgtatagaacagtttatacttgatattcaaactttttaaaaataaattattcatgagaaaggaatagttgacaatattttcattagttgtctttacatatcaatagcaaacattggcatgtatacaggttattaaacaaaacaggcagtggcttatctgccaaatttgagttttctcataattattttggctatctagatcctttgcattttcatatgaattttaraactaggttgtcagcttctaaaggaaattctgctgggattttaactgggattgcattcaatctatggatcaatataggacagttggcattttaacaatgttgagtattctcatctgtgaacacaactctctttcctgtaatttctatcttttaaaatttctctcagctatgttttgtaatttttcagtataaaagtcttgcataaaaactcctatgtatctacgtgttctatattttagtgctatcatatatgttgcaatattttggaaacttgctaatctcacattatgtctaacagttttttaatagatttaatcagattttcataaataaaat

SEQ ID NO: 750477 - DNA, 543 bp, Homo sapiens
agtcagcaggccagacctccagagcggtggatgtagtccacacgaaattgcctttagtgaactgagcattgatgttataccatttgattgcattgatttggtttataagaaccagcacatccctagctgactctacagtagtttttattgtagagatatattgaaggacatagtctactttctgtaacacataattcttttataaggggccagagtaagtcagtcaataaatatgtattgagcacttatgtgccagacactgggctattccctttattgagaataaagcagtaaataaagaaatcacatgagtgaagctcacattattgaaggaaggtaagatttttttcttgagtccctatgtcaggcraagctgtgaatctcttaagcgattttacaattttccttcttcttttttttttttttttttttagacagggtctcactctgtcacccaggctggagtgcagtggtgagatcttggctcactgcaacctctgcctcccaccttaagtggttcaagcgattctcccacttcagcct

SEQ ID NO: 750478 - DNA, 485 bp, Homo sapiens
gggactagcaaggaaactttcccttaatgctagcagcatgctgctttctaataatacactggctctcagcacaatcatccaaggtgctaaaacaaacaggatagagatgtcttcactgaaatgtaagaaatcacctgtgaattcaataaaatccatgttagctttctgaaatactatgtccaaaaatgtccctgtractatgataccaactcaaattcctcacacaattatattttaaatgctgtcctaggtctgaaaactcaccacctggaaaccagatttaaatatataacgggggctgatattctttataggaggtcaaacataggcacagcattgtattatcgaaactagctcaagatagaaatatgaaaaaacatttcacaacatttggaaaagccaagtaattaatatctaaagatggtaagtgatagccctaaccacatgcatgtatacttcgaagatgcaagaaggtacatttttct

SEQ ID NO: 750479 - DNA, 468 bp, Homo sapiens
acagaaatagaaagccaagggggagaaaagctactcacgagattggagggaagaaaaaacaaaaaactggaaacagcaatgtcaaagggaggtagatatcagaaattcaaggccctggttcatctaacttcagttttcgttgagatgcacacagagcagaggatggaccaccccacgctttccaaggccaactgaacagtgtctgtcaygccaaaggatgcagacgtacccaaccatacctctcatcatactctgtcccagggaaatacttacacagggcacaagtctgttcaaacatgttctttgcatctttgttttttgttactgataaactggaagcgatctaaatgtctgtccactggggaatgttccaataaattgtggtacatccaaagcattcaccagaaaaattaaaaacaggcttttttaaaagaagtgattttaggaatacttattgaaagtaagcat

SEQ ID NO: 750480 - DNA, 581 bp, Homo sapiens
gatatttgcacaacaacaaaactgcccaagggtgtatttctcagaatgtatcctcatcattaagtgatgcatggctgtatcttaaaagaactagggaaagtcaacgtggcaaaagcttgggtatgtctagtggccacagtgtacaaggtgagtttagagacatgagccagacagtccaaatcaaggaaatatttgtaggcaatggtaaaaactggatttcaccctgagtacaaaaggattgagtttctttcacactgtcatgatagcatttctttcctgaacacaatggractccatgaaaaggaaagacttgcttagattagacagcaaaacattgactacctaggagactaagaagctattggggtagtcaacgaaagatgatggagatttgagctacataacatagaacagactggtgaaagaccggatatgggggcagagagagggaggtgttaagggtgtttcctaggtctgcaggcctcacaaccagaaagtaggagatgggaacaccagaagagattcaggtttagtggggaagattatgagtttggtttggggcattttgagtttgaactgac

SEQ ID NO: 750481 - DNA, 638 bp, Homo sapiens
aatgtccactatacatcaaaatatactcaatctcaataataaaaacaaaatttaagaattagtgagatagtttttcatttattagataagcaaagattgtcttttttttttttttttttagatggagacttactctgttccccaggctggagtgcagtggcgtgatcctggctcactgcaacctccacctcctgggtacaagcaattctctgcctcagcctcccaagtagctgggattacaggcgcccaccaccatactyggctaatttttatatttttagtagagacggggtttcaccatcttggccaggctggtcttgaactcctgacctcatgatccacccgcctcagcctcccgaagtgctgggattacaggcatgagccagggtgcccagccaagattgtcttttaaaaaggcaatacccactgttggtaaaagcacaggcaaaagagaattctgaatcattcatggtaagaatgtaaattggtacctctttctggagagcaattagatgattcttaaccaaaccttttgttatggtggccaaaagttagcaacaggctaagtgtcagcaagggactggctaacaaaccatgatgtgcaatgcaaccaccaaaaataattatgcaaaattata

SEQ ID NO: 750482 - DNA, 512 bp, Homo sapiens
cttgcctaaattgcaccccaggaccacccctgatcccaccatatgccatcaattcaggccaccatcatttccctcatatgtggaaataacagcccacagatttaagttttcactctaagttcatattctaggaaagacggaatatttacataggaccttacatgtgttgggtgcatttaataaagtatgttcccyagagaaaggcagagctgaaggggtgtgtgtgtgtgtgtgtgtgtgtgtgtgtgtgtgtagaacagaaacagtctgacagaagaaatactggaaagaaaaggtttctacaatattcttcatggacatctcaccagagctggacacaaacacagaactagaagcctggagtaagaagaacaaacactctgccaatcaaatgatttacttcattcccttcagaagggagtatggctaacaccttcccagtcacaggggaatgttttagactaaggatcattaaaagcagtgcattttaaattaagttaaaaggagcacta

SEQ ID NO: 750483 - DNA, 627 bp, Homo sapiens
ccaaacacaagattcccaagatgtcttaagcaatggtgcatcaatggagttgattttaattagtattttgaagggacaagcattaatttgaacatacatgttctgctgtttttattgaaagcagcctcagtatattactgtaccttccttcaatttatgccaaagctttattaaatttggttcactaaagcttttgtcccaggcctaataaatatatattaggcctggaacaaaagcatatatatatatatacacacacacacacacacacacacwctctctctctctctctatgttactcgtaaagaaatgtaaattaaaacacaaagtctttttgatccatcaaattaacaaagattaatagaatatctgatcctggcagtatgcagtaagatagacactctgaaatactactggtggatgtggacatgaacttttctagaaggcactttggcattatatacaaaagaatttaaaacattcttgtgtttttcttcccatgaacccacttctgaaaatttatctttagaaatggttagatgtgcacaatcatttaggtaagacaatgttcaatggagcacaacttagaatgttaaatgaaataggtaccatatataccatggatcc

SEQ ID NO: 750484 - DNA, 627 bp, Homo sapiens
ccaaacacaagattcccaagatgtcttaagcaatggtgcatcaatggagttgattttaattagtattttgaagggacaagcattaatttgaacatacatgttctgctgtttttattgaaagcagcctcagtatattactgtaccttccttcaatttatgccaaagctttattaaatttggttcactaaagcttttgtcccaggcctaataaatatatattaggcctggaacaaaagcatatatatatatatacacacacacacacacacacacacactctctctctctctctatgttactcgtaaagaaatgtaaattaaawcacaaagtctttttgatccatcaaattaacaaagattaatagaatatctgatcctggcagtatgcagtaagatagacactctgaaatactactggtggatgtggacatgaacttttctagaaggcactttggcattatatacaaaagaatttaaaacattcttgtgtttttcttcccatgaacccacttctgaaaatttatctttagaaatggttagatgtgcacaatcatttaggtaagacaatgttcaatggagcacaacttagaatgttaaatgaaataggtaccatatataccatggatcc

SEQ ID NO: 750485 - DNA, 627 bp, Homo sapiens
ccaaacacaagattcccaagatgtcttaagcaatggtgcatcaatggagttgattttaattagtattttgaagggacaagcattaatttgaacatacatgttctgctgtttttattgaaagcagcctcagtatattactgtaccttccttcaatttatgccaaagctttattaaatttggttcactaaagcttttgtcccaggcctaataaatatatattaggcctggaacaaaagcatatatatatatatacacacacacacacacacacacacactctctctctctctctatgttactcgtaaagaaatgtaaattaaaacacaaagtctttttgatccatcaaattaacaaagattaatagaatatctgatcctggcagtatgcagtaagatagacactctgaaatactactggtggatgtggacatgaacttttctagaaggcactttggcattatatacaaaagaatttmaaacattcttgtgtttttcttcccatgaacccacttctgaaaatttatctttagaaatggttagatgtgcacaatcatttaggtaagacaatgttcaatggagcacaacttagaatgttaaatgaaataggtaccatatataccatggatcc

SEQ ID NO: 750486 - DNA, 580 bp, Homo sapiens
agaactaataccaaccctaccccacctattccaggaaatagaggaggagggaatacttccaaactaattctacaaggccaatatttccgtgataccaaaaccagacaaagacacatcaaaaaagaaaactacaggacaatatctatgattaatattaatgcaaaaatcctcaaaaaaatactagcaaattgaattcaacaacacattagaaagattatcaaaaaaaaaaaaagagagattatcatggccaagcgggatttatccctgggatgcaaggatggttcaacataggcaaaccaatcagtgtaatacattatatcaaccaaatgaagaacaaaaaaaaatgatcatttcaattgtgcagaaaaagcatttgataaaattcaacatcccttcrtgctaaaaaccctcaaaaactgggtatagaaggagcataccccaacatgataaaaaatcatatgacagacccatagctagtatcaactgaatggagaaaactgaaaacctttcctctaatatctggaacataacaaggatatccactttcaccaccattatttgacatagtactggaatccta

SEQ ID NO: 750487 - DNA, 561 bp, Homo sapiens
aatcctgaaatacctgacaaaacgtctccaaaactgcagcagtcagctaaatgctcatgattccatgcttttacacatttcaaaatttcagcatttttaaagaatgtattttagaatttacaatgggatacagaatgtgaaatttactttgtaaccttaatcataatttttaatatatattttactttgttttgattagtcaaaatcaggtatgtaaaaagttgaccttatatcaacattatgatccaattttaaagtaggaaaatcataacaaaatattttctaattagatcaaaaagacactctgtgrtccactgctagaatggcacctgtgtcgagccaccccacttttctcttttgctgccccagcagctccagtgcagccagtggcaggctctcctgcccatagcctacctgtctttccagctgcacgtactactaggcagactctactcacttttcccagtcatgtcttgccgtgattcaaagtcaaaaacacttgctttcctcatgaatgctgcctaacacaagaaggaagctgggctttcctcactcacttcg

SEQ ID NO: 750488 - DNA, 602 bp, Homo sapiens
gccattgggggccagaaataagtcccagtacttggtagccccatgcagcattcccagctttctcccccttcagcccagcttttgtgtcttccctttatccactcttggtgccttccctctgaagatctgttaggagcacgccagttcttatggtmccttgatgggagctgtttcacctggctgctctaatcggccaccttgtcctcctccaaaagttattttctaaatgcccccatgtggcatgattaacttaaaatttcagctcaaatataacttctcaacaaagtcttctgtagtttccactctaaatcagcacttctgattttacacattcatagtaagtatgttttattacattttacatattttttctttttgttacagaatattgtttttattttagtacctactggtttgctctttagacttcatccagtttttacagtagagctatttttggattccctcactataatggcattaaatacgtttcagttgaatgaaataatgaatgaaagaatgaatatgagatccttgaaggctttgatgagcttttcttttactttgcccccacaaatgcctaaaatattgtcatccataac

SEQ ID NO: 750489 - DNA, 613 bp, Homo sapiens
gaaaagaagcttattttcaaattaaaacagatatttataactacaatatgttttatgtaagcctcatagtaaccaaaaaataattttttagcagatggcaagatggccaaatagtaacagctcccatctgcagctcccagtgagatcaacacagaaagtgggtgatttctgcatttccagctgaggtacgcagctcttctcattgggactggttagacagtggatgcagcctatggaggttgagccaaagcagggtggggcrtcggttcacccaggaaggacaagggaattccctcccctagctaagggaagccatgaaggactgtgctatgtggaagagtgcatttcagccaggatactacaattttcccacggtctttgcaactcacagaccaggagattcccttgggtgcctacaaaaccaagggcctgggttttaagcacaaaactgggcgaccgtttgggcagacactgagctagctgcaggagtttttttttttttttttgtatactccagtggcacctggaacaccagtgagacataactgatcactccccttaaaagggggctgaagccagggagcaaagtggtctagctcagtggatcccacca

SEQ ID NO: 750490 - DNA, 584 bp, Homo sapiens
ttaattaatgtttctgtataaagacataccagaccacacagtgctttccatcaaagctcacagatggctgcccaatcataactgtcaaatttctatgttgctcttcctagagagagatgcagagagtaagacacagcaaacctgtgattcccagcctggagcctacagatgtgatcccagggcaccatgagttctctataaragcttaaaaatgattagtttctatttagctggtaatataaaagcaatataagcttctaaatcttctgggtgacagtctgaagtagaacattgtcacacaggtttagtgtccacattttggtgggggcttacaatcatattcagataatacagtgcacttaaggtagccatattgacttcactgtttttactgtcagtggtgagaaggtaagtatcagaaacaagcttccagcgctacctctaaaccaaagtgtacctaacattttatcactctcctactttttggggtgctttacaaatgttatttaattctgatgacattataagtagttataatattgttgtcaggttctgaagttcagagaagtaaagtaactcttcta

SEQ ID NO: 750491 - DNA, 611 bp, Homo sapiens
tcactgttggtttaaagtctgttttgtctgaaattagaatggctacccttgctttttcttttttctgtttgcttggtagatttttctccgttcccttactttgagcctatgggtatcactgcacatgagatgcatacrctgtagacagcatacagttgtgtcttgcttctttgccactctgtgccttttaattgggtcatttatttacattcaaggttaatattgatatgtcaggtttgaccctgtcatcttgttgttagcagattattatgcatacttgattatgtggttgttttagagtgtcaatgtatgtttttgtggtggctggtaatggtcttttctttccatatttatccctcacttaaggaccttttgtgaggcaggtcctgtggtagtgaatttccttagcaactgcttgtctgaaaaaaatcttatttctcattcacttatgaagtttagtttggctgtatataaaattcttggttggaatttcctttctttaagaatgttggatataggcccccaatatcttctggcttacagagtttctgctgaaaggccttctgtttacctgatggggttccctttgtaggtgacctgccccttctctc

SEQ ID NO: 750492 - DNA, 609 bp, Homo sapiens
ttcaaagctactgtagagctcgaaagagggtgacaggaatagggtaagctaatatgccataaaactcgctcttcttactaagattcagccagttttccttgatgtcatcctttggttaacttccagagttctgaaaaagtttattttgatcattttttgtcactgttcttatgactttatggaggaacagattttcaggggcccctgccatgctactccaaaagtgcttctctctgctgacttrctttctgaacctaccttgatcttggaaatttgtctatgtcatatgtcctctttttaagagctgtgaggaaaaaatttctgttaacactcttgagtagtcatttaggtttcttctaatgtttagctgttccaaacaaaaacatcaattaacattttagaaaggtacacctttaggcacaaacagttggctatttctctacaaggtagaattatataagtggaactgctatgtataactatatgcacattttaaatttagataaataattccaaattgccttaagattttaacaatttataagtctgttgcaatttctgaaggcctaccatctttgtggagactggatatgacatgatattttatat

SEQ ID NO: 750493 - DNA, 601 bp, Homo sapiens
accagagactgattacatcatggtgaattcatagaattgaatgcctttttctgtgaacctgagtaaagacacctgaaccaaagagcaactgccaacctggcctgagagagtcaagaactcccaccctgaccttcatctttcaattcctactgcctcagtcatgaatttttggagctgctctactctcctttctcactatttcccaatagctagaaccatttatttcctgactaaatctggcttattcctctatgttttcataactttgttgaagttatcctgtaatccttttgaggctaagttcaaattccgtttatgcaaatagcagcacctacttattctgatcatttctttatgagacctccctctgtggaagcctgagatctaaaccccagtccactactcaygtgtttggacaagctagtttacctctgtgaatttcagtttcctcaattatgaaacaggaacaactccatatacttaagggagaggtgtaagaattgagacaataaatatgaatgaccttggcaagacacatcactagtaaatttttgctcctacagctagagtacaatggtgtacatataataaggaaatcaga

SEQ ID NO: 750494 - DNA, 619 bp, Homo sapiens
aattttgtagaacttaaaggaaacaaaagattttggggggatggagtattttgctgacattgtttaaaattgctggtttgctaataaaaacaaaccattttttccttttttattgtagtaaaatatatatagcataatttaatcatattaagtatagagtttggtggcagtcagtagattcacgttgttgtgcaaccatcactatccatctccagaacttttaygtcgtctaattctgatactctgtagccattaaacagtagctccctattttctcctctccccagccctgacagtcatcattctactttctgttcctgtgatttggctattttaggtatcccatataagtggagtcatacaatatttgtccttttgtgtctggcttatttcacttagcataatatccttcaggttcatccatcttgtacatgcatgtatcagaatttcatttatttttaagtctaaataatactccattgatttacataccacattttgtttatccattcatctgtcaatggatatttgggttgtttttaccttttggctattgtgaataatgctattatgaacattggtatacaaatatctgtttgaatcctgaaagcaggccaat

SEQ ID NO: 750495 - DNA, 589 bp, Homo sapiens
caggctggtctcaaactcatgggctcaagtgatccacccaccttggccccggtaaagtgcgggtattacagacatgagccactgtgcctagtctgtgtttcttttagacaatgttagattttacttgctagtgctttgtctaagaattaacataaaatttttatcctttataatcccagttgggttttgatattagttttaygatcctaaacagaataggatacatttagcaaatactgtgactgttctatgaagcctagtaaagtgaaactgtgaagctgactgaagtctgatttttttatgtggggtgaaaaaaaagagagaacagaaagtttaactaagtcactagttctccagcatttggtcttatgaccattttacatgcttataaactctgaggactttaaaaagtctgtttctgctagttatatctatgaatatttgcaatattaactttagtcagagactatcacttatataatactgtttttctgaaattttttgagaatctctttgtggccttgtaataaataagtttatacaagtgtgtgaataagcactaaaaagaatgtatattctttgggtgttg

SEQ ID NO: 750496 - DNA, 623 bp, Homo sapiens
ctactgtttattcttatggtgatactatattatttaatttcctatagccttttataatctgggttatctgtggaaacatctgtagttaaacatctacgacaagatgtttgaatctactagcatcaagattagtaaaaatttaaagccagaaataattgggagaaatgataactctcatgtactgctgaytgtattataaactgttacatttcaggcaaagtttaatgaaattaaagatggacataccctttgatctgttcatttatgtggttcaaaggaacagtgatagtagtagaggagtgacatgtgatgcttttgtttcttaggggtgtgggccaaatggcttctcttatccacagtttctgtatcttcctagtgaactagatgatctgcaagggcccttccactctataagtcaggggcttttgccatacatgtatcagcaaatcttttttctccaagtggaacaacttcttaagacttaaaaaaataaattttaaataaagttgctcacattttaaaatgttcaatatcattaactttgtctttaactgtttgtagattctatattttctcatttaaaaattaaatgtatttattaaatataacatctggtatgtttg

SEQ ID NO: 750497 - DNA, 624 bp, Homo sapiens
tgctgttccataaatcctgtcagctttcttcatttcttcttatttttttctttcttttcctctaactgtatattttcaaatagccagtctttaagttcacagattctttcttctgcgtgataaattctgctattgacagtctctattacatttttcatttcactatatttttcagcttcagattttatgtttcttaataatgtatataatttcaaccattctgataaatttcttgttttggacatttacttactttcttgattttgttgaattatttctgtattttttgaagtttactaagctttcttaaaacaattatttttaaattctttttggcagtttgtatatcctcatttacttggaattaactactgggaaattactrtgttcttttggtgatgttttgtctctttggtttttcatgtgtctggttgccttttacattgatgtctgcatgtttgatgtattccagtcacctattccaaagtttatggacttgtttctctgtaaaaagtcctttcccaaatgagggaggctgtgagggcactttctgggtgaggtgcaaaggtactggcactagtgacagcactgctgtgtagtctttgtgcagctctatcatctgag

SEQ ID NO: 750498 - DNA, 648 bp, Homo sapiens
ctgctatagagcctattatgagagatatatttctaattattgcatcttttacaccaaaccatggaaaaaggaatctaacaaatgatgcccttctagaagagtgaaggtttcctggcaatgctatctttaatccatgatgtgggttaagaggagtgaaccaatgttctgtttctgcctgattaggaggcaatgtacataccattaaaatagatgaagatggccttcatctttcatcttacatctatcaaggtataagattatccatgtatatgggttatatcaaggtataagattatctatgtttaaggctggctgcaaaatccttcaaaaataaacgtatatgccatgagtgcacacaacagacccccttttcacttctattgtttatagaggcataatccagggaaaaaatrttcaaagataacagtctcgtaatagtagagaagtcttgatccatgatcttggaaaaagctgttcacatcaaggatgccgtcttctgctggagagaaacttccctggttagctttaccttaagggatcaaatgggtgtagtttctagagtgtggagggaaacaaaagtccaaggtcccaaagttttgctgcagtttgaatggcaagggcagcctttctctaatgttcggagaatat

SEQ ID NO: 750499 - DNA, 608 bp, Homo sapiens
tcacactgctataaagaactacctgagactgggtaatttataaaagaggcttagttgactcacagctctgcagtattaacagaaatcatgactggaaggcctcaggaaacttacaatcatggcagaaggtaaaggggaaacaagcccatcttatcatggtaaagaatgagagagagaggaaagagggaggtgccacacactttcaagcaatcacatcttatgagaactcactcactatcaagagaacagcaagggaggaatctatcccatgatccaatcacctcctaccaggcccctcctccaatttaacatgagatttgcacatggacataaatcttaaccatattcttataccccaagcccctcccaaatttcatrttcttctcacattgcaaaatacaattattccttctcaatagtaccctagtcttaactcattacagtaataactcaaaagtccacagttcaaagtctcatctgagacaagtaagtcccttctgcctatgagcctgtaaaataaaaaacaaattagttacttccaaattacaatgaggatataggcatttagtaaatgctcccccttccaaatggaagaaattggccaaaat

SEQ ID NO: 750500 - DNA, 531 bp, Homo sapiens
accaccagggccctaggtttcaagcacaaaactgagcagctgtttgggcagaaaaggagctacctgcaggagttttttttcataccccagtgatgcctggaatgccagtgagacagaactgtttactcccctggacaggaggctgaagccagggagccaggtggtcttgcttagcagatcccacccccatggagcccaacaagctgagatccactgggatgaaattctcaattgcagcactgcagtctgaagtcgacctgggatatttgaacttggtggggagagagccgaggcttaagtaggtggttttctcctcacattgtaaacaaagcctccaggaagttcgaactgtgtgtggaacccactgtagtgcagcaaagccrctgtagccaaactgcatctctagattcctcctctctgggcagggcatctctgaaagaaaggcagcagccccagacagagacttatagataaaactcccatctccctgtgacccagcacctgggggtaggggcagcagtgggctcacct

SEQ ID NO: 750501 - DNA, 664 bp, Homo sapiens
tagggccagtcattggctccttgctttgtccctttggcaagattatgttttcctgcttgctgttgtttctggtgagcatgcaggtatggttttgcatttaaagattattccagtcttcgctgacttgtcttgttttggtctttctagggtatgtttgcatagtggttctttgtaatgtgcctgttgagtacactttattctagattgctgccttcattctggtgcattgagatgggatttgtctcagcttttgcataggtttggagcattgcttatattggatgtgacaggtcccaaaasggatacccaaactgtatggaaaacctggctaaaagtttgtgttcagaagattcatggagcatgccttctacaatgtggtgctgataaatagccactcagatttggcatcttctttggctgagataaacagcagagctttgcaggctgggattgctagttcacctccctttgtatctcactctgcctcccagtactttttctccctacaggcacttgtgatgctatgcttcccatgggttgagacaggaatgattttccggcaagaaaacacaacatgctgggaaagctgagtgtctggctttatgttattttttccaatgtggacaccatgagtctgatggaagttttccacatgtggtgcctg

SEQ ID NO: 750502 - DNA, 630 bp, Homo sapiens
cctcacagacacacccaggaacaatactttgtatccttcaatctaatcaagctgacactcattattaaccatcacagctgatgataatctcagtgctggatatttgtttctggtttcctatgaagaagagtgaaatcacattgcttctcctctgccatttttgtgacatcatttttcttttatttatcaagtgttagtttatcaaatttaatacagagtaaaatggtttaaatagttattttgcaaaatagtattacatgtgtttattttcacctaagtgcttaagatttcaaatgtcaaaaccaaaacctctgctttatggtttggcagcaaatttagcagtaatttctcatctcttagaaaatgacctttaatcaattactaaacaacaaataattggcctttgaatattttaaccatagaaaattgggggctcagtattatttcgaaaatattgatcatatatttgagataatgagaatgytcttacaaaaatataggaaatacttttacataagaaaatttttactgttaaccattttatttaaaacctatacaaaaaaatgaattattaatattactagaaaaattgtataatcagatgacataatgtatgacccaactgtcaaa

SEQ ID NO: 750503 - DNA, 642 bp, Homo sapiens
aagcagcctcaaatattataagttaacacaatttacatgcattggttgttcatagcagtccaagtagatgcagatcttgagatggggtgggggttggggttggcaattggttgtgatgtatgtgttcttttctgtgaagttattcaagtactaggctactgcaggctctgtagtcttcagtatgtggcttccaaaataacactaagaattatcaatgctgatgccacctgagcaaggggtaatggtggagcacaagttttagaggcaggtctgaaagcrgcaaaaatactttgttcaagtttcattggctagaactcagccacatggcaacatctaaatgcaaaagagtgtgaagatagtcaagttattttttcaaagtgaaatggaagaataaatttaaaggccagttctcactttctataacaatctgatcttcagatacacgtcactcttgtctttattcttagaattaattcagtccttcccaaaacatggcaacataaatttccatttatttattacatcaaactccaagttcaacatctatggtctataggcagatttctgtagtacaacaattataaattcataaatgaataaatatctctcatttgtccaagtacacttgcacacaaaaaatag

SEQ ID NO: 750504 - DNA, 589 bp, Homo sapiens
tgaataaatatctctcatttgtccaagtacacttgcacacaaaaaatagaaaaacagtgcatttattgttctataagagttatagaattcttttttaaaaaattattggtacataataattgtacgtattaatgggttacatgtgatattttgatacattcatacaaagtgcaatgattaaatcagtgtatttagaayatcaccttgaacatgtattatttcttctttgtgttggaggtattttaaatctcttacagctattgaataagcactacaaagactcctttggctctatccaatggaaaggtctttcttatcgattatcttccatggccacaactatataggattatggcaagtatgtcctccatgagcagtgtacatctttaacagccctgctttctgctgttgtaagtttgtgactcaaggtttattgcctgtttcacaaatttcaaagctttctgagaccagactcattatatctttagtaatacaatttctgttaaaccatttacacttcttcactaccacatatcctcaaatctatacctttctttgtaggttgaatcagtattttatgtgccactat

SEQ ID NO: 750505 - DNA, 648 bp, Homo sapiens
aattaaaaaaatactacttcatattctgactaattggtcaaagattttacataataaaacaaaattattagtgcctaattcaaaagggcgtgtttcttcctttcatttacaatgattttcattaacagaaacaaaacaaccatggatggactcaaatattccttttctgaaacaaaacaggcacatactatttactattcaggaataaaaataytttaaattgcatatatttcttctttttaaccctccagactttaacagtcatatccatctcctatgctagacaccactaggagaatagtgattatttattctttacttttataattatatccaaaagcgtgtagtaaatgcctaactaattgaataaagaacatgttttcagacacaatgcagaaataaactcactaaaaacttgcaagttcagttttaatttagttcttaagattgagaatgtaaactataattaatattccttcataacttgaatgaggtccaaattagaactttttaaataaatccttgactattcactagcttgcttaaccccattctatttatttttccatttccctaaagatagacagaatactaagatatgtgaacttgtcaagacgtccgtatgatcctttggagacatttttaata

SEQ ID NO: 750506 - DNA, 648 bp, Homo sapiens
aattaaaaaaatactacttcatattctgactaattggtcaaagattttacataataaaacaaaattattagtgcctaattcaaaagggcgtgtttcttcctttcatttacaatgattttcattaacagaaacaaaacaaccatggatggactcaaatattccttttctgaaacaaaacaggcacatactatttactattcaggaataaaaatattttaaattgcatatatttcttctttttaaccctccagactttaacagtcatatccatctcctatgctagacaccactaggagaatagtgattatttattctttacttttataattatatccaaaagcrtgtagtaaatgcctaactaattgaataaagaacatgttttcagacacaatgcagaaataaactcactaaaaacttgcaagttcagttttaatttagttcttaagattgagaatgtaaactataattaatattccttcataacttgaatgaggtccaaattagaactttttaaataaatccttgactattcactagcttgcttaaccccattctatttatttttccatttccctaaagatagacagaatactaagatatgtgaacttgtcaagacgtccgtatgatcctttggagacatttttaata

SEQ ID NO: 750507 - DNA, 648 bp, Homo sapiens
aattaaaaaaatactacttcatattctgactaattggtcaaagattttacataataaaacaaaattattagtgcctaattcaaaagggcgtgtttcttcctttcatttacaatgattttcattaacagaaacaaaacaaccatggatggactcaaatattccttttctgaaacaaaacaggcacatactatttactattcaggaataaaaatattttaaattgcatatatttcttctttttaaccctccagactttaacagtcatatccatctcctatgctagacaccactaggagaatagtgattatttattctttacttttataattatatccaaaagcgtgtagtaaatgcctaactaattgaataaagaacatgttttcagacacaatgcagaaataaactcactaaaaacttgcaagttcagttttaatttagttcttaagattgagaatgtaaamtataattaatattccttcataacttgaatgaggtccaaattagaactttttaaataaatccttgactattcactagcttgcttaaccccattctatttatttttccatttccctaaagatagacagaatactaagatatgtgaacttgtcaagacgtccgtatgatcctttggagacatttttaata

SEQ ID NO: 750508 - DNA, 625 bp, Homo sapiens
tattttatccagctatttctggtccccctgtggcttgaggcaagggagtaggggagggagaaggaaaaatgaaattgtctggacaaggaagttcagagagagcagagggtcaggaggagcagaaggggagacagtttctggagccttcctgattttagaagtggcgagacagtttcaaaattttttttaacttcctaaagagaggcaagcttatcgtttcctctttttgatgattctagatgccacctaagtacgattcccattcattttctttgattcgggagcctmagttttctaatctagcacacaagaaaaccaatttagggacatcaaaagttccccattttggaaaccttagacctaggtcatctttagtaagatcttcctatttacataaatactcgcaagtcaaggcaccataattattaaacataaacccagctgtggtgcccactggggaccgctctccttgcctttcctctcttttggagggtttatttgctatctctctcttttttttttttttaagagcaattgacctgtggcctaaggcttttgtgtggtggatcaatatgtgctgcttgtgggcagcactttacagtgtttcaacactgagtcgtttcta

SEQ ID NO: 750509 - DNA, 529 bp, Homo sapiens
agcttttaaaattgattaaaacataagtacattcataacaaaaggagttacagtgactagtacctaacctttgtttcatttggcatcacagtctttcattagttgtcacactagccctgagacttaaatgttgtattgcatagatgtcaaaaatgagatttaaaggagtaaaataattttctttatggaacacattatgttagtgatggaactgtttttggttctgttagtataaaaaatgtgctaataggtttagacgttaaagtgtaaaaaccttccawctctccatatcctaaattacgtaatctttaaatgcatagtgtgtatttaggtgatattgaaaatagtggtaataatagctaacatttattgagtgatattgtttggagatgaagcagaaatttaacttcacaattgtagaaaaataattttctatatttaggttcttaggggtggaaaccatatagacaaacttcttgttataaatgaaaaagaaggttctgtttattcaattgacaattgactagaa

SEQ ID NO: 750510 - DNA, 508 bp, Homo sapiens
acagttttgtcctgtctctgagccacagcctgcatcctagatttcaccagtaatatagatgacattctgatctctaacttacttctccaactctcaactagctatgaaatcagcatgagagtaattataatatatcaagcccctgaaattctactatctagtacagtgaaacactttttaaaaaaacaaacaattcttagacaatctggagatttctatctctaccaatgayagactaatttgatagagccaatcttattaatgaggaaaagctttaaaggccaaacgaatttatttttaaaaatctactcaagtcctggagagcccccaaagcagtaaagatttgaaaccaaaatccttgaggtggcagggtggtgggtggagaaagaagtgaacctaaagttgactacaaagttgcagctctgaagttgagaagcctaagagagcttctagcattcttgcagagtagggaacacaaaaattagagttctggacttacgaagaagaa

SEQ ID NO: 750511 - DNA, 608 bp, Homo sapiens
tactttaccagaataaatatggatagcttcaaacataatatatgcattctttttaggaaagggagagatttttaaaataatatttctattagggaagttttgaataactcttctctgccgaaagttagacctatgtctgtttatatcctgaagttattgtcattcagtcgtggcacatgcaggtgaatttttttacttgatagtcttaacgtactttcatttgatgcaaactatagacagaaacattttacttttcatgacatttattgtgcattacagttttttaaatctgtctaaagagatcacatactgtaacttgggattgcttatttttgagaaacatttaagctgaagcttttaatacaaatatctcaaatttacttgagatctttattttggttaaactgttgacatagagttaatytttttattttataatttttaaataatacaatctttaactgcattgtttagggaggtacgacttgggagaaatggggtggaagaaatcagacagcatcctttctttaagaatgatcagtggcattgggataacataagagaaagtaagtcaataaacctaaatattttcattccatcacattctg

SEQ ID NO: 750512 - DNA, 605 bp, Homo sapiens
taccaagtgaacactacaagaaatgctaaaaggagttctaaatcttgaaacagaatatcaaaatgcacaaaaatagaaccttcttaaagcataaatctcacagaacctataaaaaataccacaatgaaaaaaatctaaggtattcaggtgacaactagtatgatgaagtacctcaaatctccatactaacattgaatgcaaatggcctgaatactccacttcaaaggtacagaatggcagaatggataaaactccaccaaccaagtatctgttgtcttcaagagactcacctaatgcataaggactcatataaacttgaggtaaagggtggaaaaaaatattccatgcaaatggaaacaaaaagcaagcaggaatagctgtccttatattagacaaaacagactttaaagtaacaacagtttaaaagacacagacagacattatrcaatcataaaaggatcagaccaataggaaaatattataattgtaaagatacgtgcacctaacataggagcctccaaatttataaaataattattactaggcctaagaaataagataaacagcaacacaataatagtggggggacttcagtactccactga

SEQ ID NO: 750513 - DNA, 692 bp, Homo sapiens
aatattgccacatcaattgacttgacttgacaaagtaaattggttttcaatttactttgcccagattggtcagaggattcactatttgtatttgtaaggcagatactatttgtaaggcagatacagccttaaaaaatacatttcttaagtagacttgaaagtcgayggacttttcaagttagaagagttgatccatggactacagaaggaatgttatgttgacaagcatgagaacagcatgaatctccttgtatatcttcatcacagctcttggatgactaggtatactataagtgagtataatttttccaaaggagtatttttcttctgggcagtaggtctcaacagcaaacgtaaaatagtcagcgaatcatgctgcaaacagatatgctgtcctctaggctttgttgtttcatttatagagcacaggcagagtagatttagcataattcttaagggccctgggattatttgaatggtaaatgagcattggcttgaacctaaagtcaccaactgcattagtctctaaaaagagaatcagtggttcctttgaagctttgaagtgggacattgacttatcttctagttacgaaaatcccaggtggcatcttcttcgaattgaaggctgttgtatctacactgaaaatctggtgtttagcatagtcaccttcatcaatgattttagctagagc

SEQ ID NO: 750514 - DNA, 641 bp, Homo sapiens
gtacatgggccaaatatgaccggacacctgttctttctaataacatttgattagaagctaaacacattggctgggcatggtggctcatgcctgtaatcccagcactttgggaggccaaggtgggtggatcacgaggtcaggtgttcaagaccagcctggccaacatagtgaaaccccatctctactaaaaatacaaaaaattagccaggcatggtggtgggtgcctgtaatcccagctactcgggaggctgaggcaggagaatcacctgaacctgggaggcagatgttgtrgtgagccaaaatcacgccactgcactccagcccagccaacaatgcaaaactccgtctcaaaccaaagaaaaaaaaaaaaaagctaaacacatttatttatttacatctacatatttatttatgtctgtttattgtctatggctgctcccacactacaatggcagaattcactgttataatagagaacatacagcctacaaggcctgaaatacttaccatctggctctttacaaataatggttctctatcccttctataaaccctaaagcagctactaaaaaccaaggagttatggctaatatgtcaaaacagagataaaatggaatcatatttttaaaaaattaatccaa

SEQ ID NO: 750515 - DNA, 521 bp, Homo sapiens
gagtattttcttccaaaatattattgttctatttctgttcctatttgttgttccataggtttaggcaatgtggacaccttggaagaattactctctgttgaaggtgtgcatgctcccaatggttagaacaaaatgttatccttgtaatgtggtagtaaaaaccactgttttcactttaaaactttttaaattttgaaaatataataattatcagattgaatattgttggacattcctaatttattgaaatgtgtttttatgttckgactttctaaaaattatttctctaaacttgacgtcattgagctattttgtaaaatcactttaaacagtggcagcatattttactccataataaaaaggaaaagcatctccagggaagcattactctttagaattcatgtaattcaaggataatcaatatgtcaccagaaacaaataactaagatcagactcgttttaggggaggtgatagataaatatgaatatagggcatctcaaagagggtacaagggtaagtc

SEQ ID NO: 750516 - DNA, 521 bp, Homo sapiens
gagtattttcttccaaaatattattgttctatttctgttcctatttgttgttccataggtttaggcaatgtggacaccttggaagaattactctctgttgaaggtgtgcatgctcccaatggttagaacaaaatgttatccttgtaatgtggtagtaaaaaccactgttttcactttaaaactttttaaattttgaaaatataataattatcagattgaatattgttggacattcctaatttattgaaatgtgtttttatgttctgmctttctaaaaattatttctctaaacttgacgtcattgagctattttgtaaaatcactttaaacagtggcagcatattttactccataataaaaaggaaaagcatctccagggaagcattactctttagaattcatgtaattcaaggataatcaatatgtcaccagaaacaaataactaagatcagactcgttttaggggaggtgatagataaatatgaatatagggcatctcaaagagggtacaagggtaagtc

SEQ ID NO: 750517 - DNA, 521 bp, Homo sapiens
gagtattttcttccaaaatattattgttctatttctgttcctatttgttgttccataggtttaggcaatgtggacaccttggaagaattactctctgttgaaggtgtgcatgctcccaatggttagaacaaaatgttatccttgtaatgtggtagtaaaaaccactgttttcactttaaaactttttaaattttgaaaatataataattatcagattgaatattgttggacattcctaatttattgaaatgtgtttttatgttctgactttctaaaaattatttctctaaacttgacrtcattgagctattttgtaaaatcactttaaacagtggcagcatattttactccataataaaaaggaaaagcatctccagggaagcattactctttagaattcatgtaattcaaggataatcaatatgtcaccagaaacaaataactaagatcagactcgttttaggggaggtgatagataaatatgaatatagggcatctcaaagagggtacaagggtaagtc

SEQ ID NO: 750518 - DNA, 560 bp, Homo sapiens
tgtaattcaaggataatcaatatgtcaccagaaacaaataactaagatcagactcgttttaggggaggtgatagataaatatgaatatagggcatctcaaagagggtacaagggtaagtcctaaaaatatagaaaagagaggatgcatatgctaaaatttgttttattgaattataatttgctttgtattgaattttcatgaaaataatatggcttgatgcacttaacgtttttcgtaccatagaacaattcttcagtctatttaagcctatgaactcttttctcagaataaagtttctaaagacataaaataaaatacataccactaccaagaaaatagttacattatagttatcaaagaactgaagaaaaaatctatgatgtagtaacatagttgcctyttattattgtattaaatatgaaggcctgtcattaagttataataaataacataattacaaatggcattaagcataaataatattttgatacctctttaacaactgtaataaaatatgaaaatgtctgtcatttgtattagtgacaaggttatgggtact

SEQ ID NO: 750519 - DNA, 573 bp, Homo sapiens
gaagcagaattctgctttctaaagggtaggatgttttaatagttggagcagaccacctagcgagactctgaggttttcctcaatagactgttcaggcataggccctagtgtaattatttgcttcttaaataattaaccacccactcactatatgcctcttggtagtgggcatggagcagtaaacaatatatcagaagcatggtgggggtggatgcccttactggcaaataaaggccctgtaacttaagtgggcacttaagtgagaagccattaaggagagtgtgaggacctggattcttctctgaattgcttagctcagaatcagccayaggatttcaaaatgcacagtagattacctctagagaagagagcatactctttaatgtgaggtgtagtgtggcttgaagtaaaccactataggacttctgtattcagctctgtcatgtaaagagtgtaggagtcatcactcatatccttataatagcaatattttaaaaactgaacaaactgaaaagcaatgacttttcttgacccattggagaactgaggttgtagggtaaattgccaccctga

SEQ ID NO: 750520 - DNA, 573 bp, Homo sapiens
gaagcagaattctgctttctaaagggtaggatgttttaatagttggagcagaccacctagcgagactctgaggttttcctcaatagactgttcaggcataggccctagtgtaattatttgcttcttaaataattaaccacccactcactatatgcctcttggtagtgggcatggagcagtaaacaatatatcagaagcatggtgggggtggatgcccttactggcaaataaaggccctgtaacttaagtgggcacttaagtgagaagccattaaggagagtgtgaggacctggattcttctctgaattgcttagctcagaatcagccacrggatttcaaaatgcacagtagattacctctagagaagagagcatactctttaatgtgaggtgtagtgtggcttgaagtaaaccactataggacttctgtattcagctctgtcatgtaaagagtgtaggagtcatcactcatatccttataatagcaatattttaaaaactgaacaaactgaaaagcaatgacttttcttgacccattggagaactgaggttgtagggtaaattgccaccctga

SEQ ID NO: 750521 - DNA, 512 bp, Homo sapiens
caaggatccctttcagaaatagcatttgccccagcaatcccattactgggtatatacccaaaggattataaatcattctactataaagacacatgcacatgtatgtttattgcagcactcttcacaatagcaaagacttggaaccaacccaaatgtgcgtcaatgatagaatggataaagaaaatgtggcacatatacaccatggaataccatgcagccataaaaaaggatgagttcatgtcctttgcagggacatggatgaagctggaaaccatcattctcagcgaactaacacaagaacagaaaaccaaacaccacatgttctcacacataagtgggagctgaacartgagaacacatggacacagggaggggaacatcacacactgggacctgtcagggggaggggggccaggggagggatagcattaggagaaatacctaatggagatgacaagttgatgggtgcagcaaaacaccatggcacatgtatacctatgtaacaaacctgc

SEQ ID NO: 750522 - DNA, 579 bp, Homo sapiens
gaaatcaacaaccattacttgtaatttagaaaagcatacaagttagaaatagataccaggcaaaaattaatacctttaaaaaggggtggcaatgtttttatgaataaaatataactcagcgaaataattattaaatgggaaaaagaagtaatttatatggaaaaagttacaactttctaataaatatcgttttatgtaccataatcagaaatgacaaaggtgacattacaacygatcccacaaaaatacaaaagatcatcagactattattaatgcttctatgcaaacaaactagaaaatctagaggaaatggataaattcctgcaaacacacaattgcccaagattgactaaggaagaaattgaaaccctgaatagaccagtatcaagttcagaaactgaatgataacaacaacaaaaaaacctaccaatgaaaaaggccccagaccagatggatttacagcctaattctacccgatgtacaaaaagaagtggtaaaaattccacttctactattcaaaaaaaaaaaaaatcaaggaggagggactcctccgtaactcattatataaagccagtatca

SEQ ID NO: 750523 - DNA, 577 bp, Homo sapiens
taggtccatgtagtttaattaaatatatccacaaaatattcaagaacagataatgatcaccttaatgcttttttaaggaaaaaaacagcaattacttttctgatcatttttgtaatattaatataatattgatatcaaaacctaagaagaacattacagatarataacatacaggctaacttgagatatgaacctagaatcaaaatttaaaaatgtcagcaaataaagtctagcaatgtataaaataaatcaagtattttttaggtaaaaatcctctagaaaacatcaattatcctatgacccaacaattccacttctagatatatatgctagatatatatgctaggaactatttttcctgggtgccatgaagcatgtaaaggatgtcaaagcaacattgcttgtcacagcaaaaaaaaaaaaaaaaagagaaaaaaagtaaattactcagatccgccaatcaaatccatcaataataggaaagataataataaaaaagatacattacatgtgctgtgttcttaaaatggaataatatctacccaatgaaaagaaatattgtatttattttatcaat

SEQ ID NO: 750524 - DNA, 562 bp, Homo sapiens
aacagagattgatttatgtcatgtctttgtaatgtagttccatcattcatcatatctattatcaataatatctattataaacagtggaataaaagtaacaaaatataaatatagaataaaagacatcactcctctgattatgtgaaaataaaattgaaaactataatttccattacattaraaactaaattaattagatattaatctctttttggcctcataaaatttgcttttgaagagcaaatttaaatttgctgtttaaagctatcattagtaaattgttgtgataggcaatatattttttctggtattcttttcatattttaaaaggcacttagatttgttgtttgcttttacatttttaatttgttgttcacttttacatttgtaattcagcaaaatattaaccatgagtctgatttattttatcattggtacattatttttattcactttaaatactaaataatatgagcattgtggctctgctcatacaagagcgtgtcattattacttgtagaagaaaatgcaatttaagactattttaggctatatctttatg

SEQ ID NO: 750525 - DNA, 562 bp, Homo sapiens
aacagagattgatttatgtcatgtctttgtaatgtagttccatcattcatcatatctattatcaataatatctattataaacagtggaataaaagtaacaaaatataaatatagaataaaagacatcactcctctgattatgtgaaaataaaattgaaaactataatttccattacattaaaaactaaattaattagatattaatctctttttggcctcatamaatttgcttttgaagagcaaatttaaatttgctgtttaaagctatcattagtaaattgttgtgataggcaatatattttttctggtattcttttcatattttaaaaggcacttagatttgttgtttgcttttacatttttaatttgttgttcacttttacatttgtaattcagcaaaatattaaccatgagtctgatttattttatcattggtacattatttttattcactttaaatactaaataatatgagcattgtggctctgctcatacaagagcgtgtcattattacttgtagaagaaaatgcaatttaagactattttaggctatatctttatg

SEQ ID NO: 750526 - DNA, 513 bp, Homo sapiens
aaaagagaaacaatagattactgaagaatgaaattggctatcaaaaacagtacttttgaatgaggaagaaataaacacttggcaaatgaccaattactcataaatttgcattcaaatgaccaaacctagaagtaataatatcttagtagcaatgaacacacttagtgctcagatcgtggtttctaaatatcattcaccaatgaaaggaatctgggtgcctaagaaaactggttgatkccaatgctgcagcagggaaaataaaagacgagtctgaccaccttgtgggaccagaagcagcattaaaaaaacaaaacaaaacagggttggtgcatgttaaatggatatacgagccaatctaacagagctctcaatggcccaaactgaaacaactggagcaagaaaataagtaacaatagtattatattataatccaaagaattaaataaacagccatgagtccatattgatagaaaattaatagtaactagataagggaaattcttccttacagag

SEQ ID NO: 750527 - DNA, 621 bp, Homo sapiens
tatgtagagaatctgaatgaaaattttagcaatggagtaactaggaaaacaatagcattttaatcacaattcgtgagcctgcaactatacatgcacactggaatctagctgataacttgctctttaggttttgctaattcaagttctgatcaacatttcttaaaatagtatgtaagaaagtcttgtttcttaagcagatatttcatgtttctgtagagaagaggcaagaaaaatcaagaggaagagagtttgagagtataatgaaaagtagagaaacaaaaaagaaaagatgaaggggtcaaggagttatgacattttgagaactaaatgagtagatttggagacttctctgaacctccgaacttctgatcacttatctgtaaagtgggagkcttagactaggtgatctccattcttgcatacagtgttcaaagaaacataaaacaccatatgtattttccatctgcagttgattgaatgtgcagatgtggaatctgtggatatggagggctgactgtactacccaattttatataaaagacttgagcattcataaattttgatatccaaggggaatcctggaaccaatcccttctaggtacagaaggccaactgtattat

SEQ ID NO: 750528 - DNA, 678 bp, Homo sapiens
gaaatttgtatagctaggttatttaaataagaattatattttattttttagctcaattattttacacttaactgcaggtcaaaataacaataacatcaattaaagaacgttaactatatttgtctaagcctccttttcctccttcagggattctcctgtgtcacagtgagaactggttagatgtgaccccatgtgtttatacaagcaagctgcccagccactctcacttgcttttaaacagcactcctcaggctcaggggctgtccctacctcatagtgacctccgggccagcaactggaatctgaacaattaccatcccttctcaagcggcccactctagagcttccarcccttccatctcattcatcttccactgcttccagggatgcccaggcatgatattgcttccctggcacaatattgcttccctgggtgattcttggacccttgtttctctgccttttgggcaaagtgggcacattgcaatttcttcatctaaccaaggaatttcaaagcaaactgctgcatttcttttcatctcagagggttctggggctctctcctgagctgctgtatacttagctgacctcaagctgccagcacagagcctgggctctgttctgtggaaaaatagttgtgtgactttgagagaacatcttacactgttctctcaaagc

SEQ ID NO: 750529 - DNA, 641 bp, Homo sapiens
gagtaatcagatgtcctttataggactggttccaccatcttaaagggtttaatgacagcagaaggtggtcactgacttagcaggaaaagaggatagtaacattcaatatagattaatttaattacctcctccttcaccccatttctgggggcctggcaatatccaggaaagttcagcaaatgaaatttcttattcttctacccttgaaatatctgtggcataaaaatgaggtcattttcttgataggaaaatgatatcttgcatggtctaagtattgtttcttcccctgatataaataaaatcaggattgccatattaaaagtcytaaaggcctttaccttggacattagccctctggctcagatgctctaagaaaacactgctatcaaaggtcacttccacattcacaaaattgcaattcttaaaaacagagaaaaaataatttccttttcatatgatatcaaagttaagatttctgttgccatggtgatgagattttttttttccttgcagtgccagccttttcctggcagatgaagtcagtactacaatcaataagaaagcaatacttcattttctacatccctcttggggtacgggcttccaaccaaaagcaaagagagccatatttgatggtccca

SEQ ID NO: 750530 - DNA, 518 bp, Homo sapiens
taacttcatttataaatatttagtttaggaatatttccagtataaagcaaagtacagaaaaaataatatatttgacactgggaaccattcccccttccccatgctaatatttataaccaccttgatgttttagaagatgaactcgagagagtggtgcagaatgaaatgtagaatcccagaacagggagggcagytggggtattttaatcctagaattactgggaggtaatgtggctgtgatttaaagatgggtgggagactggctgcgaaggtgtaggtgtgacagaccccttaaaggaaaacttgacaggctttgatattccgagagatcttgggtcaaattccctttcccagccctcaacttcatatcattaatcatttctccttttgcttgggaaaaaaataaaattgacaaagtgtgactactaagcaagttacactaagatgtgtgagcaattttgtcagaaatataaattctgcatattgcagtaaaggaaacatggaatgtttgccaagtt

SEQ ID NO: 750531 - DNA, 597 bp, Homo sapiens
ctcatctgtaatttgaaagcttgaatactagtttcaggcacacattgatggggtgtgtgtatgtatgtgtgtgtgtgtgtatatatatatatatatatagctacacgatcaatatgtatatatgtgtgtatatatgtacatatatataatgggtatatatacatgtaatcaatatatagtcaaatatatatatttaaataaatatattcctttgggggttgttttgagtattagagaaaattttatataaattacttaacccattatagacacattgcattttctttaatagacgtaataaatattaaggacaaaaatatgtcatttccatcaccaatagtatcaaattcacgttttaaaatgagaaacttcgatgggctggcaagatggccgaataggaacaastccggtctgcagctcccagcaagatcaacagagaaggcaggtgatttctgcattttcatctgaggtacacaggtcatctcactgggactggttagacaatgggtgcggcccatggagggcaagcagaagcagggtggagtgtcacctcaccagggaagtggaagggatccaggaactccctcccctagccaa

SEQ ID NO: 750532 - DNA, 624 bp, Homo sapiens
aaatgccactaatttttgtatgttaattttatatcccacaacttatttaagtttgttctaacagttttttgtttagtctttaatgttttctacatatatgatactgtcatctacaaacagtgataatttttcttctgcctttcctgtttggatgtattttctttttctttcttcctttctttctttcttttttttttttttttttgtctaattgctctggctatgactagtgtatgttgactagaattagtaagaatargcattctttccttgtactggatcttagagggaaagcttccagtttttccccattgattatgatgttttctgtgggcttttcatatatgtctttattgtgttgagataagtaccttctatacctattttattgagagtttattttttattacgaatggatgttgaaatttgtcacatgctttttctatatttattgagatgatcatgtggtttttatgtttccttctgctaatgtggtataccataccaattgttatttgcaaaccaaacatctgaaccatccttgcatctcagggagaaatcccacttgatcatggtgtataatcctttcaattgctgtggaatttggtttgctagattttattg

SEQ ID NO: 750533 - DNA, 624 bp, Homo sapiens
aaatgccactaatttttgtatgttaattttatatcccacaacttatttaagtttgttctaacagttttttgtttagtctttaatgttttctacatatatgatactgtcatctacaaacagtgataatttttcttctgcctttcctgtttggatgtattttctttttctttcttcctttctttctttcttttttttttttttttttgtctaattgctctggctatgactagtgtatgttgactagaattagtaagaataggcattctttccttgtactggatcttagagggaaagcttccagtttttycccattgattatgatgttttctgtgggcttttcatatatgtctttattgtgttgagataagtaccttctatacctattttattgagagtttattttttattacgaatggatgttgaaatttgtcacatgctttttctatatttattgagatgatcatgtggtttttatgtttccttctgctaatgtggtataccataccaattgttatttgcaaaccaaacatctgaaccatccttgcatctcagggagaaatcccacttgatcatggtgtataatcctttcaattgctgtggaatttggtttgctagattttattg

SEQ ID NO: 750534 - DNA, 624 bp, Homo sapiens
aaatgccactaatttttgtatgttaattttatatcccacaacttatttaagtttgttctaacagttttttgtttagtctttaatgttttctacatatatgatactgtcatctacaaacagtgataatttttcttctgcctttcctgtttggatgtattttctttttctttcttcctttctttctttcttttttttttttttttttgtctaattgctctggctatgactagtgtatgttgactagaattagtaagaataggcattctttccttgtactggatcttagagggaaagcttccagtttttccccattgattatgatgtttkctgtgggcttttcatatatgtctttattgtgttgagataagtaccttctatacctattttattgagagtttattttttattacgaatggatgttgaaatttgtcacatgctttttctatatttattgagatgatcatgtggtttttatgtttccttctgctaatgtggtataccataccaattgttatttgcaaaccaaacatctgaaccatccttgcatctcagggagaaatcccacttgatcatggtgtataatcctttcaattgctgtggaatttggtttgctagattttattg

SEQ ID NO: 750535 - DNA, 620 bp, Homo sapiens
aatctgaccattctgattagccactcctgatggtgtaggaaaggaaagaatttgagcttcagaaggaaagctacagtttttttttggttttcttccacatactcactcaccctcacgcccaactaaactatgaaagttcctggggaaaagtgatagagaacataaaatgagagctctggttaccattctatttctaaacattcattgcactctttattattttaatacaaatcctgttttctctttgctttactyacgaacctgtgttttactccacttgaatattgtgatttaatacctattaaaagagaattactgtggtcacccctgaacttttttgcacttatctcttttataatttcttactttgttgcagagacaagaaagatttgctgatagatcactgttggaaatggaaaaaagggtaagtgtcccacttattaaataattatttttttctttcttgttttaggtaaacaatggtaggttttttgtttttattttgttattatggatgacagttttaattagtttaaatatttattgagttaatgtattttgcagcaacttctttatagaattctatggggtttctctaggtatgaaatgaccttgttaaa

SEQ ID NO: 750536 - DNA, 649 bp, Homo sapiens
ccatgccaggataatttttgtgtttttattacagatggggttttaccatgtttgccaggctggtctcaaactcctgacctcaggtgatccacctgccttggcctcccaaagtactgggattacaggcatgagccactatgccaggtcctgagttaatttttatataaggggtgaggtttaggctgacattcgtacttttcactcttgatgtctcattgcccatttggtgaaaagactatcttttctatattgagttcttttgtaccttgatcaaaattcwtttgggtatacttatgtggttctgtttctgggttctcttctgtttcattgacctatgtgtctgtgcttccactaatatcatactgtcttgattatcatggtcatataataatctcaaaaccagcaagtgtgactcctcctaccttcttccttttaaatattgtttcagctattctagttcctttgcctttctatatacattttaagataagcttgtctatacagaccaaaaaaaacttggaatttttatgggaactgcattgaattatagattactttgaagagaattgacatctttactatgttgagcattccaatccatgaacatggtatatctgtcccttaatttagataggttttgatgtctttc

SEQ ID NO: 750537 - DNA, 581 bp, Homo sapiens
cgcaagagacaggatcttgctgttgctcaggctggtcgtgaactcctgacctcaagcagtcctcccatctcagcttccgccagtagctgggattatgggcttgtgccaccacacccagccaattctctaattttttatagagacaggatcttgctatgttgcccaggctagtctgggctcaagtgatcctcccaactcagccacccaaagtgctgtgattacaggcttgagcaatcacatccaggctctaaattaattttaaagatgcttcatttcacccaatacatccaaagtgctatcatttcaacatctaatgaatatgtaaattataatcgagctgttttacattatttttttcccacagtaaatcttcaaattctgggrtatgttttacactcactgaaaaaatgaggttgcaccacctatattccaggtgctcgatagtgacatgtggcccgcggactccagtggatagcacagccctcaatgaacctgctgttctagatgtctcaccatggatgctgatgaaagttcttattaccaaggcatttctagcttctgttactttacttatagcacaa

SEQ ID NO: 750538 - DNA, 561 bp, Homo sapiens
agatgatgtctcaggccatgattaggtaggtggtcctgctgtccaccttggcctgctccttgctgcctcttgtcctcacacttcattgctactccttttcccccaaccaggggcatgatggatgaggaagggaaccagtttgtggcctatttcctgcctgtagaagagacgttgaagaaacgaaagcgggaccaggaggaggagatggactatgcaccagatgatgtgtgcgtgggttgcggttaagttttggggattgggaagttttggggattgggatagrgaagaaatggggctgaacctgtgccctcatcttcaggtatgactacaaaattgctcgggagtacaactggaacgtgaagaacaaagctagcaagggctatgaggaaaactaatacttcatcttccgagagggtgacggggtttactacaatgagttggaaaccaggtactcagcacactcctatctgattagcctggatctgtgcttcttaagaccctggggcatgcaagagccaccttggaggtcatttgtacctaagaatttgtcatatgcattgg

SEQ ID NO: 750539 - DNA, 622 bp, Homo sapiens
actcatttttaattaaaaaaaaaatttcgccattccttacttctgttttagaacatcaactgtcagctggcctgtctcaaggctgctggagcagcccgtaattgcaacatgcaattcgcaattattctttcagaaataactctatagagtaagttcagcaccgggagaaatgttttcccaatttttatttgaacatgttgcctacttttgccaattaatttagtagtctcatgtggwaactgaattaactagcactgtatcagttcgttctcacactgctatgaagaatactggagactgggtaatttatgaaggaaagatgtttaattgactcacagttctgcatggctggggagtcctcagaaaacttacattcatggcggaaggcgtctattcacagggtggcacaagaaacgagtgtcagcagggaaaatgccaaacgcttataaaaccatcagatctcgtgagaacccgctcacgatcatagaacagcatggggaaaccgcgcctatgattcaattacctcccaccaggtccctcccacgacatgtggggattatgggattataatttaagataagatttgggtggggacacagccaaaccatatcaagcaccatat

SEQ ID NO: 750540 - DNA, 622 bp, Homo sapiens
actcatttttaattaaaaaaaaaatttcgccattccttacttctgttttagaacatcaactgtcagctggcctgtctcaaggctgctggagcagcccgtaattgcaacatgcaattcgcaattattctttcagaaataactctatagagtaagttcagcaccgggagaaatgttttcccaatttttatttgaacatgttgcctacttttgccaattaatttagtagtctcatgtggaaactgaattaactagcactgtatcagttcgttctcacactgctatgaagaatactggaractgggtaatttatgaaggaaagatgtttaattgactcacagttctgcatggctggggagtcctcagaaaacttacattcatggcggaaggcgtctattcacagggtggcacaagaaacgagtgtcagcagggaaaatgccaaacgcttataaaaccatcagatctcgtgagaacccgctcacgatcatagaacagcatggggaaaccgcgcctatgattcaattacctcccaccaggtccctcccacgacatgtggggattatgggattataatttaagataagatttgggtggggacacagccaaaccatatcaagcaccatat

SEQ ID NO: 750541 - DNA, 599 bp, Homo sapiens
tgaaacatagtaattgatagccattatttaaagtcacagtgctttaggggagtttgttaggtagttatagctaactgatagatttcttgcctctgtaatatctcctatagggttgataatcaacaagtatatactaattctgatgtaccagtgactgtaaaattgaatcaattagtaaatagtctctttcctaaacaccctgagtgacccagaaccctggccccactcccagccccattgaatctccctatgatccaacaactgaaagagtaatgcctggaatgccaggggtcctccaacaccctaatgcagttctatagagaaatccattctgattggtcagtgcccatgccttacatttgttaaaaattytgaatataatttctggtcattcatggacctgactcgtcactccattaggttcttagcttcctgaggttagtctcaacatctggatcatcctgaacacttttgggccatgcaccatgaatatttgttgaatgaatcctggatagaaatatgtactgaaggaaataatatggtctagtgcggtcatcaaaaaagttgaagtcatttgcggcatgagtttaagtgtccag

SEQ ID NO: 750542 - DNA, 599 bp, Homo sapiens
tgaaacatagtaattgatagccattatttaaagtcacagtgctttaggggagtttgttaggtagttatagctaactgatagatttcttgcctctgtaatatctcctatagggttgataatcaacaagtatatactaattctgatgtaccagtgactgtaaaattgaatcaattagtaaatagtctctttcctaaacaccctgagtgacccagaaccctggccccactcccagccccattgaatctccctatgatccaacaactgaaagagtaatgcctggaatgccaggggtcctccaacaccctaatgcagttctatagagaaatccattctgattggtcagtgcccatgccttacatttgttaaaaattctgaatataatttctggtcattcatggacctgactcgtcactccattaggttyttagcttcctgaggttagtctcaacatctggatcatcctgaacacttttgggccatgcaccatgaatatttgttgaatgaatcctggatagaaatatgtactgaaggaaataatatggtctagtgcggtcatcaaaaaagttgaagtcatttgcggcatgagtttaagtgtccag

SEQ ID NO: 750543 - DNA, 659 bp, Homo sapiens
gaaagcaaggtcagtaaagaatggtagcaaatgaggcaaaagggagagaatacaagaagagcatgagagcacaggtcacatagggccttgatgttatgtaccttgtcacttactttggctttattctaagtatgatggggaaatttggagagttttgaattggagaatgttgtgatctgacatacattctggatgctgtgtggagaataggtggtaggcggcaatattaagaagagatgcagtacactagttagaaggcacttgctttagtgcaggaaaaagatggtggctcctcgggcgaggatggtagtggtgagattgtgactagtgggtatccattaaggtggacccagttgggcttactaataaatctgatgtaagctgtaagagaaagagaggaccarggatgagtcctaggtttttacacagaacaactgataatgttggaacatttaatagaacagaaaatccttaaaaacatgcatatttgggggtggcatggtaatcaaaggatcaatatgaggcatattaactttgaagtggttaatagcaggtgagcaaagatgctgagtaggaactgagtatgagtataaagtttaggagaaagacagagactagaggtcaaatttgggatccatcagcatatggataacgtctaa

SEQ ID NO: 750544 - DNA, 558 bp, Homo sapiens
gactgtggacagtctggctattttcttcccagaaaggaataattaatttgcattcccaagagtaaaatataggaaggcccatttcactctattctcagctaaatgtggaattatcttttcaaagtctttgcctattgtgattggttaaaaaaaaaagttacttcattataattttgatttataattttgaacgctagtgaggttgcaccctttttcttttgcttgttaactgtctattttgaaatacttttctaataattactatctaaatcaaatttattcgtggaaggttagttgtaggttgcagtgacaacaacaaccccaatattttcaggaagtaaattmtggaagaaactttaaggaactaacctaaatatggagctgagaacagcttattcctagatcaagtctggtacactgcaatgtgcctttattaatggtaaagttgggagctagagcccttggttcctgatgggttttttttctcatatttatctgttacatagttttgatttatttttgatatttgtctaggcggtgatgatgtaactggggagg

SEQ ID NO: 750545 - DNA, 620 bp, Homo sapiens
acacacataaaaatactttaggagatgtgttcagaattcctttgagagagtgaccaaaactttttttctcttttgttgaattatttgaagtttttgcaacaaatgtactttacttttgtaacttaaaactttgaatcaaaaatttagtgggggaagtggatgcttattaatggatgttggaataaattggcttgcatttagaaaagcagatttgattaatacttcataccacatagaaaaataaattcctctggaataatatttactgagtatttaattctgtgacagggactatgctaggatttttcttcgtactcatttaaacaactaagagaatgtgcagtacggtgcattccatttataagaagagctgggattttacatatggaagagctggcattttaatgcacatggtcctttctgttcctcyctttctacttcagtgttggctgaaatttctacgcatgtcagaaaaggataaagtagttttagataaaatatgatgcatcctgttggttttttttttaattggcccaggaaaaattcttaaacttccttagaaaagataagaaagagaaaaatcaaacttatactctatatcctcatattgtcatttcact

SEQ ID NO: 750546 - DNA, 584 bp, Homo sapiens
tttgccgcaactctattcacaaaacggaaaatatggaaccaacattaaggcctatcaaaaggagatttatgaaatcaatcctggtttatcccttgcatatagttctacagttattaaaatggtgatgttcaggggacactaactcaacccgaggggtggttgcatcggctttttgcaagaaacaggccaagctaatggctaagctgtttggggagcacctgctcattgtagaggagacacctgcctttcagtttccatcacatccttgtaagactacagactcaatatcaccagattatcctcttcgcaggagaagctgcaaaatgtcctggcttttaaaaygttgtgcaggtcttggagggtagaaagaaagtatctgtgggctgcattttagctaacattcaggagttttgcaaactttaatgtggaactaaaattattgtcaggtaataatgctcagtacttataatcagtcttaaaacataagattaaaacactatatttctatttaggtaaaattatgtacatatgtttgcatgtgtgtttatgtgatgttgacacaaatgaatgcacaaatgatatat

SEQ ID NO: 750547 - DNA, 638 bp, Homo sapiens
ctgtagagagtgtgagaatctacacacgatgttaaattgctgatagaaaggtaaggtagtgcaactcttccataggctcatacgtcaatatgtactcaaattgaaaagtggcccttcaatttctaaaaagtcattctaaggaaatgaataaatgcaggaagacatatgcacaaagatgtttttctcatttttctgtagtaccaaagaaaagagagaggtaaacctaaattttgagtggcaggaaactggctacgtaaataatgaaatgctgctgagctatttaagtttgtgatatagccttattaaatgacatggaatcatgctcattatatactaataagcaaaaaagatacaaaacatttttatagtttggtctaataattaaaagtattatatatttgcttgcattgtgcctgtgtgtacmcccacaaacaaaaaaatctcaagaatgttatgaagatcatttattggaaatgggataatgggattttaagttatttatactttttatttttttttggggaaacaaggtcttgctgtgttgtccaggccggggggcagtggtgcaactatagcccatggcagcctggaactcctgggctcaagcaaacatgcagccttaggctctggagtagctg

SEQ ID NO: 750548 - DNA, 638 bp, Homo sapiens
ctgtagagagtgtgagaatctacacacgatgttaaattgctgatagaaaggtaaggtagtgcaactcttccataggctcatacgtcaatatgtactcaaattgaaaagtggcccttcaatttctaaaaagtcattctaaggaaatgaataaatgcaggaagacatatgcacaaagatgtttttctcatttttctgtagtaccaaagaaaagagagaggtaaacctaaattttgagtggcaggaaactggctacgtaaataatgaaatgctgctgagctatttaagtttgtgatatagccttattaaatgacatggaatcatgctcattatatactaataagcaaaaaagatacaaaacatttttatagtttggtctaataattaaaagtattatatatttgcttgcattgtgcctgtgtgtacacccacaaacaaaaawatctcaagaatgttatgaagatcatttattggaaatgggataatgggattttaagttatttatactttttatttttttttggggaaacaaggtcttgctgtgttgtccaggccggggggcagtggtgcaactatagcccatggcagcctggaactcctgggctcaagcaaacatgcagccttaggctctggagtagctg

SEQ ID NO: 750549 - DNA, 595 bp, Homo sapiens
agagatcattttccctaccagtagccttgatatatatgattgagaagtaaattgtaagataatacaaaagcagtctgaatacaggaaattaacttgactagtaatgaccaagagagctgtgtgaaaatatattttaaaagttcccacaaactcaccaaaagtgggagctggaaatgcaaagacagttttgacaagacaaagttttttccaagctaaacaaaaaagattacagacttttagaaactacayttttaaagaaaaaaaaaaaagcagataaggcaaatgaagcctagaaaaattaagagatttatttagggtaacttagccagttaatggcaggattgagactaaaacacactgtaaaatccaagtatggtcttttatatctatgatataacctgtatatatgtaagaaatatagcacttgtaatttgttaatctccaaatgttcatgaagttgaagtaaatgcattcattgtttcaattattcttaaagagaaaaatgcccaaagacatcttaattgcatgggtatgtatacacgaaatacacatggagatgtcttcaaatataatatgtgcatgtcttcattccttc

SEQ ID NO: 750550 - DNA, 605 bp, Homo sapiens
agcagatggtaattaaacatatgggagtagataatattacttggggatgatttataaagaaatgattctcaaactttggggtcagattaattacccaggaaacctaataaaattcaaaatcctgggtaccaactccagagtgtctcattgagtatgtgtagaatgtagttcccaaacctgtcttgttgaaaagtagggccccacccaatggttctgatggagatgatattctgaccccactctkaagtataatgagaagaggatcttgcttagtgtcctgagtagtatcagaacataagcgatggacaaagaaagaggaacccagaaagaagactataaataagcaactggaggtactgaaggaaaaccgggagaaaaaaacattacaaattctataagaaaatagcgggtacaagagtggtgaacagggtcaaagtgttgagagataaagtaaagataaaggctaaaaacacccactggatgtaacaaaaaggaggtcatcacaaagttggcaggaacaattttggtagaattatgtgggctgcagccagattgcagtgggctgagggttgaatatgagatgaggataaagagacaagaagcag

SEQ ID NO: 750551 - DNA, 642 bp, Homo sapiens
tgaagaaaagaacagtttaggcagttatactaataccttagggaataacgatttatttcaatcatgtgtctaaaacaaaacaacacaccaacacacacgcacacagacacacacacacacagacaaacacacacacgccagcttaacatctgccattatagataagggaatagtaagtgtctcaatacaggatatcaaaaataaggataaattgtacactgaaagcactctcgtttttggtraagataacatctaatctgccatgcttgcttgtgatgccaactaaagtggcaaatggcatcaactaacccccagtcctcctggtagcttcatatttggccaacacttggtttcgccacaacttcctggcttgccagcaattagaggaggaaatatgccatggtgcttggacagattaatcaataaatggccagcagtcattctgagtagtagctgtccagtcagtaaccatcaattctgatcacttcatatcataacccaagcctctgcactgattctcttcactgcattctagggaccagattatttacctttgaaagcaacaatggggtagaactatgagttaaaaggagaagaccctgagagcctgagtctgtcacaggctggatatttttcctgctg

SEQ ID NO: 750552 - DNA, 642 bp, Homo sapiens
tgaagaaaagaacagtttaggcagttatactaataccttagggaataacgatttatttcaatcatgtgtctaaaacaaaacaacacaccaacacacacgcacacagacacacacacacacagacaaacacacacacgccagcttaacatctgccattatagataagggaatagtaagtgtctcaatacaggatatcaaaaataaggataaattgtacactgaaagcactctcgtttttggtgaagataacatctaatctgccatgcttgcttgtgatgccaactaaagtggyaaatggcatcaactaacccccagtcctcctggtagcttcatatttggccaacacttggtttcgccacaacttcctggcttgccagcaattagaggaggaaatatgccatggtgcttggacagattaatcaataaatggccagcagtcattctgagtagtagctgtccagtcagtaaccatcaattctgatcacttcatatcataacccaagcctctgcactgattctcttcactgcattctagggaccagattatttacctttgaaagcaacaatggggtagaactatgagttaaaaggagaagaccctgagagcctgagtctgtcacaggctggatatttttcctgctg

SEQ ID NO: 750553 - DNA, 637 bp, Homo sapiens
gttttaaaatatgcattctgattagaatcaattagcaaagtgctttgttgttatttttaatttttttttttttgtggaatcatctttgctgcagttttactttcatgttttgcatcctctccctcggtaaatactgtaaaccttaccttaaacatgtgtctagagtccaatcacttcatttcaaatttaaagtttgcactgtggtctgagctgccatcatctctctctcggttttgtttgtttgtttgtttgtttgtttgtttttgagacagagtctcrctctgtggcccaggctggagtgtagtcgtacgatcttggctcactgcaacctcagcctcccgggttcacgccattctcctgcctcagcctcccgagtagctgggactacaggcgcccgccaccacgcccggctaattttttgtattttgtttagtagaaacggggtttcaccgtgttagccaggatggtctcgatctcctgacctcgtgatccgcccgcctcggcctcccaaagtgctgggattacaggcgtgagccactgcgcctggcctctctcttggtttttttgtaggaactgcctaactggtctctctgttcggttttccctctcatacagtcaagtcttaacacaccagcct

SEQ ID NO: 750554 - DNA, 582 bp, Homo sapiens
attctgatgggcagccaggtttgagaaccactgtatgaaatggcagaatgaggattccagctcatgtctgcctagtccccagtcctgtattgaaataaagcactgaggttcagcatttcacatgggacataatagtttttgttttatatttgttctgtatcaatatataacgttgttcatccttattgactacataggaaaaataccctccaaaagctgtattcttcttcataaagactgaaaatatatgataatttatgatgtatattacataaactcatcccaactttaatgataaagtaagaagatattgtgtgaaacaacagagccrattagggtaaatcagtaagtccgagccaggcgtggtggctcacgcctgtaatcccaacactttgggagaccaaagtgagccgatcatttgagcccaggagttggagatcagcctggcaacatggcaaaaccctgtctctacaaaacgcacaaaaaggagtagctaggcttggtggggcatgcctatagtcccagctgctctggaggctgagctgggaagatcacctgtgcccaggagtttgtggctgcagt

SEQ ID NO: 750555 - DNA, 611 bp, Homo sapiens
taaagtcagtgatttgcccacacatagctccttgttggaaaagcagccatttgattgatgttatgtatgaattataatttacaaataaattattgaaagcatatgaggtccagtcagatgagatccacagggggaaaaatacacatatgagggaatccagggtttgacttttccatttaaccagtttttcattttaatattttaaacagttgcagagtttagctactaatggtccagatttttgagmtaggcataaacgagttagttgtccttggtcttactatttcagttcaacatacattatttaatgtagtataaataactacagcaatcataataaacatttattgagattgtaccatttatatttactatttcaatataccatgtatattcatgattttattttacagttgacccttgaacaacatgggtttgaactacgcgggtccacttataggtggattattttcaataatttgaaaaaaaaattcaaaaaattatttctaataattgaaataattttttcaatgtgttagaaaaatttttggacatctgtgacaatttgaaaaaacagatgacccaagtagcctagaaatactgaaaaattt

SEQ ID NO: 750556 - DNA, 620 bp, Homo sapiens
cttcaggatgagttctattcccctgccctctcttctgggaataacttctaattttcctttggggaccattcctctctgagtagcagtctttgaggtctgggtggggctccaacctggccatcacaatattgtattcccctgggtacaatgactggtttagagatagacacaggaccaaatggagccaatgatgtccactgagctctttcttgggattgcagccaaagataattttgttctttcccacygaccttgaacctgagcagctgtgaactctggagctgccacattaccaacactgaaggcaccaccagcactggggacacagagccaaaagatggcaaggaggaactgggccctgaggacactgtgtgagcccctgtatcagctgtgcctgaagcgaggctgttggtttcttggtcaaaatgaaccaatacatattctcctttgctgaggctagcatggattaggttttctgacatctgcaactgaaggagtcctaactgaactactgtgcaatatagtctcacctttgatagaaaccccaatgcctggaagtccatctctagcaatatgttgacagaaaaacttggctcaggaggaggccagagagggacctc

SEQ ID NO: 750557 - DNA, 543 bp, Homo sapiens
ttttgagacagcttgctctgtcgccctggctgaagtgcagtggtgcgatcttggcccactgcaatccccgcctcctaggctcaagccattcttgtgcctcagcctcccaagtagctggaattacaggcgtgtgccaccacgcctggctaatttttttttttttttttttttgtatttttagtggagaaggggtttcaccatgttggccaggctggtcttgaactcctgacctcaagtgatctacctgcctcggcctcccaaagtgttgggattacaggcatgagccactgtgcccagccacatgacaccttttttwaaaaaaaaaaaaaaacaaaaaacacagatctgattgtaatgccctcttggggaaaactctccagtggttccccattgctctggggatgcagcccagacttctcataaggatggttgataggaccctgtgagatcagggctgcctgcctttcccttcggatctccctctgcactgaactctatgccctgagccttgaagccttgcttagcccctccggatcacctaga

SEQ ID NO: 750558 - DNA, 611 bp, Homo sapiens
aaagatacatgcagtgaataaatgtgtgttgggagcagggggtggatggtggggatatgtttaggtacaatgcacacagggactgaggttgaaaggaggaatgtttcagtctcaatgtttacacactccaaacatgtgaaaggtgtcctgagagactccaccaaggactttatggccaagagcaatttgttgtgggtaatgccaatctgttcagtaaaggtaaaaacaccgtttgtcactaaaactgacataagaaaacttaatataccttgttaccagacaaacaaacaaaaagatatggtttcctaaagaagcacagagattcagtttcaatgtcttacatagatttccttctcctaagctttcttaagccaaatttctacttcaacaattttgattgctcctcttctayaagccatagaatcattgaaaaagtattctttctagaacagacttaaagaaatgtctctatagatgcctgtcctcttagctcattcctcaaccaaacctccttcaataaggaggttgtaccactctgaaactctgtttatgccatcccaggagttgtattcaggttgaactttcaggacattcatgaatctgtttattca

SEQ ID NO: 750559 - DNA, 636 bp, Homo sapiens
gcacacagatcaggaaatagaacctttccagaccctcaaaattgccttcttctttctctcaatcactaccctccttgccccaagtcatctccttggctgaattctacctccatatattcaatttgctagacctcattcttctcgtgttcacattcctgaggcaaagctctctttttgcaaagtaataggattcttatcacaaagacttyctggttaaaaaacaagctgaataagccactactgcattgtgcaaggttgctttctcttttgcctacagagggctttcaggtagcagaacaaaatcactgtaatgagacagaaatggtgcctgtgagcaaaggtatcatgtctccttcgctagtggggcaagcactagactcttggaattgttccgatcaaggatgagttaaaccctacattttaattcttcctttcatttattcattcattaaatacttaacgtagtacagagtacacagagtatcaggcattggcctgtgcactcagtgtgtcgacagttaggttagagataaaaagaggaaaataaatctctgaaataattttgatcaatgctactgaaaggttttgacaagtttcagaagtggaagcaaatatatattttctacttgctctgta

SEQ ID NO: 750560 - DNA, 616 bp, Homo sapiens
agtggtttcatggaccagggacaggatccctgtgctgtgtgaagcataggaaattggtgcactgcggtcccagcttttccagccatgactaaaaaggaccaaggtacagttcaggccatggcttcagagggtacaagccccaagccttgggagcttccatggagtattgagcctgtgcatgcacagaagtcaataactgaggtttgggaacctctgcctggatttcagaggatgtatggaaactcctggatgtccagacagaagtttgctgcagggcagggctctcatggagaacatctgctagagcagtgcggaagggaaatgtggggtgagagcccccaaacagagtccctackgaggcaccacctagtggggctgtgagaaaagggccaccatccttcagaccccagaatggtagatccactgacaacttgtatcgtgtgtgtggaaaagccacagaccctcaatgccagcccatgaaagcagccagaaggaaggctgtaccctgcaaagccacaggggtggagctgcctaaggccatgggaacccaccttttgcatcagcatgacctggatgtgagacatggagtaaaaggagctcattttggagcttaaga

SEQ ID NO: 750561 - DNA, 572 bp, Homo sapiens
tttctgctctcagaagccacatatttattcttggagtaagcatagaggaagaggagtgattgcccaaagaaaaaactcaaggtgcagttatcggaagaatggaaataagtgttgaacaagcaaaagctaaccagaacttgtatatattttcagaccacattaaggcataaaaatatgtaagcattctrtcttgtttgaaataaaactgagccccaaattttacagtgcaaattatttaaaagagaaataaaatacactgaattataaaaataagcagtattttataaaagcacaacagctagaataatctagttcttcctcaatcataactaccagttaataatcaactcaggtctattcactgtgtcttgaatatcaaaagttagtagaactatacctgttctaaaattggactatgcattaagagaggacttggcctcggcttttatctgctgataggttaattggttttaattagcttgcataccttatcagaaccaaaatagtttctttagtctgacaaatctttggagcatagagaatacttttttagaagaaacgttttccattag

SEQ ID NO: 750562 - DNA, 535 bp, Homo sapiens
ctgcaatagtaatactcaacaatttaactctgcaatacttacaatgaatcactactcacaagtgcatgcaaagaaagagatataatatgtataaatattgtataccattttgctcatttactttttatttaatgtttaaacacactggtggggtggatattatggggccgatgccagactttgatggtaaatctcagagtgcttcagtcaactttaacacagttctaaacccaaagtctcaattttattccaattgctttgaggctagtttacatrtaactaactttcccttctgcaagtggggagcttggtcccttcctttttctatatatcactccccttaagacttctttttcctaagacattgctctaaatctgcatttctaccagctagaacctggaaaatacattgcaggagagaaggaagtccccaactcttctatcttgaggggcctagcggagttgtgcatgcttagttcttatctttgccacctaggtagataattgtgagcatctttcttgtctggttagactc

SEQ ID NO: 750563 - DNA, 539 bp, Homo sapiens
cttggtcccttcctttttctatatatcactccccttaagacttctttttcctaagacattgctctaaatctgcatttctaccagctagaacctggaaaatacattgcaggagagaaggaagtccccaactcttctatcttgaggggcctagcggagttgtgcatgcttagttcttatctttgccacctaggtagataattgtgagcatctttcttgtctggttagactctgtgatggataggactgtctcccccacttcttctgtgtctctcaacagctctgagaacaaagcagtgcacacaggagaccttcactaactsttcttgactaatgactgcatctttgtctgacaagtgcggtatccattgtgcactaaaaatgaatgagttgatttaaattaagaaaatgtcaggttgttcctggggtcatataagttgccacagtagcaaggtaaaaacaagagttagagttagttaacttttatgtgaatttaaaaatctttccagccttttttttctgttacagatggagagtcagca

SEQ ID NO: 750564 - DNA, 632 bp, Homo sapiens
acgcaggcaacatccgaggcagcaaatccatcagcagggccaggacagccaaccagtcctccctggaaggcactgaaaaggagggggactgctgtgctcctctcttttgccctgagaatggtggggktaggtaacgaagtcagacagaaggtcacctgtagcaacatgtctcaggaccagtcctgtgtcctctattcttcagagagcagttacagacattgctgccaaaagaaacagctcagcaagggccaaaggaaaggctattgtcaagcataaggtggagatatgggaagggaggcaaagtaagagactatgaagaaaaatgaagctaattccaggcacagaaccaaatcaggtcctgcttccttcttttcagctaaagaaatcctcatggttagaccgtcagctccaatttagccattgctcattacctcatcacccatttcctataattatgtgttggtagcctctttttcctctaattgtaattagttgtcagatatgaaatgagtattgatggtattttctgcttctctctcatggaggtccttctttgcatattttcatcatccaggtgttaggatgaagcttttatttgtaaatgagccttaggtctcactaatcctttgaga

SEQ ID NO: 750565 - DNA, 666 bp, Homo sapiens
ggctggaggtgtctgcctttttttctgggtggactgtaagggtcagagaagctccaccaaatagtggctttcaatcctacctcctccaccctttgttctgggactaggtataaactaggtgtcctagtttgcagacccaaacacttaggagtgatctccgctcctaagctctggactctggagcattctaatgatgaagagctgagtttctcgtctttacttctctacccaggtctgttccttagttacagcaaatccattttcctcatcacccgctttgtttgctttttcatttctgaaatgtgttctgaagataaaggctccctgcatgtccatatacacattaattatccttcttcagaaagtcaggcgggctcctccccaygcataccacaccttccatagcacctccccggagacttacactgacagtgtctctctgcatgtgacactattggaaccaatcgttcctgtctgaagaaaagttgaggcaacccataaaaatagggaagcacaccgagaataaatcagcttttctcagcactttccacaagctaagcttgttcttatggaagctttactgggcctttcttttcgtaatgaacttgaaaagctattttcccagatgggcttggataaagttttcttagcaatcgctctcatatc

SEQ ID NO: 750566 - DNA, 623 bp, Homo sapiens
ttactggtatcgctttttcttggaaaacttagaaggtaatctgatgggcttatgtgcctcagaagaacttaactcgtcgtctagatttgggttttattttgtatgttgctctcatttgagggtcaatgacttactaccagcatttgatgctacgaattatccatgaatgtaggtatggtactctaagagaatctaatatctatatctatacatctatatcaataaatgtgactttacatcataaaagaagttctgtattttttgctgtcattgagatttcaaagtgtatttcaaataattaaatttgccataaaaatacttaaatgtaaaaatatgctccattttctagaccaacgtattgcataacaggaggagtgtctcttttctttgatagtcattcgataaaaccaatatttctctaattactcaccttaattttggaagtgatagaggtgggaggtcttgagggagtctaatactttsaggaagaaacaacaacaaagtggaatagcctgccattatattttgggaggatataactctaccttggcaacaaagatagccaataaagacatagcaataaaagtctgcgcaggcacccaaattataaagcccatttcctc

SEQ ID NO: 750567 - DNA, 503 bp, Homo sapiens
tggagtgaaatctacaggttttatttttagaaatcttcctttgagaaatacaattgaccctttaacagtgaggaggttgttttggcttccacattgcagtgaaaaatccatatataacttcttacttcccaaaaacttatctactgataccttactgttaaccagargcctcatgggtaacacaaacagttgattaacctataaatagtatagtatctatttatatatttttgtattcctgacatatctagcatttccttatttttttttgatatttctaggctaagtggtttgtctgcaagatttttcaaattgttgcaaatgccaaaaaaaattttcagcatattactgagaaaacatttgtgtagaagtggacctgtgcagctcaaacctgtgtcattcagggtgagctgtactttagtctagaggatggatcaacatatacccaatgacctacaagaatgttttggatcaagtggagatacaaaggagaaggcagccat

SEQ ID NO: 750568 - DNA, 370 bp, Homo sapiens
tggattaactgaaatggaaagtttttggtgggtgataatttttttctgtaaattcaaccggcccacactggctcacagctgtggctgtcttgtcccttcactcacaggagacacggatgtgtttggtgctgcctccgttccatcamtgaaggagccacagaagcctgagcagcccactccaaggaaaagcccctatggtccccctcccactggcctctttgatgatgatgatggtgatgatgatgacgactttttctcggcaccccacagcaaaccttctaaaacacgtatgtgttcctgcctccgtttctaggacttcagccagaaaaagaatgttgcctaaaaagaacataagctcacctagttctgt

SEQ ID NO: 750569 - DNA, 610 bp, Homo sapiens
gaatgtctttgcaaaatcaccccaacaaatagaatacagatttaaaattatctcgcatatagttcatactgcaatttcctctcttgtccccaaaatgccatttacggcagtgatccccaacctttttggcattagggatataaggagagtgcaacctgcaatctagatccctcgcatgcacagttcacaatagcgtttgccttcctatgagaatctgatgctgccactgatctgacaggaggaggagcttaggcagtaatgcttgctgctcacctcacctcctgctgtgcggcccggcttctaacaggccatggactggtctgcagcccagggttggggacccctgctttatagtatttttttatgttttgattttttttttgttctaagaaactcaggattyggacagtgtgtctgcattgcatttggttgtcatgtctctttggtctccttaatctagagcaacacctcccacatctttttttttttaatatccagccacttgtcttgtagaatgtgtctcgtgaatttgcttgattattttcctatgaatagattcagggtgagaagttttggcaagaatacaagcaggcagggttgtgcacttcca

SEQ ID NO: 750570 - DNA, 533 bp, Homo sapiens
agtttatatctaatttacctccacaatgtttcacaatttttagagtacaagttttgttctcttttgttaaatttattcctaagtattttattcctttaaatgctattataaatggaatcactgtcttaatttcagattgctcattgctagcgtatagaaacacaactgattttaatatattgatcttgtacactgcaactgtgctgaactgtttatttasttcatttagttatttagttcttcccaaagatcttctatataaaagctttatatacaagatcatgtcatttacaaatagagttttacttctccctttctaatctatatgcccttttattccctcccccactttttttttgagagagtctcgcgccattgtccaggctggagtgcaatggtgcaatcttggctcactgtaacctccacctgctgggtttaagcgattctcctgcctcagcctcccaagtggctgggattacaggcatccgccaccacgccaggcaaatttttgtatttttagtagagacggggtt

SEQ ID NO: 750571 - DNA, 632 bp, Homo sapiens
cgtgagctactgcgcctggccaaaaataatttttcaatgaatattgtatgcatgtagtcttgacatctatgaacttgaaaaattatttcttaatagcacattcctacaagtaagattattcagaaaaagctggcatgcttgcattattctttttgtgacactggtgaaaataatgtttataaaaacaatgaatgttaaaatcttagacttgaaagaataaatagcaaactgatctcagtttcttatcaaccaatcctcttagtgattgtgaaatacagtagaaacaccaagtattgrctatatttaatatatttttcataaattagtacatcttgacatcagaaatactgagagatgtgaccacttaagtatgctcacatttttatttaattttttttcattttaaagtctatatccacataccttttagatacagtttagcttgttttcccctttgacatcttagatgtagttttcgaaatgatttctgaaactgtttcctttggtgtgctgtgaaatccacatcaggagacagcagtaattctgataaaaggagaaagaaaatgccccaacttaccgtttctaatgcaattacacggtcctgcaaagaaagcataatatataattataaa

SEQ ID NO: 750572 - DNA, 632 bp, Homo sapiens
cgtgagctactgcgcctggccaaaaataatttttcaatgaatattgtatgcatgtagtcttgacatctatgaacttgaaaaattatttcttaatagcacattcctacaagtaagattattcagaaaaagctggcatgcttgcattattctttttgtgacactggtgaaaataatgtttataaaaacaatgaatgttaaaatcttagacttgaaagaataaatagcaaactgatctcagtttcttatcaaccaatcctcttagtgattgtgaaatacagtagaaacaccaagtattgactatatttaatatatttttcataaattagtacatcttgacatcagaaatactgagagatgtgaccacttaagtaygctcacatttttatttaattttttttcattttaaagtctatatccacataccttttagatacagtttagcttgttttcccctttgacatcttagatgtagttttcgaaatgatttctgaaactgtttcctttggtgtgctgtgaaatccacatcaggagacagcagtaattctgataaaaggagaaagaaaatgccccaacttaccgtttctaatgcaattacacggtcctgcaaagaaagcataatatataattataaa

SEQ ID NO: 750573 - DNA, 601 bp, Homo sapiens
caaactcatatgcaaataaaactctgatactgcactacacatttatagtcaaagacaatactttaagaggagtagcacacaatgcaactgcaaatgaatgtcacacacacacaaaaataaggcagacaatgttaagctccaatgaagaattttggtaattacaagctgtattgttaaaaatcactgtcaaatatgtttgtctccattgtttgtgattcctcttaagattgaaaacactctcctccctgaggctccaccccccctgccgttttatccttytccactgctactaccactcatgtgaaattactccggcgtgtgtgtgtgtgtgtgtgtgtgtgtgtgtctgtgtctgtgtctgtgtctatacaggaatggcagaatttggatgtctctccccaaaacatttaaacaaaaaatgaactctaggacaggacagggattggtgttgttttttaatgggtggatcttgaggagacccaggaataggggctatataaataagagaccagtagggtggcatttgtttgtttattcagtaaacaaaaaattattgagtacccactaagatgaggcactgtgctaagtagtggacatccgg

SEQ ID NO: 750574 - DNA, 574 bp, Homo sapiens
tgaaaagaagagagaacttctgtcagatgccaacttcacatccattgctcatatcacagaaatatcaactaaaattcgagtggaatctttctaacaccattttccagcccaacaaatgtgaataaacctgtactgaattgagaggctgtacaaggcaaycttaagctctatttatgtgttaattggttggtcattagtagatgacacccatggggtcagaatacttttgactttcacttgaaaatgtagattccatgaattcatcttcattcatcagtcctgttttgagggaaatgactatgaaaggatactgccttcatttcctaatgctgcagttcctattatgctataccaaggaataaaatttcctatcaaaagtagcatagaggctgatttggcttcctgctttagatcagtgctctcagagacttctaaaggaagcaaattccaactttatagttctgacattgtccttgtcaccctatttgctataccagtgtgaatgtgacaataataaaggataaaagagtaaaaaacaaatgttttcataccaagcatgcttgccctatttaag

SEQ ID NO: 750575 - DNA, 654 bp, Homo sapiens
cactccaagtcaacagaatgtacattcttcttagtaccacatcacactatttctaaaactgaccacataattggaagtaaaacactcatcagcaaatgcaaaataatggaaatcataacaaacagtgtctcaaaccacagtgcaatcaaattagaactcaggattaagaaactcactcaaaaccgtacaactacatggaaactaaacaacttgctcctgaatgactactgggtaaataatgaaattaaggctgaaataaaaaagttgtttgaaaccaatgagaacaaagacacaatataccagaatctctgggacacagataagcagtgtttagagggaaatttatagcactaaatgcccacaagagaaagctggaaagatctaaaattgacaccctaagatcacaattaaaagaactagagaagctggagcaaacaaattcaaaagctagcagaagacaagaaataactaagatcagagcagaactgaaggagayagagacatgaaaaacccttcaaaaaaatcaatgaatccaggagctggttttttgaaaatactaacaaaatagaccactatccagattaataaggtagaaaacaggggagaatcaaatagacacaataaaaaatggtgaaggggatatcaccactgatc

SEQ ID NO: 750576 - DNA, 613 bp, Homo sapiens
aggacaaagctgatgcagttctgagaggaaaatttatgaaactaaatgcatgcatttgaaaagaggaaaagtctcaaatgaataccctatgctcccacctcaagaaccttaaaaaaaaacaaaaaaccagcaagcagaagtaataaagataagaacaaaaatcaatgaaattgagaacaggagacaatagagaacaagagggaaaaaaaagtcaatgaaacaatgagctggttccttacaaagttcaawaaaattgacaaacctttaccaagattgacagagaaagagagacggggcagggaacaagggagggtgaagagaaaacacaattaccaacgttaggaatgaagatattcctataggtcctgctgatatgagaaggattttaagggaagactgcaaacaaccttacaaacataaatttgataatttagaagatatggaacacaaagtaccataacttacccaatgtaaaatacctaatttaaatagccttgtaactattcagaacaatagatgtgtaattttaaaacttgcagaacaaaaatctccaggtccaatggtttcactaataacttttaccaaatgttcaaagaagaattggtaccagttt

SEQ ID NO: 750577 - DNA, 537 bp, Homo sapiens
tctttgactggaaaagaatgttgctaattatactcatgattgtcttatgttatttgctaattctaggatacaaagctggaataagaggaatgaccacttcgtctgacagacctgttgctgcacacatctgtacccttcggtcaacagaacccgatgcaaagaacagaaaagggagagatgtgggagttcagacaggctggtggcgtgtccagaatttattccttccggtgggttcttggtctcgctgacttcaagaatgaagccgcaaacctttgctgtgagtgttacagctcttaaaggtggtgtggacccaaagagtgagcagcagcaagatttattgtgaagagcaaaagaacaaagcttccacagcatggaaggggacctgagtgggctgcygctgcaggctgggatagccagtttttattcccttatttgtccccacccacatcccgctgattggtccattttatagagtgctgattggtgcgtttacaatcctttagctagacacagagcgctgattggtgactttttaca

SEQ ID NO: 750578 - DNA, 605 bp, Homo sapiens
cttgaatgaaaatgataataatactaacctcatagggttgttgtgaggattgagttaaaatatttaaagctcttccgaatactgtttgcatatagcagatgatacacgttaggtacagagtatcaacatccccttctctgatacataggtagatttgaagatatgcttataasaatatatctctttctatgtatctgaactggcattcagtaaatatttgataaattaatgcaatctaacagaataaatatgctaattccagagtccagttagctttgtcactcattgttcaacagcttctgtgatttgttgctgattaataaatagagatagaacctcagagtttatggatgaagtggatcaggcctagatagtaagaaacatttatgatgagcctgtgtgtgccaggttctgaggttgacacttttcatgagccattacatgtaagtctcctaacagctcttttaaggcagatgcaattcattcctttatagaaataagaaaaatgaagctcagaaatgttaagtaaattaccccaaatcgcacaattagtaagttgtgcaagaggtaggattctaatcttatgctatttttaagcaaaatat

SEQ ID NO: 750579 - DNA, 608 bp, Homo sapiens
ggacacacattttgggaactgctcttttggctataaggtgatgaaggtgatatgaataggttctctgatatatgaagtacatataaatactgtattaaaaatagctgtgtattatcacacaaggatgaagaataatgatctcattttaccaagagaagcctttcacacctggttaatagaccaggtcacaccttaagaaaaataacaaaagtgtttcatgtattaatctcactaactccgcttgcaactatcctgttatcttaaaatacatgcacaggacaagtgagcacgactctagcccacaggctggccctaataaaggacagaaagttgcttctaaagatcactgaggagaggactggataccagagaaggatatcaaagagagagagactgggagagatgaaatatttccaatagaaatatagtrtctcaaggacaaagagatgtactgtttcgaagtacaaattttcacattattggtgaagtgtcttgtacttttgaaagccatttgaatgcttggtggcttcaaatgattcacaagtacaccagactctcaatttaaaaatttataagaaaaaaacaaaaggaaactgtgtaatttaatg

SEQ ID NO: 750580 - DNA, 620 bp, Homo sapiens
tagagactgcatatatattataggcatctctgtatcctcagctctgtcacaatgccagacatattaggtgggtaacaggtgctagctcttaaatttaaaatggattttaattgttcaatgaaataaacaataaaccctatggctgacgcatgggaagaaagwgaagtgtactgcaagaacctagacataaatttgcacaaagttgcagggaagttagtggcccctcaatattccatgtgcttccctacttctcccctgtgaaaggttctgaacaatggactctgagagtgtcacttctggaatgagacagttgaacctgagcgttcccccttctatcccagcccctaccatgaggaccctgatggccacatgctccagaaggcataactacaagattaagatgagagctgcccaccatattggatttcacgtgagtcacacaataacctctactgtgttaagccataagatttcagagttagttatcaatgcatcatatagcattaattatcatatataatacctaccctgagaattaaataatgaaattgtaagctaaataagtagtcaactggctcattttgtggaatggggaatctctcaattatgagtatatatat

SEQ ID NO: 750581 - DNA, 393 bp, Homo sapiens
atgtagcacatatttgaccttcacattttattaagtctaattttttaaagttttgtctgttcatttacatgtggaaggatgatagaaatataggaagagacatgacagaaagcttgcctaggactcagatcaaggattcagatttcccaattccggcttcagggccctgttctgtaacatcacatcagggaaaggaaaatgagagaaaagaagaaagaataagaactaatgttaattcatgtcagacacagtgccaaagatctttatttgcattattgttattattttttaaaaaataaatagactagcacgtagccyagcttacacacttctcattgtatagatgaggaaactgggaatcagttaaactttataaccacaccaagatcattg

SEQ ID NO: 750582 - DNA, 635 bp, Homo sapiens
aataaaaaataaaaaaaagctactcttgctggaaaggtagagagaagggtctgcgggtgccctctaccattgtggtttcaatgtctaaatcttctggagaggattgctgcagtgatgagataaaagcagctgcctttccaagtactgtctatttgcattgatatttacattctttgccaaagtgacatcattaacatttgcttagtatttgtgccacagggatatgttttacataatttaagacttggaagtgatgataatgtatttcagatgggcagtagaggccacagagtgctgaatttcatcccctttcttcttaaggaccttagtgcataaataagtccctagtccgtatccctaaatcatattaacaatactgcttactgggtgccaacaatatgtctggtactggactagatatatstgtatatattgtttagcccccatgacaacagtatgagggtaggtaccattatctccattatatagtaaagaagcaaggctagaaaaattggtgacttgcacaggtctgaattcagagacatctcaccgcaaggacttttctccttatgctgtgtcattctatctcccatcttgtagcctacttgtttcttcagatttaagaaacagaaacc

SEQ ID NO: 750583 - DNA, 608 bp, Homo sapiens
tctggatccatcaccgagagcactcattcacactccacagtaattgttggtttacttctcagattatcaagatgggactgtagattaagctctgttctcagatcttcgcatggtccctgacacactgtaaatgcctcatacattcctaaaggacagactgacattcttggtgactgatcttctagtatgaattttcaagtctttccaaaagtaatgtaaaattatgatcttttctcccccctccaactcttcgtatgggttgcagacccttctgctttaaagaggacattggaacatttaagattctttaagagcttttccagtgcaagccctaaccccagaaaggctttaatcctagagagccttgcaattctatcctaccctttcttgygtaacatacattgataagactatggtcttgtcgcctcatattggtcctatgcttcctcttttgagattagttataggtaactattcattcagcattttctgcttttcatctaagtcctttttggtgagccgaggcattgatctgtatattttcccaggtggtgtctgtaactgcttcgctcactgtgataggaagtgtacatgctctgggaacttgg

SEQ ID NO: 750584 - DNA, 644 bp, Homo sapiens
acatcctcaaaaaaacttggtatttttcagtttttttttttttgacagtggccattctgacacgtgtgaggggttatctcattgtgattttgaattgcatttccctggtgattagtgatgttgagcatcttttccttatacatattggccatttgtataccttttttggagaaatgtttggataagtctttagcccatttttatcagacatatggtttgcaaatattttttcccattctgtaagttgtctttttactccgttgattgtttcctttgctgagcagaagctttttcatttaacatagtcccctttgtgcatctgttatttttgctttttttgggggggggcggtctatgcttttcatgytatatccaggaaacaactgccaaaatcaattttagaggacttttccctattttttaaaaaagttttatagtttcaagtctcacatttaagtttctaatctattttgagttgatttttgtatatgttccaagataagggtccaatttcattcttttgtgtgtggatagccagttctcctagcactatctgttggagagactatcctttccacattgtacagtcttggcacccttgtcaaagaacatttgcctgtatatgcttgggtttatttctgggt

SEQ ID NO: 750585 - DNA, 626 bp, Homo sapiens
ggaccagagtggaaatggcctatggatccccagtttgtgactccagaagagaatatgatccaaactccttaggctaccattcagaattctttacgttctcattcattcctatttttctagcttgtttctagttctctcactcttgctcactataatccagccacattgaactgtttgtgattccctcagcctgtctctgttactctgcacatattcttctcttttccatgaatgtttttgtttttttkttgttgttgttgttgtttgagatggagtctcgctctacagccaggctggagtgcagtggcacgatcttggttcactgcaagctccgcctctcaggttcaagcgattctcctgcctcagcctcctgagtagctgggactacaggccacgtcaccacgcctggctagtttttgtattttcagtaggggcagggtttcaccatgttggccaggatggtctcgatctcttgacctcgtgatccacccgctttcgcctcccaaagtgctgggattacaggcgtaagccaccatgcctggccttccaggaatgttttataccatcatttcttttggaaacccctcctccttttaaaatcttgatgtcttctttacctaatgtaa

SEQ ID NO: 750586 - DNA, 626 bp, Homo sapiens
ggaccagagtggaaatggcctatggatccccagtttgtgactccagaagagaatatgatccaaactccttaggctaccattcagaattctttacgttctcattcattcctatttttctagcttgtttctagttctctcactcttgctcactataatccagccacattgaactgtttgtgattccctcagcctgtctctgttactctgcacatattcttctcttttccatgaatgtttttgtttttttgttgttgttgttgttgtttgagatggagtctcgctctacagccaggctggagtgcagtggcacgatcttggttcactgcaagctccgcctctcaggttcaagcgattctcctgcctcagcctcctgagtagctgggactacaggccacgtcaccacgcctggctagtttttgtattttcagyaggggcagggtttcaccatgttggccaggatggtctcgatctcttgacctcgtgatccacccgctttcgcctcccaaagtgctgggattacaggcgtaagccaccatgcctggccttccaggaatgttttataccatcatttcttttggaaacccctcctccttttaaaatcttgatgtcttctttacctaatgtaa

SEQ ID NO: 750587 - DNA, 603 bp, Homo sapiens
tccccatttttgaaagaaacattggtacagagaagtatttctttactgttagaaaaacaacagagcaagtttgatgataaacaatgttgacatagcctcagagtcagagacacatggggagtggtgaggactgtgaactaaagggcacacgctttctccaaaaggaggtgccacgtcgcgcctctagactagtcattgccatgtgagggtgaaacctagtgttgccagattgtgagatttctcaagaaatgccagaagatggattgtgtgaaatctctagattttcaaatgtgagctcattggggkaataaaaaacacacaacatacaaaactcacaaatcaaacaaaacaagtctgcagcctgggtttggcagttgggctaccagtttgcaacctgtgatgtagctgcggagatctgcatggatttgggagactgtgaatgagcagtaggtctccagcagaggctgcctcatggagaaatccaggaagggctggagagagagcttgggtccagattgtgggtaatcttgaatgccatcctcttctacccattttggaggagaaaatgttttcagtttacagtacacttcttcctgctttaaa

SEQ ID NO: 750588 - DNA, 600 bp, Homo sapiens
caccgttctctcctgattgttctactatactggccacgccttttcagcctccttcactgattcttattcccacagttttaatgttgccccagggctcagcctttgttctttcttaatctttctagactcactcccttggtgaacaacactstagtctcgaggctttaagtgcaggttatatgctgacatctcctatacttacatttccagttcagatctctctttcccttcttaacttcagattcacatatgaaattatctactcgacatttccactagattgtgtaaacgggtagtttcagcagggtgctgtggctcacgcctgtaatcccagcactttgggaggccaaggtgggtggggcacctgaggtaaggagtttgagaccagcctgaccaatatggtgaaaccccatctctactaaaaatacaaaaattagctgggcatggtggcacgtgcctgtagtcccagctactcgggaggctgagataggagaattgcttgaacccaggaggcagaggttgcagtgcgccgagatcacgccattgcactccagcctggataacggagtgagactccatctcaaaataaattaaaaagta

SEQ ID NO: 750589 - DNA, 667 bp, Homo sapiens
ctgacatgcaagccatacatatcaaaaacccatggaaaatacatagaaaccctacatacactgcacttgtagacaagtgtttatagtcttaaaatgtaaagaaatcttacaaagcaggaccaacatgataaattcccacaatagaaagatggggaactgacagaagaaacccacagggccaataagccattttcactcagcaaattcaccaggccacagttatgtccagggtggcctttgtttctgatattccatttcaacagctgccttgcactgaaatttgaattctttataacccgggctgccaagaccacgatggggtgtcttctgctttgcctcctgctttgcaaagcagttagtcccatcaatcygattctctgtcgacttagcagggatctctctgcctttaccatcctatttcgtgatgccagcatggtttgattactttctgaaggtcaagcaaaccaaggggttattttcctggttaaaatccctactggatatgaagatgaaaaatttgctgcactctagatgagtgagaaaaatagatatggattattttctagctcccaatgctatgataaagggttgaaacaattctagaaagagaaagacaccagccaataatttttagttgtttcttggttgaaaacataaatctctgtgt

SEQ ID NO: 750590 - DNA, 623 bp, Homo sapiens
ctcatccacacacagtaagaattatgtagtccacaaccttaaaatatgaatcaaacacagcttcaatcttattattccattaaaatgtatgtaagtctgatctgctaatgatcctaaatcattaccgtatgacaagtgtggacggtagtgatgcttactaawttgatgctaattttaaaaggaaatattccacaggtagaaaaatctccacgttaaaaataagggagaataagtttaagaagaaaaaagaataagaatgtcattttgtccatgaagtatgcctgcctccaggaagaaacttaccagattttgaaaattgggactgattttcgacgtgtggctctgcagaaggtgtctttcctgactttgggtagttaattgataaaaagtaataaacaggaatgcatgattgcttgaatgtaaaactaccacctgagtacagatgggatgcattctgtatctgcaaaagtagattcccatgaaccccaccctgaggaatgtgagcggagtgtctggtttaacaagagcaatatcttcaccagctttttggcaatctggtaacatgtgatcctgccttgccaaagggctgaggcttgcttttcacatcaacatcatattcaggc

SEQ ID NO: 750591 - DNA, 641 bp, Homo sapiens
gaatctgaatggaaaataatttgatatatctaaacttccaagaaagggctgaagaatctgaactcagtccatcttaggcaaaaactgaagctcttttaacttgtctgcctctaatggattcacaatcaggtacccagtgatatgacctggctctgtgttcccacccaaatttcatcttgaattgcawtctgaattttaatccccacgtgttgagggagggaccttgtgagaggtgattagatcatgggggcagtttccccatgctcttcttgtgatagtgaatgagttctcatgagatctgatggttttacaagggacttttccccacttcgctctgcacttctccttcctgccaccaagtgaaaaggacatgttttcttccctttccgccatgattataagtttcctgaggcctcccagctcaggggaactgtgagtcgatgaaacctctttcctttataaattacccagcctcggaagttcttcacagcagtgtgagaacagacaaatacaccaaggaagactgaaaacaatttttcttcttcccttttccatttcaacacagccatgacattatattgcaatgatgggagagaaggcatgatttaaaacaatggttctcaagcttaaacatgcatcag

SEQ ID NO: 750592 - DNA, 600 bp, Homo sapiens
ttctggcacttagagttaagggaaaaaaacagaaaatcttcaaaaattatttggatgtaagtggcccaattccacatatgaaacatacagctattctttctttttccaccattaattacagacaaattcatcttgctctygtgaagtctgaagtttgttgttattattgttagatgagttgcattcaaactccaacaacaacaaaaaagatgaggccaacattgaaattcatctcacagtccggaatttacttaacggccagcctgtgcactgtgataaacggaatgatgatccggcaacatgtctttatccatggtttgctttaattaatgccggcttgtttgttgaaaagatgattaatatgccaatgaaaattgcataattgaataccacaacactggcacaatcagaaagacacatgcagttttttgattaacatttattattattattattattgtgcttcttaatgtactcttctcactatgaaaggatgcagttctttgaccaagaggtgaaagaaaacagggctgagggcaggatacttcatgagcaagagtaaaatacaatgtggcttaatcagagtgaaacagttctttg

SEQ ID NO: 750593 - DNA, 567 bp, Homo sapiens
catacacactagaactagacccatggctccaaggagtaaaattcatcacaggtgtatgctaagtgttcaaaaggaagaatagggagtactcagcaaatagcattaatgactaccacatttatgtgaagtgagcctttttctctatctgatacacatacaatcagggacatatggcctccaatgtctctacaacagaacaagagaagaatgaagcaggggaggctcaccacttctttcttaatggccacatcctgacactacacaccacctctcctcatggtccaatggccagaactcattgcatatcttaagcctgcctgggtgcaagggaggtaggtatatgtaggraaatacatgcacacatcctagaatggtgattctccattagaggggcctatggtaacttattttataacgagcttttcagatatttataatgatcaggcaaagttgaggtactcagttacagaaaatcacaataatgggaagaatatattatagaaaaaatacacaagaagcctttaggcatttaactgagtattacctagatgtagttgatcttttctc

SEQ ID NO: 750594 - DNA, 641 bp, Homo sapiens
gacaatttgacttcctttcttccaatttgaataccctttatttttctctcttggctgattgccctggtcagaacttccaacactatgttgaataggagagaggcatccttgttttgtgctggttttccaggggaatgcttccaggttttgctcattcagtatgatattggctgtgggyttgtcatacatggctcttattattttgaggtatgttccttcaatatctaggttattgagagtttttaacaaaaagatatgttgaattttaccaaaggccttttctatgtctattgagatagtcatgtgggttttgtctttagttctgtttatgtgatagattatatttactgattggtgtatgttgaaccaactttgtatcctggggataaagccaacttgatcatggtggataagctttttgatatgctgttggattcagtttgccagtatcttattgaggatttttgcattaatgttcattagggatactggcctgacgttttctttcttttgttgtatcttggccaggttttggtatcaggataatgctagcctcataaaatgggttagggaggagtccctccttttcaattgtttggaatagtttcagtaaacatggttccagctcttcattgtacatc

SEQ ID NO: 750595 - DNA, 607 bp, Homo sapiens
attgattctttctcatctttatgggcttatctacctttaatctttgaggttgctgacctttgattggggtttttgtggggtctttttgttgatgttattgttttttgtttgtttaacagtcagaccactcttctgtagggctgctgtggtttgctgggggtctactccagaccctagtcatcgtggtccctcctgaaacatggaggtatcaccagtgaaggctgtgaaacagcaaacatgtcagccttctccttcctctgggagctccaacccagcagtgcactgacctgatgctggccagaacactttygtaggaggtgttcagtgacccctgttgggaagtctcactcagtcaggaggaacaggatcaggcatctgcttaaagaggcagtatggctgccccttggcagagcaggtgcactgcactgactacctgacctctccagaaccggcatcctggcagactctatcccagggagaaatcagagttctgtctgtataaacctggctggagttgctgaaattcccacagggaggccccaccagtgaggagggataaattgggatcccacttaaagaagcagactggccatgatgaggcacagca

SEQ ID NO: 750596 - DNA, 613 bp, Homo sapiens
ccttccactttattattctttataaaacttatgttagctattgtaggttctgggcctttccatatgaattttagaatagcgcgtttatgggtgcaaaaaccttgctgggattttgataggaatttcttcaaatgtatagattagggagaattaatagttctactgtgttgagttttccaatccatgatcacaggttgtctctctatgggtaattaggtcttctttaacttctttcatcaatgttttataaatttcagtgcacagattctgaatctgaaatttctttacagtgtacataagtgttttattttctttggggcatttctaaatggcattgtgtcttaacttcagtttccacgtttattgtggagtaggtagaactgtgagtaatttttatgtgtcartccacattctgcaacctactgagctgccttattagatctaggaggattttttttggtagatttcttgggattgtctatgtagatcatcatgttatctgcaaattggatagttttatttcttctttccaatttatatactttttatttctttttcttatcttaccgtactggttagaatgtccagtgctatattcaataagagttgcaag

SEQ ID NO: 750597 - DNA, 607 bp, Homo sapiens
cactcctttttccttcgacctatagtgagttctcaggatctgagcacatttcattccaccccttttcctctttgctttaggaatagatgaagaaaatcaaagagctgtgcacagcagaatagaactgctttgaggacctgcatagccctgtggtcttgggcaagtcactgagcctcagtgtcatgatgggacgagtggatccaacctcattaatgtaaacctcaaatgagaacatggtcagtcactcataggggaagcagaaacaaagatgaatgctaagattatatcttggttcattttctattgctayaactgaatacctgagactggataatttataaagaaaataaatttattccttacagttcttgaggctggaaagtcccagggcatggcactggcatctgctcagcttctggtgagtgtgccatgacgtggtgggtggcatcgcatggtgacacagattaagagttggctcaggcctctcttcctctccttacaaagccactggtctcatcaggggccccaccccaatgacctgatgactaggtcactgctcctagttacatcccaaaggccccacgtccaattaacatagaaatttagg

SEQ ID NO: 750598 - DNA, 607 bp, Homo sapiens
cactcctttttccttcgacctatagtgagttctcaggatctgagcacatttcattccaccccttttcctctttgctttaggaatagatgaagaaaatcaaagagctgtgcacagcagaatagaactgctttgaggacctgcatagccctgtggtcttgggcaagtcactgagcctcagtgtcatgatgggacgagtggatccaacctcattaatgtaaacctcaaatgagaacatggtcagtcactcataggggaagcagaaacaaagatgaatgctaagattatatcttggttcattttctattgctataactgaatacctgagactggataatttataaagaaaataaatttattccttacagttcttgaggctggaaagtcccagggcatggcactggcatctgctcagcttctggtgagtgtgccatgacgtsgtgggtggcatcgcatggtgacacagattaagagttggctcaggcctctcttcctctccttacaaagccactggtctcatcaggggccccaccccaatgacctgatgactaggtcactgctcctagttacatcccaaaggccccacgtccaattaacatagaaatttagg

SEQ ID NO: 750599 - DNA, 517 bp, Homo sapiens
acctcattaatgtaaacctcaaatgagaacatggtcagtcactcataggggaagcagaaacaaagatgaatgctaagattatatcttggttcattttctattgctataactgaatacctgagactggataatttataaagaaaataaatttattccttacagttcttgaggctggaaagtcccagggcatggcactggcatctgctcagcttctggtgagtgtgccatgacgtggtgggtggcatcgcatggtgacacagattaagagttggctcaggcctctcttcctctccttacaaagccactggtctcatcaggggccccaccccaatgacctgatgactaggtcwctgctcctagttacatcccaaaggccccacgtccaattaacatagaaatttagggggttaagcttccaacacacgaaatgtaggggacacattcaatccacaaaaatatgtaaaggcaatttatattcaataaggcaatacaaaaaagtaaaattctgaagacaaca

SEQ ID NO: 750600 - DNA, 566 bp, Homo sapiens
gggacaatgagtgaggcaagaggggctcaggcagcccagctgacggattaactgtgagtgcgtggggtgggagcggccagagagcggaggtgggaagcgaggcttgaggaagaggggcagccggcagcaggggctgatgtctctgagaagagaagcccatccgtgaaaggccgaaacttcaaatattcaacttgcatacctggggatccttgtgttcttttgctagcatttgttttaagtatgcagggcccactcccacattctctgaaccctgcctgtcctggacgccaggagctttggtctccatcactgggagaggtgagtcaccccatctctgtctcygtagccactgacccacggacttttatcattttcccccaagaattctgtgaaagtgtcccaatcatttttctgcctccggtctcatctttctcaaatgttccctcaacaacgagacctcttctgaaacacaaaccaccacactgcgtccccagagccgagatggcaccactgcactccagcctgggccacagagcaagactctgtctcaaaaaaaaaaaaaaaat

SEQ ID NO: 750601 - DNA, 566 bp, Homo sapiens
gggacaatgagtgaggcaagaggggctcaggcagcccagctgacggattaactgtgagtgcgtggggtgggagcggccagagagcggaggtgggaagcgaggcttgaggaagaggggcagccggcagcaggggctgatgtctctgagaagagaagcccatccgtgaaaggccgaaacttcaaatattcaacttgcatacctggggatccttgtgttcttttgctagcatttgttttaagtatgcagggcccactcccacattctctgaaccctgcctgtcctggacgccaggagctttggtctccatcactgggagaggtgagtcaccccatctctgtctccgtagccactgacccacggacttttatcattttcccccaagaattctgtgaaagtgtcccaatcatttttctgcctccrgtctcatctttctcaaatgttccctcaacaacgagacctcttctgaaacacaaaccaccacactgcgtccccagagccgagatggcaccactgcactccagcctgggccacagagcaagactctgtctcaaaaaaaaaaaaaaaat

SEQ ID NO: 750602 - DNA, 610 bp, Homo sapiens
tcatagatgcagaatttctgccatcgcaaatccacaggccacaccatggccctttttgtttcctttgccctccctggtgaccccaagcacagcgcgccgtgacacaagtattccacaaacaaggagcgtcctctttggccctggcccacacttccaaattccatggtctctgcagggctcggcctccttgagaggggccaggagagtggaggccctgcgtgcccccggcgccttctccagtgggacaaggggccacagcttaaagctcggttctgcacctttagccccargctctcctcacctccacccccagaaaacacacttgttgtcgttgccatcgctcaaagtttctgtccgactcttcacaggcagggagcagactatctatctgctggacaggagctggagctgagtgctcgacaaaagccctggctcccactgggcacagcctgcaagcctctccccatccatgagagaggtcacctgcggcccactctgcagccagtgtacagcctgtccaaggtggccaaatggagaggcacggaccaggagcccattagagccagcagagctgcacgggcaatgccctcctcgtgccaagaggctgatg

SEQ ID NO: 750603 - DNA, 645 bp, Homo sapiens
cattttgaaataaaatgaaaaacaacaaaagggaaaaaacaaaaacaaaatgaatgctgcttctactaccacattctttattgtctttttgccacaaatcctttaatcagtaggtgagaaaagccacatattaagagctagaaaagaagcaaggaagttagtaaaggaaagataaaagcatatttttaaaaatcttggttgagtaaggttgtaacaattgagtgccaaaattagcattgagcttcctgtaaccctaggcaaggagagaaacmtaatgggtatctatcttttggcatctagcagaagaaagtatagatagatacacatgttaccctggattccacttctgagatgaacttgtcacaaaggatactgaggaatacattggaagatgtccagagtgcaaaagatattttgcaaatatttctttgttgtatatagcattagtctggatgaacactgaaagattagtgctaaatcataattccataaagacaattctttagggacctcaaagaatatggccaatggataccactctctgctgatctggcttaacctagggataaaatgtggagaattttaaggtttgaatagtcagcacgtttttaatccaatatttacttgagatggtagcgcttttgt

SEQ ID NO: 750604 - DNA, 540 bp, Homo sapiens
caatcgagaagtctcctggccagaactcaagggagggagtgaatccattgcgcagactccacaggtggggaaagaaggaaagccctaatttcttttgcagctgggaggtgggtagcctggggcaagttctcggtcctgctcacccactacctggaagtagacttggtgctgttggtgggggacgtggtgggaatgagaccggccctttgggttgtgtggatattggatgaggcctgtsactgctggctttctcccacttccctgacaacctgcatgatgcaatagaggcagccataatcctactaggaacataactccattagtctgagaacttcaccgtcatccccagcagaagctgcagcaagacctgcccaaggagagtctgagctcagacacacctagccttgcccccacctaatggtcctcccctacccactctggtaactgaaaacaaatggcatatactcttgggagttctagggccctggccaccacctcttcctccccatactactacagctgatgctctcttgaaagcgc

SEQ ID NO: 750605 - DNA, 540 bp, Homo sapiens
caatcgagaagtctcctggccagaactcaagggagggagtgaatccattgcgcagactccacaggtggggaaagaaggaaagccctaatttcttttgcagctgggaggtgggtagcctggggcaagttctcggtcctgctcacccactacctggaagtagacttggtgctgttggtgggggacgtggtgggaatgagaccggccctttgggttgtgtggatattggatgaggcctgtcactgctggctttctcccacttccctgacaacctgcatgatgcaatagaggcagccataatcctactaggaacataactccattagtctgagaacttcaccgtcatccccagcagaagytgcagcaagacctgcccaaggagagtctgagctcagacacacctagccttgcccccacctaatggtcctcccctacccactctggtaactgaaaacaaatggcatatactcttgggagttctagggccctggccaccacctcttcctccccatactactacagctgatgctctcttgaaagcgc

SEQ ID NO: 750606 - DNA, 563 bp, Homo sapiens
tttgccattttataagtttctctttaaagcatgcaatttctaccacttaattagcaggcactactggaaggcaaaacaaatccccaaaagctaagggtcccatttttacaccaaatcttagatcccaaaaagaaaaacagtatggaataagaaagtgcaatgattttactgtgcattttattgcaaagcaatccaaagccaatcagcccattctgtgattatgccatgccccatgggagtctcatctctcagtgcggtggcgggtgctagggtttgcgacatcttcatagttttccagatggccaagagcatgcttctctgatccaaacatgaaaagagctgagtatccccccataactgccaktagctattcccaaaactgtattttctacctaattattgcacaccaaaactctcttacaatgcaaagtaatttctaataccccccaaagtcaaaaccatcagatattgcaatgcaaaacagaacagtcttagatttttagatggatctatccagtttcacttcctagggtttcatgaggaaaatagaggttttctccaaa

SEQ ID NO: 750607 - DNA, 623 bp, Homo sapiens
ccaacatatgcacatgaaagtattacctgggcatgctggaataaaaaaactcactaagcttttagaaattaattctctccactcatgctttcattttctatggataatctatctctaattttaagttcaactgaaaaccaaacggcaaagtcaactgaaaactggaatttccattcactaggaaaggttgcacaagaaaatatgaattgcctttcattttcccagcactattaacatttattgggagagataaaatgctaataaagtgaaattctatcacccaccagctattctgtctaaatagaggcatagaggttaaattttgtcaagtaaactttattggctttcctcatagttgattcaaataattcagcaagacttgtgaagtttataaattttaacaggtagttgtattatcttctaagttttcatcttcatatacaacagctcaartaataatttacacagaagaaaataaatagtaatagactgtaacagttaagaattgcatccaggtgtttgaaggattacattttatagaaagctatttgtatcaagtttataaaaggcaagtttcaaaactgtataatgcaataatttcatatttttaaatatatatgcac

SEQ ID NO: 750608 - DNA, 568 bp, Homo sapiens
gaagcactaagtaaatgcaatgcctttacctggtgctgaactttgagcaggttaatgcagattacatttgtaccctatcgaaggtgtgagttaagcacatatcatgagatgacacttgtgctcttccctttgtcatgtttgtcagccgttagggctctagggaatgaaaaatgactggactttggaataaaatagacttcaatatgagccccagttctaccgaacaacagctgtgtgatgcagagcaaacgactcaacccctattaatctagagatggcttaaaaattcgactttcaaggtgttgggaggtttagtattaatatatgcaaaacattttgcacatgctgggcacatagtgagtattcagtaagtgttattactatcrtcagtatcgtcaccatcagtgtcatcctcgtcatcattacttttggtaccaagcatatctattaccaatggagtccattttgactatacacagtgaatctcctttacaatgttatttgcaatggaatgaaattcagtctatggacctcactagatgaatcatataaagtagtatatgtgaca

SEQ ID NO: 750609 - DNA, 588 bp, Homo sapiens
aacttcactcctcaaactatactttcacatcaccattatctttattgcctattatattaaccctaacccaaaacaagtggaaaagtacaccaaactggaagtacagaggccaggtacctggttcctttctgtgtctacccagccaggtaaagttgagcaagtttcataacctttctggagccattgtctcttcttgagaagaatcaatttgcactatatgatatctaagtacattttactaagacatctcaattaattttcaagcccttctatttctcatgaccaccctgactttttagacttgtttcctattagttctaaaacagggtatgtccagatacacaactttgtacctgcataatagttcttaaaataacttttgaacctttgtggtggagcctcgactctctagttatatgctctctcatcttgcctgtcctcatcttcctyaccttgcaggccatagaaaggattgagctgcattccaatctacctgctgttcttttgcactggcttggttttaatgtgtatctccttcacctctcatgctccccaatctgctctcttcaacctttctttttttgcaaa

SEQ ID NO: 750610 - DNA, 617 bp, Homo sapiens
attaagtattatcagccttttatattataataattcaaggaggtatttaatggtatcttttactgtttctaatttgcattttactcaattctcataattttgagcagctttgcatgtttcttttttagaacatcttattcaatctagagtgcctgttcaagtcttttgctcattttatttttcttagaaattttctctttttattgctcatttgtagtttttaaaatgagctctgtataaacatattgttatatctgttgcaaatgtcttttttcattcagaggctaataytctcagtggggcattttaagaaatacaaggttttaactttagctccaatatatcaatattgtatttccttgttggtgctttctatgtcctatttattatttccctatccaaagttcataaagatagctacctacattatcctttataaccttcattggcgtttatgttcatatttagaactacaatccaccacctgaggttctctttttttttttttttttttaagttccaaagtacatgcaggatgtgcaggtttgttacacaggtaaatgtgtgccatggtggtttgctgcacctatgaacccgtcacctaggtattaagccga

SEQ ID NO: 750611 - DNA, 617 bp, Homo sapiens
attaagtattatcagccttttatattataataattcaaggaggtatttaatggtatcttttactgtttctaatttgcattttactcaattctcataattttgagcagctttgcatgtttcttttttagaacatcttattcaatctagagtgcctgttcaagtcttttgctcattttatttttcttagaaattttctctttttattgctcatttgtagtttttaaaatgagctctgtataaacatattgttatatctgttgcaaatgtcttttttcattcagaggctaatactctcagtggggcattttaagaaatacaaggttttaactttagctccaatatatcaatattgtatttccttgttggtgctttctatgtcctatttattatttccctatccaaagttcataaagatagctacctacattatcctttataaccttcattggcgtttatgttcayatttagaactacaatccaccacctgaggttctctttttttttttttttttttaagttccaaagtacatgcaggatgtgcaggtttgttacacaggtaaatgtgtgccatggtggtttgctgcacctatgaacccgtcacctaggtattaagccga

SEQ ID NO: 750612 - DNA, 632 bp, Homo sapiens
caaattatatatctgacaagggagtagtatttagaatctataaaaactattacaactcaatttacaaaagtacaaaaaacccaacggaaaaataatggacaaagacttgaatagatatgtttcccaaagatgtacaaatggctaataagcacagcaaagatgctcaataccattagtcattaagaatatttaaatgaaaatcaaaatgaaataccagtttatatccattagaatgattataattaaaaacatgggaaattacaagtgttggtgagaatctttataaattaagcatggaattaccatatgactaattcctctcctaagtatgtactcaagtgaattaaaaacagatgttaagcagttgtacataagcactcaaaacagtattattattaataccccaaagtggaaaagcctgtatatgcatcagttggtgaatggataaaaaaaaatgtgctatatctatacagtggaatattatttagatayaaaatgtagtcctgaggcatgctgcaatatcagtgaattttgagaacattaggctaagtaaaagaagccagtcacaaaaaaacacatattatgattccatatctatgaaatgttcagaatagggaaattcataaagacaa

SEQ ID NO: 750613 - DNA, 575 bp, Homo sapiens
gtgtttaataaagaattattgagaggattccgggaagatagcagactaggaagcactagaaatctatcttttcacctagacaataattgaactggcagagtgtgtctgatgtagctatttcagaactctagactattaaaggtttgcaacttccaagggaaatcttgaacagtarattctggttattttactcaatttcagcctgaagcacaatagtagctaccatttcccaccaccaatcccatagcaggcagctaaacaggcattcttggaacaacctccacatagcttgtgggagccagagagggcaaaaatagccctgtcctccaaacatcagggatctgtgctctaattactaatgcctacttttgattatagagatacagaaaaataggtggatggccattgtaggtgcacctcccctcattgttgcaacattgcccccacaagtgacttccaggaaatttaaaggaccagcatcctttcccctacatcattttttctcttttgtctttttttcccctttgtttgtgagccaggcatttaatactaagacactcaaactgcatgtatgg

SEQ ID NO: 750614 - DNA, 611 bp, Homo sapiens
atgccttagggcacacattgtataacactgtaattttgtgttaacaaaattacccaacgaccacaggtgaggtggcaacagagttattaaataagcagagcttttgtatgttattgaagttaagctgatataaaataaaattagagygttataactttaggatattaaatgcaatttccatggtaaccacaaagaaagtagctatggaatatgaacagaaggaaatgagaatagaatttaaatgtttcattataaaaataataaacacaaagaaatatagtaatgcagaaaatgagggacacaaaagctgtaaggcataaagaaaaccaatatcaggcagggcacagtggctcacacctgtggctcccagcactttgggaggccgaggcgggcagatcacttgaggtcaagagtttgggatcagcctggtgaaaatggtgaagccccgtctctactaaaaatacaaaaattagctaggctggttgcaggtgccctgtaatcacagctactcggaaagctgagggatgagaatcgcttgaactcgggaggcggaggtttcagtgagcagacatcgcgccgctgcactccagcctgggaaatagagtgagtga

SEQ ID NO: 750615 - DNA, 498 bp, Homo sapiens
cattttaatagaattatttgtttgtttgcttgttttgctgttgtattgagttctttgtatgttctggatattaatcctgtgaggataaatgatttccagacattctcactctacagattgtctctttgctctgttacttcctcagctgtgcatgagttttacagtttgatatagtctcatttgtctttttttgttttggttgcctttgcttttgaaggcagacctatacgaactttttttcaaaccgatgttattaaattattcccctatgtttttttccagtagtggtatagtttggagccttacatttaaatctttcatgcatttggagatgatttttstatatggtaagagataggggtctagttttgttcttctgcatatgaaaatccagttttcccagtaccattatttaaggaggctgtcctttccacaacgtatgttcttggcacctttattgaaaattatttggctataaatatgtggatttatttctag

SEQ ID NO: 750616 - DNA, 600 bp, Homo sapiens
tttcaaatcttagctattgtaagcagtgctgcaacaagcatagaagtgcagatatctcttcaatatacctatttcctcactttttgctacatatccagaaatggcattgctggatcatatggtagctctatttttagtttttgaaggaacctccaaactgttctcaatagtggttgtactaatttacattcccatcaacagtgtacaaggatttcctttgctccacatccttgccagcatgttattgcctgtctttcagatataagtcattttgctggggtgagatatctttttgtagttttgatttacgtttctcttatgatcaatgaagttgagcatcttttcatatgcctgttggatatttgtatatattattttgagaaatgtctattcaaatcttttgcccatttattgattggattaatttttttyctatagaattgcttgagctcctcatatattcttgttattaatcccttgtcagatgggtagtttgcaaatattttatcccattctgtgggttgtctcttcactttgttgattgtatcctttgctgtgcagaaactttttaacttcacgcgatcccatttgtccattttt

SEQ ID NO: 750617 - DNA, 598 bp, Homo sapiens
aggaaaacctgtctccaccaaaccctaggcccagttgacaagggcctctttgacataaactgtcaacactgtcatgagggcagcagtcattctctcataaactcatttatttcatagccagctctcccaccacactgtgagtccctgaatatctgtgtctcgcttgtcttcattttcctttttttttttttatttttgagacagagttttgttcttgttgcccaggctggagtgcaatggcatgatctcaactcaccacaacgtctgcctcccaggtctaagagattcttctgcttcagcctcccaagtagctggggttacaggcatgtgccaccatgcccagctaattttgtatttttaggtgagacggggtttctccatgttggtcaggctggtcttgaactcccaccctcaggtgatctgcccacctcggcctcccaaaatgctgggattacagacaygagccactgcacctgaccttgtcttcattttctaaacaccttttacctcaccctttacagagtagttggcatttgttgaacaagttaagactgtcttacttgggacagagactgttcatcaccccccaatatgcaca

SEQ ID NO: 750618 - DNA, 611 bp, Homo sapiens
actctggaatacttgcaacacaaggcaagcaagcactctgagtgggatccagagcttacttgatgttcaccatgaccgaactgtccaatttcccaaaaggccaagggtgtatcagaaaaccagagctatgaaaacaagcccagatgcttgcactgtggctgcaagaagccaccaggcagggagaggagttctctcactgtcagaagttttgtcagcctctgtccttctgccactctgtctggggataggcacctgtggtcaggggaactcaagggagcaccaacccaggttacamaaatccccatcacaccaggcctcgaattctctgaaggagatcagataggatgcacttcccaaagcgtccccatctccaccagccttccccacaatgctgcttccaaagcctcagtgctgcccagtctgatatctgaatccgagtgacaaatggcagcagaagctcttttctttagtatctactgtgtgccaggcaccattctaagagcttttcattttgctagtcatttatttctcacaaaaactatttcagggaggtgctcttagtaattccattttagaaatggggaaactgaggcacagaaagtgttgtgagt

SEQ ID NO: 750619 - DNA, 611 bp, Homo sapiens
actctggaatacttgcaacacaaggcaagcaagcactctgagtgggatccagagcttacttgatgttcaccatgaccgaactgtccaatttcccaaaaggccaagggtgtatcagaaaaccagagctatgaaaacaagcccagatgcttgcactgtggctgcaagaagccaccaggcagggagaggagttctctcactgtcagaagttttgtcagcctctgtccttctgccactctgtctggggataggcacctgtggtcaggggaactcaagggagcaccaacccaggttacaaaaatccccatcacaccaggcctcgaattctctgmaggagatcagataggatgcacttcccaaagcgtccccatctccaccagccttccccacaatgctgcttccaaagcctcagtgctgcccagtctgatatctgaatccgagtgacaaatggcagcagaagctcttttctttagtatctactgtgtgccaggcaccattctaagagcttttcattttgctagtcatttatttctcacaaaaactatttcagggaggtgctcttagtaattccattttagaaatggggaaactgaggcacagaaagtgttgtgagt

SEQ ID NO: 750620 - DNA, 611 bp, Homo sapiens
actctggaatacttgcaacacaaggcaagcaagcactctgagtgggatccagagcttacttgatgttcaccatgaccgaactgtccaatttcccaaaaggccaagggtgtatcagaaaaccagagctatgaaaacaagcccagatgcttgcactgtggctgcaagaagccaccaggcagggagaggagttctctcactgtcagaagttttgtcagcctctgtccttctgccactctgtctggggataggcacctgtggtcaggggaactcaagggagcaccaacccaggttacaaaaatccccatcacaccaggcctcgaattctctgaaggagatcagataggatgcacttcccaaagcgtccccatctccaccagccttccccacaatgctgcttccaaagcctcagtgctgcccagtctgatatctgaatcmgagtgacaaatggcagcagaagctcttttctttagtatctactgtgtgccaggcaccattctaagagcttttcattttgctagtcatttatttctcacaaaaactatttcagggaggtgctcttagtaattccattttagaaatggggaaactgaggcacagaaagtgttgtgagt

SEQ ID NO: 750621 - DNA, 611 bp, Homo sapiens
gtcatggtgaccaagccctgctggcttggttctcaggagtcatttcactggaaatgtagtttattgaccttagttcaaaccattccagataggtctacagaatgtagcccaaatataagctggggtcttgattgagaccctttgcctagacaggatatgacctyatgctttctgtgagttgtttttttttttttttaagctggattctcgctctttctccaggctagagtgcagtggtggtgtgatctcgactcactgcaacctccgcctcccaggtccaactgattctcgagaggcctcagcctcttgagtagctgggactacaggcatgagccaccaagcccagctaatttttgtatttttggtagagacggggtttcattatgttggccaggatggtctcaatctcttgacctcgtgatcctcccgccttgtcctcccaaagtgctgggattacaggtgtgagccgctgcgcccggccgctttctgtgacttttatgcactgacttccatttccatcacccatgcctgctgggagccagcgtgactcacccttgccagttcagtctgtaatctggttctcctctccctatgcacaaaggatccctatc

SEQ ID NO: 750622 - DNA, 611 bp, Homo sapiens
gtcatggtgaccaagccctgctggcttggttctcaggagtcatttcactggaaatgtagtttattgaccttagttcaaaccattccagataggtctacagaatgtagcccaaatataagctggggtcttgattgagaccctttgcctagacaggatatgacctcatgctttctgtgagttgtttttttttttttttaagmtggattctcgctctttctccaggctagagtgcagtggtggtgtgatctcgactcactgcaacctccgcctcccaggtccaactgattctcgagaggcctcagcctcttgagtagctgggactacaggcatgagccaccaagcccagctaatttttgtatttttggtagagacggggtttcattatgttggccaggatggtctcaatctcttgacctcgtgatcctcccgccttgtcctcccaaagtgctgggattacaggtgtgagccgctgcgcccggccgctttctgtgacttttatgcactgacttccatttccatcacccatgcctgctgggagccagcgtgactcacccttgccagttcagtctgtaatctggttctcctctccctatgcacaaaggatccctatc

SEQ ID NO: 750623 - DNA, 611 bp, Homo sapiens
gtcatggtgaccaagccctgctggcttggttctcaggagtcatttcactggaaatgtagtttattgaccttagttcaaaccattccagataggtctacagaatgtagcccaaatataagctggggtcttgattgagaccctttgcctagacaggatatgacctcatgctttctgtgagttgtttttttttttttttaagctggattctcgctctttctccaggctagagtgcagtggtggtgtgatctcgactcactgcaacctccgcctcccaggtccaactgattctcgagaggcctcagcctcttgagtagctgggactacaggcatgagccaccaagcccagctaatttttgtatttttggtagagacggggtttcaytatgttggccaggatggtctcaatctcttgacctcgtgatcctcccgccttgtcctcccaaagtgctgggattacaggtgtgagccgctgcgcccggccgctttctgtgacttttatgcactgacttccatttccatcacccatgcctgctgggagccagcgtgactcacccttgccagttcagtctgtaatctggttctcctctccctatgcacaaaggatccctatc

SEQ ID NO: 750624 - DNA, 626 bp, Homo sapiens
aagccaaaggccagcgcccctggtttctgcttcccagaaggtttttgactgatgaagtggccatgagcctacagtcccttgggtctgaacctagacccaggggtgtagaaggggagagtgacaagctgttaacagttctgacttcttgctctacattccagtgtcagtggctcttcttacggcaggaggcaggacacagaacaggaaataacttccctacctaagaggcaccaacagcctttcattccrgaacctcccagaaagacgagaaccccaaggtctttcctccccctaccttcacatataaaccaattttcttggaaagaaaagtcaagggaaatgttaggaacctaataaaggtctctgaaaacaatgttcctccatttgaaaaataaactatgtctttaaatgcattaactctgtggggaaataaatgtaataaaccaaattcaatccctgacaaaatttgttttcttatctatgtaaaatcaatatacttgttgcaattatgtctttcaataaatcctcccaaagtcttattttctcataagatttcctgccgcacttagattcattgcatttattttccatctagagaaattgtttcttgcatttttgagccatcg

SEQ ID NO: 750625 - DNA, 663 bp, Homo sapiens
gagtaggaaatacaccttcctctttctctcttctcaccttctttagcttgaaatcaccctgaaataaggaagccactaatgaaggtctctatccctgggcacaaagaaggtaaaaagtggagagtggatcaggagatgcctgcagaaggcaccctgcatactagttgactgtgttaactcactacacacctagtggaaagccaaatgagtttccataaacatcacccatcgcagggcaactgattgaaagtctccagcctcttatgtacctcagtgaatggatcggttatttctctgccatttcttctaaagctgagacattggaaatgaagttaacaaattggacccctagccgtgaaaccccaatggcctcttgttaggtgctcaatccactcaaattagcaaygcctccaaaaacacatatttgtacttttctcctggggacttgtgttggtaaaatctccggacagttggtcaattcagtgaggtaagaagcttcagcagcaatctgtcaatttttggacagccaactgattcgattttcactcttcaatcatttgcttggggcatgatacgctgtcaattaatgccttatgtctgctcttcattctggatcctacactgaatatcccaccaaggctcaactccccaagtctggctggg

SEQ ID NO: 750626 - DNA, 616 bp, Homo sapiens
ctaagatggtctaaataataccgcttacctcacataatccccttatgatgcaactccatccattaaaacatgagatctacattccctcttcttgaaactggctggacttttgtggctggtccaagaaatagggtacagtggaagagatgctgcacgacttctgaggctaggttctgcctggcggctggacaatsacgatttgaaccctgagcctctacatatgcaagatattggccccaaagcagcaatgctgtgaagaagtccaaaacagcccacacatgagaacaaatgaaaagcccagaaacatcatgaagagaaatgtccagtcagctcccagctactccagcccctcattgttccagctacagctcctcaaaccagaatcatccagtcaagcccttcccaaactcctgacccacaaaaagcatgagagagaataaaatggttgctcctgttctaagtcacaggatttcagagtgccttgttacaaagcagtacataactagaacaatacctaatgtttattgagctatagaattgagcatgtaatattttattcaatttattgaacacatagtatttgtgtagtcaggattcaaggatttcacatgtatta

SEQ ID NO: 750627 - DNA, 505 bp, Homo sapiens
ccaattctaaaaaaacaatgcagggccatccctgtcccagaactctccatggagctgccagaagcctttgttgagactgcatcacatcccgacttctccctctgcccattcctgtttcctgttcttcccccaaggtgttgaccctagaaacactccctcatatacttcccacatgcaaatgtccaaaccagagtccacttctcagrgcacccaacctgcaacaactaacttgtagaatcttgcaagtcactgaacttctctgtgcttcagtttcatcatctattaagtggggataataatataacctacttcatagtaatatcatggggattaaatgaattaatatatgtaaagtgtttagaacagaacagcattgatacatgataagtgctattttattctctgttattcttatatttagtattatttttattactactatatagcaagttaagtcttatttcccttttatacaacttacattgattaagattggacaagtttc

SEQ ID NO: 750628 - DNA, 631 bp, Homo sapiens
ctttaagcaagggcacttaattagctgggttaatagagggaagaaaggccatagataatccaaatcaatatgttattcaaaaataatttataattgctttatttaaacaggtttatttttctatttgtcttgctttatgcaaatatccaggtaaactttccttccctaagcacgtattagctagggccaagaaaatggccagaaaccacaataaatagtgaaggtctcaggatatactttgccattgtgagtgcatgaagcagatttgcctcatgtagattatcgagaattgaatgtaagtaaacaccataaacgacaacatttctcattagattcaacgttggttagaattatttcactcaaaactccaggaacagagaaatgacttaatgacggaatacctaataattttctttcctataaggaactgctaagaacagaagcagtaatttccagagagragctttatttttactctttaaaaaatgttttaatggatagtactaagttacaaataaaaagtctgagttatatattgcatgggtgttaaaattgttagcaatttttaaaatgttaatgtgtggactagttactttatttatttagatggcattttcctacgatagagtac

SEQ ID NO: 750629 - DNA, 578 bp, Homo sapiens
gatttgggatatttaattactaataaaagaacctttggatgaatgtaggctaccaaaaggacagagttgactgagtcatattaattttgacaaatttatacaatcaacatcttgcagtgttccacagttagaaaacaaacttgagacaaacttgaaaagctgaaaaataaacttcagaaaaaaagatgcaaygagagattttgagtgagaattattaataaatcactattacaaaaataaaaagcatctgtgtttttagcttataaactttaactggttagggcatgccagtgaatattaaagaagagaatgcacttgtatttattaagtggggtatcatttcacaatgctcacctctttggggaaagtctaataccattgaccatggcacaaagaaaacatccttgaggaaggtgggatcatataaaaggatacatagaatcacctgtagagatttttaatttatcttcccctactccaggattccaggattctgaatcagcccgtcatctcagagtgagaatcatgttctagaggccccagtattactgagaggggggtgctatatttgacatatt

SEQ ID NO: 750630 - DNA, 593 bp, Homo sapiens
ctttatacttttcacaaaaattaattaaaaatggatcatagacctaaatataaaatacaaaatcataaaacttctaaaaggtaacatagaagaaaatctatataaacttaggtttagtgatgacatcttaggtacaacactaaaagcacaatttatgamaaaagaaattggtaagttgtagttcattaaaagtaaaaacttctgctctgcaaaaaacactactaagaaaatgaaaagacaaaccacacactgcaagaaaatatttccattatatatatgataaaggattgatattcaacatatagaaactcttaaaactcaacaataagaaagcaaacaacctaactgaaaaatgggcaaaaaacctgagcagacatgtcaccacagaaagccaccacttcttacctattactatggccaaaatccaaaacattgacaacatcgaatactggtgagcatgtagaataacagcaatgctcaatcattgttggttggaatgcaaaatggtatagctactttggaaggccatttgacataacaaaaactagatattctcttaccataggatccagccatcatgctccctgctattt

SEQ ID NO: 750631 - DNA, 524 bp, Homo sapiens
gtggtggctcatgcctataatcccagcactttgggaggctgaggcaggcagatcacttgagtccaggagttcgagaccctggtctcgaatgaaaccctgtctctaccaaaaatacaaaaattagccaggtgtggtggtgtgtgcctrcagtcccagctacttgctacttgggaggctgaggtgagataatcacttgagcccaggaggcagaggttgcagtgggttgagatagcgccactgcactccagtctggatgacagagtgagaccccatctcaaaaaagaaagaaaagaagtacctgagattgtttataaagaaaaaaggtgtaattggctcatggttccacaggctatacaggaagtgtggctggggaggcctcaggagactgataatcatgatggaaggcaaagggaaagcaggcaagtcttacatggctggagcaggagcaagagatggggcgggggaggtgccatacacttttaaacaaccagatctcgtgagaactcactcactatatggtacca

SEQ ID NO: 750632 - DNA, 524 bp, Homo sapiens
gtggtggctcatgcctataatcccagcactttgggaggctgaggcaggcagatcacttgagtccaggagttcgagaccctggtctcgaatgaaaccctgtctctaccaaaaatacaaaaattagccaggtgtggtggtgtgtgcctgyagtcccagctacttgctacttgggaggctgaggtgagataatcacttgagcccaggaggcagaggttgcagtgggttgagatagcgccactgcactccagtctggatgacagagtgagaccccatctcaaaaaagaaagaaaagaagtacctgagattgtttataaagaaaaaaggtgtaattggctcatggttccacaggctatacaggaagtgtggctggggaggcctcaggagactgataatcatgatggaaggcaaagggaaagcaggcaagtcttacatggctggagcaggagcaagagatggggcgggggaggtgccatacacttttaaacaaccagatctcgtgagaactcactcactatatggtacca

SEQ ID NO: 750633 - DNA, 662 bp, Homo sapiens
ttattaaatacgtatctaagttggaatgattatccccactgtctgttcagttgtcattcagacaatacttcctggcaggttagctactacagatttagcatagttactgaaagaatgaagatggttggattttatagacctttttgtagactatagggctctgaggcgtcaatccatgcaatgactgcctctttcctccaggtattgaaaaacacaactcttcgtgctttctgactggcatgaacccataacaactagatttaattgtgtaaaagatctcaacttcaaagtcagctaaaaaggcctacaaaaccatccattatactgcaaagttaaacgatcactgtttttcaaagtcttcctgatttctctgccaacagagatgtgctagaaccaatattaccctsttctggtggtggggtgctgaatggctttgcaacaacagaaactaaatacatctgggcaaactgaatggcaggaaatggtgaccaatgagatttgcagagaccatttggggggaagtttttaaaggactcaacatgcatatatcatctcccctacctcacccttcctattccccctgccctcacaccctcacactgccaaagtggaattcagtagcattgaaggaataaaaatatccagtgcaaaggatttccttt

SEQ ID NO: 750634 - DNA, 526 bp, Homo sapiens
tgaccattcattttacaaatagattcgccacgtggttatttttaatagagtgctcccttgccctccatatctgattcagttttcaataatttgcctccataacaagggaaatgtaaattcaaactttgtaaattaggataaaattatttacacaccctttggtttagctttttaatccaggttggaaccaataaatgagaaaagtaaactatggtgatggaacgcccttgcccacaaaatagggatatgcgtgtagcagagacggcctcttgcccattgacatctctatcaggcctggtgagctggatctgctgcagggattctgctgctcctgcctctaacctcaccccttytccctctccaacaagccttgctgctttctgtcattcataagtgccttggctgtgatggggaccagtggatggtgaggcatgtgagaaaaggggaatgatgctctgcagccgggtgcatggcctagtgttagtgctcaaagaacagaatgaaagaggtttcattattttcagag

SEQ ID NO: 750635 - DNA, 526 bp, Homo sapiens
tgaccattcattttacaaatagattcgccacgtggttatttttaatagagtgctcccttgccctccatatctgattcagttttcaataatttgcctccataacaagggaaatgtaaattcaaactttgtaaattaggataaaattatttacacaccctttggtttagctttttaatccaggttggaaccaataaatgagaaaagtaaactatggtgatggaacgcccttgcccacaaaatagggatatgcgtgtagcagagacggcctcttgcccattgacatctctatcaggcctggtgagctggatctgctgcagggattctgctgctcctgcctctaacctcaccccttctccctytccaacaagccttgctgctttctgtcattcataagtgccttggctgtgatggggaccagtggatggtgaggcatgtgagaaaaggggaatgatgctctgcagccgggtgcatggcctagtgttagtgctcaaagaacagaatgaaagaggtttcattattttcagag

SEQ ID NO: 750636 - DNA, 619 bp, Homo sapiens
ctatttaacattatctatggcaacacagtatcaccaagtaaccatgtgtacccctacatttctcagttctcttgtagctagtatgccaaaacttttaagagaccatgtgcaaccctccagagccctatttgttggctacaaggacctggaagccacatgtggagatggtggaatcacaggtgagattaggctggattataagagttacaacatgggggatgtcacctgacccacatgtgcatgactgagaaataaacgtttgacgtgttaaccactgagatcttaggaataactcatgataacagcattgactaatctagcctattaagtctgaacatggtagcactaattattctacaaggcacaagactaaaagaaaccagcaagctgcagaacaatacatacagcagaagaacatatattagacacacatgttcacacatgaagcaataatgtgtaycttctaaggacagatacatgcataagtaaatgtataggaaaaggtccagatgatgttcaccaagctattgccagtaaacttgggaagggcagaccaagaaatttcaacctaatctataatttaaaaaaatttttttaataatgaatttttaaataaatt

SEQ ID NO: 750637 - DNA, 620 bp, Homo sapiens
tatactggagaagtttcccagttagtcacatgtttcaaatactggggtttcaagatataaagggaccactggggtccaatcacctcagtttacagtcaggaacctggaggcctgatgagggaaagtgtcttgcctagggatcatatagtaagccagaggcctgatgaaagctggactaattcccagcttttttccttccttcacatggattttggcaaagtgaccgwgataggaacagcatcacattcttaaactagctggggtaggtgggcacctaggttttgttccctttggacttgtacaatatccttgccatcattcccttccttcctgcgtttctttgatagagcaaacatttctaagcttggaggggaaggggaaaaatacaacttaaaagaaaagcaacacataaagatttaagggcctatgggaacaagggagcagaagcagaagaaaaagaatgaaaaatgaggcaggggacaaagagaaccagaagataacaagacaatggctaagtgggcaaaaactgacataaaaactccaagcacaaaaccagacagctacacagaaaaaaaaaaatgacatgcccaagaaatcatccttcgccccatggttttaaa

SEQ ID NO: 750638 - DNA, 619 bp, Homo sapiens
ctatttaacattatctatggcaacacagtatcaccaagtaaccatgtgtacccctacatttctcagttctcttgtagctagtatgccaaaacttttaagagaccatgtgcaaccctccagagccctatttgttggctacaaggacctggaagccacatgtggagatggtggaatcacaggtgagattaggctggattataagagttacaacatgggggatgtcacctgacccacatgtgcatgactgagaaataaacgtttgacgtgttaaccactgagatcttaggaataactcatgataacagcattgactaatctagcctattaagtctgaacatggtagcactrattattctacaaggcacaagactaaaagaaaccagcaagctgcagaacaatacatacagcagaagaacatatattagacacacatgttcacacatgaagcaataatgtgtatcttctaaggacagatacatgcataagtaaatgtataggaaaaggtccagatgatgttcaccaagctattgccagtaaacttgggaagggcagaccaagaaatttcaacctaatctataatttaaaaaaatttttttaataatgaatttttaaataaatt

SEQ ID NO: 750639 - DNA, 601 bp, Homo sapiens
accagagactgattacatcatggtgaattcatagaattgaatgcctttttctgtgaacctgagtaaagacacctgaaccaaagagcaactgccaacctggcctgagagagtcaagaactcccaccctgaccttcatctttcaattcctactgcctcagtcatgaatttttggagctgctctactctcctttctcactatttcccaatagctagaaccatttatttcctgactaaatctggcttattcctctatgttttcataactttgttgaagttatcctgtaatccttttgaggctaagttcaaattccgtttatgcaaatagcagcacctacttattctgatcatttctttatgagacctccctctgtggaagcctgagatctaaaccccagtccactactcaygtgtttggacaagctagtttacctctgtgaatttcagtttcctcaattatgaaacaggaacaactccatatacttaagggagaggtgtaagaattgagacaataaatatgaatgaccttggcaagacacatcactagtaaatttttgctcctacagctagagtacaatggtgtacatcaaaatagaatggtgac

SEQ ID NO: 750640 - DNA, 601 bp, Homo sapiens
tattctgatcatttctttatgagacctccctctgtggaagcctgagatctaaaccccagtccactactcatgtgtttggacaagctagtttacctctgtgaatttcagtttcctcaattatgaaacaggaacaactccatatacttaagggagaggtgtaagaattgagacaataaatatgaatgaccttggcaagacacatcactagtaaatttttgctcctacagctagagtacaatggtgtacatcaaaatagaatggtgacatttcatgaaaactggaattagaagttccagaacaagcactgttawctgggtaaatgactcaaggtaagtaactcattttctctgatttccatttgtatcatctgaaaaatgtactcattaaacaaatatttgttttgagactgctatgagccaggcaacatttgagcgtcttgggaaacattaataagcaaaacaggcaaggatcactgccctcatgggagaggagtgactataaaacctacctcacagtataattgtgaagattaagagacatgattaaagtgaaagtgctttataaatagagatgtgttacactgatgttagttattgttgct

SEQ ID NO: 750641 - DNA, 613 bp, Homo sapiens
ctgctttcaggattcaaacagatatttgtataccaatgttcataatagcattattcacaatagccaaaaggtaaaaacaacccaaatatccattgacagatgaatggataaacaaaatgtggtatgtaaatcaatggagtattatttagacttaaaaataaatgaaattctgatacatgcatgtacaagatggatgaacctgaaggatattatgctaagtgaaataagccagacacaaaaggacaaatattgtatgactccacttatatgggatacctaaaatagccaaatcacaggaacagaaagtagaatgatgactgtcagggctggggagaggagaaaatagggagctactgtttaatggctacagagtatcagaattagacgacrtaaaagttctggagatggatagtgatggttgcacaacaacgtgaatctactgactgccaccaaactctatacttaatatgattaaattatgctatatatattttactacaataaaaaaggaaaaaatggtttgtttttattagcaaaccagcaattttaaacaatgtcagcaaaatactccatccccccaaaatcttttgtttcctttaagttctacaaaatt

SEQ ID NO: 750642 - DNA, 644 bp, Homo sapiens
gattattcaccttgggcagggtcctcacacattttctacttttgtcaccatttgtgaacctaaaattcccaggatcatctggaaattctaatataactactaggaagcattctcccagttaaggttgttaatgtattaaatttgacaaatatttatgaagcatttactatgtcccagacattattctagacatttggtattcacaaatgaataaaacaaataaagaaccttgccagcatagagcatacattctagtcagggggagggagagtaaatagtaatagaaataaactataattataaaataataaataatgcatgttagaaaaagaaagaccagattcagggggaaggggagtgcaaataatgggaaatgaggctggaagatgatctgttatagatagtaggaactcatcgttctktccttttaacgcatagcaccttgcacttcttatttgtagccacgtttgtatttttttctatcaaaatttttattgaaataatttaggatagtagctaagcatctgaatttggagtctgacctaagatctaatccttggcccactattcattagctatgaactttgggcaagttatttaacatctctaaaccttattttctatcaatttttcatagttttatg

SEQ ID NO: 750643 - DNA, 623 bp, Homo sapiens
caagcaaatcagtaggggaactaacactgaaaaaccacatttgtaactccaaacccagtcagacaaccaattccagtgggtaataatatctcttgctcagggaaaatcattctcataaacaagattgtattaccttgagggagtcaccacttgaagtaagaaaaaggaaactttgagatggtttagacacaaatcataaaaaacgatgcatgtttgagaaatacatcttaggaacgtaatgccctaaaactgatttattgggaaactttagctctgtggacaaaagaccaacattacctatgaagaaacaacatgtagctttttctgtttaaaacttaagacagcaaggtaaattacatcagaagttagggtcatgttgcatttctaagaacatcctaggataagaattccagatgcttttattatcagatggtttattccaatcattcttaggagattttaaaggatgggtacagagyactgccaatttgggtatgatagactccaaagtcaaaaacatgctttcaatatctaaactcaccctcatcaactccaacgaagattttagtctaaatggaatacagagcatttatatgtttcacatgtttgttaactattgaaac

SEQ ID NO: 750644 - DNA, 544 bp, Homo sapiens
attaatttcatgcttgtctgctctggtaaaaccccttactgagttgttataaaaagagaaaattgagatgggttgtgggaataccaaaaagagttgatgcagctaaaaagaattgtcatgtttacacgttttattgctgtagggctctcatccacctagaaccttcagtaagtttgccttgcctgctgacatcagagctcaaaagttctgttctcacaaaaaattccagaaagaaacacgtatacccagagttagtaagcaataataatattaagcaaggcatgcttaagtcatttaatgaacaggtacacaaagtttcagtgtgaaaaaactggccaatcagtggcaaatacrcataatgcttcctgaacagagtttatacctctatcttccaataattgcctttgctatactttgtttcacaagactaattctagagtacattcatttagcttagggagctgcatatcttttcattctgcagaaaaaaatttaagcagaaactaaatatttattttgtttatctgaggaagaaatttgcttg

SEQ ID NO: 750645 - DNA, 518 bp, Homo sapiens
ctgtattgttgggtttttatatcgagttgttggatattgttatatataacaataatgaccccaaaacaaggaagaggtaatagagctatataagctctataggagtatcatttttttttttgagatggaatctggctctattgcccaggctggagagaagtggcatgatcccggcttgctgcgamcttcacctcccaggttcaagcaattctcctgcctcagcctcccaagtaactgggattacagtgcacaccactgcgcccagctaatttttgtattttttgtagagatagggtttcaccaagttggccaggttggtctcaaacatctgacctcaggtgatccgcccaccttggcctccctaagtgctgagattacagttttttttcacagcgcttggctaggagtaatatttttatatgtaactggaattaagttagcataaatctgaagttgagtctgataagatatatatggtaatgtctaaagaaaccaatttaaaaactcaaaaaatagtg

SEQ ID NO: 750646 - DNA, 488 bp, Homo sapiens
ctaaatcatatagtagacatgagtataatttaacacaatttgtcttttatatgactgatgaaattagccccgtgggtttattttcaatgccttatacatactaaagttatgcaaagtgtttctatttttgaatgatttttctttccttattttcattgttttcccctgcactgttgctgataaccttacaaataaagattgtaaaagaccaggagaaagataagcatgccaatcataagttttggttctgtacagttttcctctttgacccattgatgcttttcagctttcccactataattcttcattaatttccaggtttgtcccrcgcattgaattccatggtttttagtgtagtttcttgccttttagcctgggaacttttgggtggggagaatatggtgatgtagttcaagtcgaaatactagcatatgaatactttcagaagcccatacagttgtgtgcacattaactatgtttttagcagt

SEQ ID NO: 750647 - DNA, 514 bp, Homo sapiens
aaacccaggcgtcctagatgcagcgggtataagcccccaagaccaggactggctcccagcgccccatgagagatgtgtggcttagtggctagggccaggcagccctgggtccaaatcctagccccatccctgacccagcaagtcactcagctccttccgtcctcattcatcgcgaaattgggataatcccgtacttatctcaccagcttttttttttttttaattgagatggagtcttgctctgtcacccaggctggagtgcagtggcacgatctcagctcactgcgacctccacctcctgggttcaagtaattctyctggtttcagcctcctgagtagctggaactacaggcacatgccaccatgcccagctaatttttgaatttttagtagaaatggggtttcaccatactggtcaggctggtctcaaactcctgacctcagatgatctacctgcctcagcctccgaaagtgctgggattacaggcgtgagccactgtgcctggcctgccag

SEQ ID NO: 750648 - DNA, 542 bp, Homo sapiens
tgcagtctacatcagaactcagctctcctgctggttccccagccccagggagatgtctgggcccctgacactcctcttccagccatctgactcgtagtcacccacctttccttggcaggaagcggagaaggcaaagccggatgccctgcacggcctgcgggtgcactcctgggtccttgtgctatcggggaagcgcgaggtgcctgagaacttcttcatcgacccattcacaggacatagctacagcacccaggatgagcacttcctgggcatcgaaagcctgtggaaccacaagaactactggatcaacatgcaggattgctggaactgctgcaaggtgcctagggagggggagctgsgtgggtgtggcaggcacagtgcaggtgataggaatagagggaagcaatggcagccagaccttggggagagcgagacaccaggccacgagggctttgaaccttctccatagctgcgtctccatggcccactcccttgcccatgaataaccattctgatacgattattgtctctcctgatttgtg

SEQ ID NO: 750649 - DNA, 542 bp, Homo sapiens
aatagttcgagctcatgtggcagttacctccagagccataaataacatgcttctactgccatttcctgatttattaaccttggacattatctgttgacttctgcaaacactcagaaaaggaaaaatcagcttaccttttttctcctttcttcttgttatgttgcttcttgataacagggctgtttgctgccactggctctggtctagaccmtgggctggacactcgactgcacagttgccaagactaggcccactgaggttcaagacaaaaaaaggacttgcccaaagtcactgtgagttggtgttggaggtggcacccggctcctggtctgcatggctccagggccgggctgtctctgtgataccctttggcccaccctgagagtgactcttgtgccacccctggcccacgcgggcctctctcactctggcagaggcttagcatggctggggtgggtggccctggctgggttcctgctgagggctggctgaggcctcctgctcaggcaggggcaggcatatttgcagagcagcaggtgcag

SEQ ID NO: 750650 - DNA, 611 bp, Homo sapiens
tgctaatatcagtttggagatgccatttccgggcttatctcaaacttattagctggagaggaaggccacgagtcttctctccctactctgttctcccaagatttccccctgtgtccaactgtcagtcaggttagacctccaagcagctgcttccccaccatagccaggggctctgacagctggtaccaaacagaggagacactctaagaaaatgttctccattgaaggactacacatacatgaaaaataaaacctggaagtttgcaaaagctgaagagaagtcatattttggtctaatttattagttttgatatgagattctggtcagtattaggccgtcaactgtttgttaatttggtcctaagtagctgagccacagtggaacygactgatccagaaggctgcaaatacagaaggaaggatacagagaggagatatctgaaaagtgtcatcaatagaaaatcagtgcagagacaaggccatgcagttcttcatcattcacctccctctctattccaaatctttctccacttctggggtcagggagcaggatcctggctcttttcctgatttcagtttatttttcttttctttccttttttttttttttt

SEQ ID NO: 750651 - DNA, 606 bp, Homo sapiens
gtacctatgtgcacttgtctgacttttgtaagagttcatgaccttcccactaagatttagaaaagactcatctttaagagatgcaaaaatcagtgatatataaccagggaaaaatagtcattttggtcaatgagggctaraactgcattgttgtcagttgccactgaatttcatgtaacacagagcctggctcagaggaggtacacaatgaatgtaggggtggaaacaaacaagcaagccaacaacaggcaccacactggtgtagcattagccaacagttcttgggcagcttttaggggctgaggactccatgaattaactcatcccactctccctgcaacactgcagaataggcaatgtcatgcccattttacagatgaggaaaccagcctgtattgaggctaaatgacttgccctgccaccagctcattagaagcagcaggatttgacccagagccacctgcacagaaggctgtaattatccacagctgagagcagaggacaggactaagtcattctttaaaggagagctcacgagtccaggcctttaaaatctcaggcccagatgctcagcctgatggacaggcggcaggccacaggtgaggg

SEQ ID NO: 750652 - DNA, 521 bp, Homo sapiens
taggtaagattgtatcaacagctccagatggaccaatctctaagaataatttcacttccccttatcattgacaggaatcacatttacatattctactggtgagtgagataatgcagaaatgattaatgtccctcgatgtacagatacctgtagactgtttgatcaatgtctccccagaaagtctttcattctggatgctcaaagtccaaaaacgctctgtgattaatgtaaccaaatgtttggggtcggcggaagctgcaggcttcgtttctgtgtccccgtcacactaaagagaggtcgcaggagactggattagtcatgtggagaaaaagtctatggggctcatgtktgcatgggatttcaaatgtccttttaaagaaaggagtagaatcccccctggaatgtctcctccagaggctctgtagagagaacaacacacttagtcttttaatgcaaatctaatttccatttagaaaaccaagtgcgtctgattctgtgtgtgtgttgtattggaattggga

SEQ ID NO: 750653 - DNA, 623 bp, Homo sapiens
ccacctgccgatcgccatttaaaaagcttctccctgcttctctgcctttattttctggctctaggactttgccaagcctcattctgtctctgtgtaccaaggaggatacaggagagaggagagggaggaaggaggtggaaatgcattaaaacaaaaaagagagaatgaagcagtgtaaggttggtcacacatttgtcattaagtcaaagctgaatgccagtgtttgtgtgaggtggaattatctcattcctttagcctctgagtctctgtgatccaccagtcaagtatgtgattggattctgcctcaacaaaaccttaaattacacacytattgtgcctgagctaagcccagtttcacagcggtggagaaggcatctcccagcttcctcagcaatgttcgatccagcgcctgctctcatccgctggttgatgaatgagtaataggattagacagtctcatctcaagccacactgtgatcgtcatgttgggtgcagggacaaaggctggggtgatggataggggatgcatcatggagatgggcctggttcccctccctggtgggctattggtggagagagcaccatcacatcctgggaagagttctcctggcacttacaaaggg

SEQ ID NO: 750654 - DNA, 599 bp, Homo sapiens
ccctggagacattttatgattagtctgcgacagagttggcatgagtgtcttgtctccctggcaaccattttccctttgattcttatacatctgctcagcaatatactgtatttgggaaactgctccctaccttatttccaatcacaaagccaatgacagaggacttttgctgaatgggatatcattttccccggcgtctgaagctattgttttccagtgtgctcataactgcatcaaactgcagagtacatcttctctgcaaggccactaagtttargacaagcattagattctaatgaatactcagaggcacctcttgaataagtgaggagttttcagaagctaagtgggagctaagtggttagagcagcctggccagccttgtttcttggctaagaagaacctggttggatgaatctgtatttttcacttaaaacaaattattaatacaatttttgattgacaaagcataattgtatatgtttctggggtatgatgtgatgttttgatatatgtatacaatgtagcatgattaaatcaagctaatttacctgtctatcaccttgcttacctatcattttttaagttgagacatttaa

SEQ ID NO: 750655 - DNA, 611 bp, Homo sapiens
aaacagctaggtgtggtggcatgtgcctgtagttccatctacttgggagactaagaagggagtatcacttgagcccaggaggtcaaggctgcagtgaactgtaatcgtaccactgcactccagcctgagcaacagggcaaaactctgtttcttaaaaaataaaaataaaaaataaccataagacatgtcagttgaattgtctgtcccacccttcacgctttgctcatttattatgcaactaccatgtgctagacatgttcacacatagttttgggaacgttaaaggattcagttagaactagaaagccagtatgcagcagaatcatattttgtatagagatttgtgtaataccaaagcttgtgtttattytaaaccatactgactttgggtatatgtgtaatattaatgtttaagcaggtattatatttaattttaatttattttatttaagttgcaggatacatttgcagaatgtgcaggtttgttacataggtaaacgtgtgccatggtggtttgcagcacctgtcaactcatcacctaggtattaagcccagtatgcattagctatttatcctgatgctctccctcccccgaccccaccagaaatacc

SEQ ID NO: 750656 - DNA, 492 bp, Homo sapiens
agagaaaaaacacaagcatataaatgcaaaatgattctttcagtgggagtgtgttattcactttgaaattaaagtgtttaatggaaggagggaagactgaatagtttttgtgattaaatatgtattatgttatttacattttacaatgatgtagctttttccttatgacactaaattgtctttattattttttcatatttaatttctatatcaaagtgccaatgctttttattttaaaaaaaaatgaccattgtgtttctttcaggaccatagaaactacattttaaaatattttatttttcaggaacaaagtggcaaatacgtctctgtgtcttaaatgtrtatgtcccttacagttttttgtatgaaaataattgttctatcaaaagttagaataaaaaagttcaataaaaatgttgaaggactttttcctagaaaagtttgattttgaatattgtttagatcatttatttttaaatatagattttagtg

SEQ ID NO: 750657 - DNA, 571 bp, Homo sapiens
tcgagtagatgaaaagggtacctcagtttgcatttctcttgttggaagtgaagttgagcatctgttgatgtgtttattggtcattcccctcccccgccctgggtctggaacattgcaggctgctgtggcagggaaggagcatggtggaactgtctgtagttccaaaaggctgctgccaagggtcacgacaggggtytaccccactcacacctcattgtccaaacctagcagtaggtacaggttttgaggagcttaagactcatgattttggaaaaagaaagacaaaaacacaagacaggtacaatagtgaatattgttttaaaataagaaacacactaaatgacaaagggggggccttcttttgacatccaacaggaaacaataaattacaaatttaaaaagcattttctttctgtttttgttttggcctccactgcaatagatccttcgtagatttgaacttcagtatgatcagtaattctgaaaaagtatacaaagtctacctgacatttcggtgtacacaagtgcagttcagattttaggttgccactacattgtttcgagcaacgtc

SEQ ID NO: 750658 - DNA, 614 bp, Homo sapiens
gggatttgggttgcctcctgcacagtcaaggagagtgtcactcaggctagtcatagatggcatacctacaggcttgggctgattttagatagttgttcagagcagtcaggcaggcgccagaggcacaagccctgtgagaggtgtgtttggaatcacttggtatccaaatcacatgtcatccctaggagcaaggagaccggttggatttggggctggtctggaatgaagaagcatctctcagcttcygaaggctgcatggctcacggcagtatctcaatcatgccctgcccgtttgcacatttggtcctgttggtagttacctctctggtgactggcaaagtcagcaaggatattggggtggagcaccctggctaagcaccctcttgattatagagctatggagtagaagacagatggagaatgagaggcctgtgagaacaatcagtcagttgccatctttcagagctgctcgagttcaaaagtgtgtcatacagggtattttaccattgctacctttaagggattcaggtgggaaccctaggctgtggcttcacataatggaacttgggtgccatcctaccctgtgatgttgagctggccagcactggtgtagg

SEQ ID NO: 750659 - DNA, 622 bp, Homo sapiens
ttaatgcaaaaagaagcctataaagatggggcgtggtggctgattcctgtaatcccagcagttgggaggctgaggcaggagaattgcttgaacctgggaggcggaggttgtaatgagccgagatcgggccactgtactccagcctgggtgacaagagcgagactccatctcaaaaaaaaaaaaaaaaaaaaaactataaagaaacaggtcttacacattgtatagtttgtggggggtagtggggagtagtaagtcccagggcctttttgttgatctttaaatgaggtctggygttatgtaaatggctcagggctggtgggaaggagtgatggaatgctcacctggagttggtggtgtttcccattaagtcctgccagtgctgccgttgcctctggattactgttactggatcccctcatgtgatgtcctgcagaccctgaggtgtttagaacctgccagacttaaaaatgccagttggctacatgctgcggctggttttgggagaggtctgtgccaggctagaaaaatattactctgcagtctcagtagggatctcccagacctgtgttgaagcctgagcctcggactctcctttcggcatgaagtttgacagtggttagga

SEQ ID NO: 750660 - DNA, 635 bp, Homo sapiens
attcattcatgttgtattttatgaatagtcattccttttcattgctgagtagttttccattgtaggcatgtcccacagtttctttattcacctgttaaagggcatttgagttatttgcaacttttggtgattatgaatggagttactgtaaatattcataccatttttttctgtgaatgtaggtttttatctcactggggttaatacccaggagtgaaattgctgggtcatagagtacgtgtttcactgtacaggaaacagctaagcagttttccagcgtagctataccattttgtattcttcccagcagtacatgggagttccagtcgctctgcctcttggctagcccttcatagtccttttttttaaagctgttgtaatattctttttgttgamgcagatgagaaattaattttattaggaataatataaagaaataaataccagcaagtttctcaactcttcaaaactcatggtgattttaaggtaatagtcaaaagcttatttagggacagtgaagtgttgtcatctgttttcctcagagatcctaaaatatatgacattctagatttccaagttcaacaattcaaatcttactcataatattatgacactttaaagttatccagatttta

SEQ ID NO: 750661 - DNA, 630 bp, Homo sapiens
tgactgacatattcagatggcataaaaatcagacccagaagcacagaacgtttaattcccccagccacagctgctggtctgcacatttagtgggtaacccaagctggctcaatcagaactaatccttagccatactaagatttgcctgatctctgttttttaatttttctccctctctttctctctatctcaccaaccctatgactcccctttgcttcctgcccctgatagttgttcagaagaaaggatgttagcccagatctgctggtgatgcatgtccacgatatgtgtaaaaacacaccaaagaccagaggaaatatcagaactgataagaaaatagaatttacatatgaaaacttgaagactaggcctagatgaattttttgagcttctgaatccagctatgtctaatgacacctctagatttttcaggtgcgtgagttaatacattwatttaataattttgaaagaaccattttaaattagattttctttcctttatgtcaggaagaatgctactcactggaaaaagtaacttaagagcattagagaattacttatgtttatgatgattgtcttttcacacaaacacaaaacaaatacttttaagagaagactaaaatactttgg

SEQ ID NO: 750662 - DNA, 579 bp, Homo sapiens
gactaggcctagatgaattttttgagcttctgaatccagctatgtctaatgacacctctagatttttcaggtgcgtgagttaatacattaatttaataattttgaaagaaccattttaaattagattttctttcctttatgtcaggaagaatgctactcactggaaaaagtaacttaagagcattagagaattacttatgtttatgatgattgtmttttcacacaaacacaaaacaaatacttttaagagaagactaaaatactttggttcatggtacggtttggatgaggatatcctgtccaaaactcatgttgaaactgaatccccaatgcaacaggattaagaagtgtggccttttggcagtgattaggtcatgtgggttccaccttcttgagtgggatgagcagacttataaaagggcttgatgttgaaggtattgcccccatgcccttctgtccctcctgccatgtgagtgcacagtgtttgtcctctctgggggatgcagcaacaagacaccttctcagaaggagacacaagatccctcaccagattctgaatttactagtgccttgaatttg

SEQ ID NO: 750663 - DNA, 612 bp, Homo sapiens
cccctgaattgaaatgtctaaactcattatttattgtttgtctttaattgtgataaagtacatataatataaaatataccacataatcattctaagtgtacagttcagtagcattaaatgtatttacattgttgtacaaagatcaccgtcatccatcttcagaactcttttcttcttgcaaaactgaaactctgagtctctagatacaggacctatttttaatcacactgacctatgaataaggggtataaatatatatgtgtgtatttatgtatatatatgcacacatatatatttacatcccttgtaaatataaatatatgtgtaygtgtgtatacatgtatgtgtgtgtgtgtgtgtgtgtgtgtgtgtgtacatatatatatatagagagagagagagagagagagaaacagagagccagagagccaatactgaaataattaagtaggtgtggccaggggtggtggctcatgtctgtaatcccagcactttgagaggccgaggtgggaggatcgattgagcccaggagtttgagaacaacctggccaacatatcaaaccccccgctactaaaaatacaaaaagtagccgggtttgttggtgtgttcct

SEQ ID NO: 750664 - DNA, 589 bp, Homo sapiens
atttataaacataaataattatatttaaaacaaacatttgtacaaattatagtcataatttgtattgcagattaatgaaaaattattataaaatgaaacctatgtacttcataaacaactgtgctcattagaaacaaacaacaaaaatatttgtttgtttaataataatactcttttttttgaggtgktatctcattctgtcacacaggctggatcatagctcactgtatcctcaaactcctgggctcaagcaatcctctttcctcagactcctgaatagctgggactatatgagaaagccactgtggccagctaagtttttaatgttttgtagagaaggggtcttgcatttttaaccaggctgatctcgaactcctggcctcaagctatcctcccacctctgcctcccaaagtgctgaaattataattgtgagccaccataccaagtctaataataatacattttaatattgatggtaatgatgatgcatttgtcgtttaatagaaaaaactgagaaagagaatagtaaaataattatataaaaatgaaatatgtttgatatcattgattgcagacagaacatcctct

SEQ ID NO: 750665 - DNA, 600 bp, Homo sapiens
tatcgaataagggcaattttgtgagaatttcaatggaaaatcattaggcatggtattatccattttcatgctactgagaaaagacatacctgcaactgggtaatttataaagagaaaaaggtttaatggactcacagttccacatgcctggggaggactcacaatcatgatggaaggcaaggaggagcaaagtcatatcttacatggatggtggcaggcaaagagagaatgagagccacgtgaaaagggaaaccccttataaaaccatcagatctctgagacttattcgctatcacragaaaagaatggggataaagcacccccatgattcgattatcttccactctcttcctcccacaacacttgggaattatgggagctacaattcaagatgagatttggatggggacacagcaaaaccatatcaggcacctatcttatagtcataatttgtcttcttctgacttctttttgtctcttaatcttaaattatctttaaagtaactcgttattttttagttagttatgtaaaaaagactgcatcgacatggttaaattctaggattcttagtactttatgaatggaccaaatggctggca

SEQ ID NO: 750666 - DNA, 631 bp, Homo sapiens
cacattttaaatttcaaaagaattaaggaaattataaaataaacataacatatcaatataaaatacagtaagataacaaaatttcaaactggaaatacatcaggtattacaccttttacacattttctgaaaattcaagtaaatttttttaatacattcatatgattttcaaattatccaggcactcccagaaccatttgataacatatacctttttttaacaattaaaatgtatctcaattagagtatattgatgtaaaggtagaattatttagattcactcaaaaacctaaattcttatactgaatcaaacatgtaaggtaccaaagtctctattttgtrttctgcagtaacagcacttattaaaatagaataaatcaagagaaacattttatttatattacgtttagccaataatttttcaatgtcatgatttaatattgattaactttaggatttaaaataatatttaatgataatttgaaattaatgttatataggcaaaaagtaatgatattaaatctgccacttaccaaagaaggaatatgtagctgacatttcaccttcccagaacctgggactttgttaccagacaacatttaaacacgtgagactcagctccaagttcttt

SEQ ID NO: 750667 - DNA, 634 bp, Homo sapiens
acacatgtaagtcttttgtggaaactctctatcaggttaaaaacgtttctttcttgtttggttggaatttataacttaaataattattgcattttgcaaaatacttttttggcatctattgaagtgataaaatagtttactccatttgtttttctacgagtgtggtgtgttaaaatattttctgttgwtaaaacaaacttacatccctggtataaaccacacatgcttatgatgcactatcctttttatattttgctaattgcatttattaaaatttaagaatttttgaatatgtattcatggaaaatagatatgttttgtctgttttaaaattatgcccttgaaaataaattggtaagtgccccatcttctgtttcctaacagactgatagagaatggattattattattatcattatttttgattttaggtatatcagtgaagcaaaccatgtctataatcttctcttttttaaagagttttaattgtaaatgcatttctttaagtaatataaacctattcatgttttctatttatttttctgccgggtttcagaaagagtggtttcaaggaatttgttcagtttttctaagttgcttatggttctctaataatgtcttcataacattctta

SEQ ID NO: 750668 - DNA, 634 bp, Homo sapiens
acacatgtaagtcttttgtggaaactctctatcaggttaaaaacgtttctttcttgtttggttggaatttataacttaaataattattgcattttgcaaaatacttttttggcatctattgaagtgataaaatagtttactccatttgtttttctacgagtgtggtgtgttaaaatattttctgttgataaaacaaacttacatccctggtataaaccacacatgcttatgatgcactatcctttttatattttgctaattgcatttattaaaatttaagaatttttgaatatgtattcatggaaaatagatatgttttgtctgttttaaaattatgcccttgaaaataaattggtaagtgccccatcttctgtttcctaacagactgatasagaatggattattattattatcattatttttgattttaggtatatcagtgaagcaaaccatgtctataatcttctcttttttaaagagttttaattgtaaatgcatttctttaagtaatataaacctattcatgttttctatttatttttctgccgggtttcagaaagagtggtttcaaggaatttgttcagtttttctaagttgcttatggttctctaataatgtcttcataacattctta

SEQ ID NO: 750669 - DNA, 602 bp, Homo sapiens
gggcatcacctcacccaggaggcacaaggggtcagggaactccctcccatagccaatggaggccctgagggactgtgccatgaggaacggtgcattccttggtcaaagccagggagccaagtgatctagctcagtggatcccacccccacggagcccagcaagctaagatccactgccttgaaattcttgctgccagcacagcagtctgaagtcgacctgggatgctccagcttagtggcggggaggggcrtctgccattactgaggctttgagtaggccgttttccccttacagtgtaaacaaagctgccagaagtttgaactcggcagagcacactgcagttcagcaaagccactgtagccagactgcctctctagagtgctcctctctgggaagaagcacatctctgaaagaaacgcagcagccccagtcaagggcttgtagatcaaattcccatctccctgggtcagagcacctggggtaaggggcagctgtgggcgcagcttcagcagacttatacattcctgcctgctggctctgaagagaacagcggatctcccagcacagcactctagctctcctaagggacagactccctcct

SEQ ID NO: 750670 - DNA, 581 bp, Homo sapiens
ccttcctaccctgtaagtctgactcacttgctggtctacaaagctgaccagatgagtgctgactgaacaatgcacaatttgtcaagttacttctgtgatagtgtaatacaatcatttagataatggtcaagtaacttgttgggtagagtcttagtttgagtacatgcgtggaaactgatcattatgcatggaaagtgatcattatgatgaccacttccttttctttgctcccctccaaggcatatattttatagagttaatccaggtgaccttcattttgatgatgccactcattcatgaaaccctctaagtaatttccctaatgtggataataaaaatgcattgggcagatatcatttattgatctaggactatgcttactaaaatagggtacaggyagacatgccaaggacttaagccctgaataaataaacgcatcttcctggaatgccaaacttattcaatggtccttaatttaatacctttttctttttttaatacctttttattctgtaaacaagaattcctatgctatgaatagaatatatattttcgtgaattttgaagataaaacaagaaac

SEQ ID NO: 750671 - DNA, 605 bp, Homo sapiens
caggccaggcaggagctgagaaggcatgagagggccaggtggggacggggaccaaacagcgcccctgccccatcccctgggttgggggtgggcagcaccagccaggagatgcagatcctgaactaccagaccttgtgacttttcaagagaagacggaaatccggacttttacgtgaaaactgccaatttgtaaatgcwggcagctaattaattttttaaaataataataacatggtgagagccaaacaaaacatgcagggccagccacagccggggctggcaggtttgtgcctccagaataagattctttgacttcatcccctgctcacccccatcacacagctcagctgcagaaggggagggcgggaagtcaagggtgcaccccaggggagtagctccccctccctctcttcctcctgctggggagtcttcaccccatttggcatatggggaagttaaggcccagagcccctatcagccacaaacacacaccagctcccaatccatgccaggctgagggaacacttctcagctgccacccaattcatcagggctccctctgggagggcccggaccagcatctcaggggcatcagggtagacaca

SEQ ID NO: 750672 - DNA, 605 bp, Homo sapiens
caggccaggcaggagctgagaaggcatgagagggccaggtggggacggggaccaaacagcgcccctgccccatcccctgggttgggggtgggcagcaccagccaggagatgcagatcctgaactaccagaccttgtgacttttcaagagaagacggaaatccggacttttacgtgaaaactgccaatttgtaaatgcaggcagctaattaattttttaaaataataataacatggtgagagccaaacaaaacatgcagggccagccacagccggggctggcaggtttgtgcctccrgaataagattctttgacttcatcccctgctcacccccatcacacagctcagctgcagaaggggagggcgggaagtcaagggtgcaccccaggggagtagctccccctccctctcttcctcctgctggggagtcttcaccccatttggcatatggggaagttaaggcccagagcccctatcagccacaaacacacaccagctcccaatccatgccaggctgagggaacacttctcagctgccacccaattcatcagggctccctctgggagggcccggaccagcatctcaggggcatcagggtagacaca

SEQ ID NO: 750673 - DNA, 613 bp, Homo sapiens
cactattattgtgtgcttgtctaagtcttttcataggttaggaagaaattgttttatgaactgggtgccccagtgttgggtgtgtatatatttagaatagttaagtttcttgttggattgtaccctttatcattatgtgatgtccttcattgcttttcttaatttttattggtttaatgactgttttatctgatataagaatagcgactcctgctcttttttttktttgtttgtttgcatggtagctctttttccatccttttactttgagcctgtaggtgtcactgcatgggagatgggtgtcttaaagacaacagattgttgggtcttgtctttttatgcagtttgccgctctgtgacttttaagtggtttgtttaatccatttacattcatggttagtagtgatatgtgtgattttgatcaggtcattgcattgttagctggttgttatatagacttgattgtataggtgctttatactgcctgtgagctatgtgcttaagcgtgtttttgtggtaacaagtgtcattcttttgattccatatttagcaatcccttaaggatctttttgtaaggctggtctaggtaaaatgtattccctctgaatttgct

SEQ ID NO: 750674 - DNA, 631 bp, Homo sapiens
catacttgtcacactgtactttaacttttgagtaatggatctgtctttcttgctataggctaagttattccatagcagagatttggtctagctcatatatctctgcatcctagcatctaaggtgtctggtacacagtgagagccaaatgaatatttgttaaataagtgaatgaatgaattaattcctgtatattttcccacaatactctgaagtcatactcacccctccatggctttaatctcaataattcactattccttctcttagcttctgaatctaaatcatccaagtactcaggtaagcctgagtacttaaatatgctggatattktagtaagccctgggaagattcaaaggagaaaattaatcctcttgtgctgtcaaggagctcacaatctagggaaggatagaggctctattctatcagggttcaggatgtaaccctgaattatgatgcaatctggtaaggaccactacagaggaatgtggaaaccagacgttgtgagggcccagagaaagtagtcactggggaggtagggaaaagcctccagtgagaaggagacctatgagccggactttaaaaaatatgtcagatagagacagagtggatggtcatcaaacacacaggaaa

SEQ ID NO: 750675 - DNA, 606 bp, Homo sapiens
aggagaaaattaatcctcttgtgctgtcaaggagctcacaatctagggaaggatagaggctctattctatcagggttcaggatgtaaccctgaattatgrtgcaatctggtaaggaccactacagaggaatgtggaaaccagacgttgtgagggcccagagaaagtagtcactggggaggtagggaaaagcctccagtgagaaggagacctatgagccggactttaaaaaatatgtcagatagagacagagtggatggtcatcaaacacacaggaaatcacataaaacaagtgaggaatatgtaaatatttcatttttgaaggatatatataagaagacaacccaataaaaataggcaaattatttgaaaggctattttatgaaagaagataaaagaatgaccaaaaatgatacatgaaaagttgctcaacatcattagacatgagaaaaactcaagttaaaactgtagtgagatgcctctgtatatacccacttgaatggctaaaattaaagagacctaaatatcaagtactgactggcaaggaagtagagcaactggaaccctcatacaatgctggtgggaatataaaatagtatagccatttt

SEQ ID NO: 750676 - DNA, 631 bp, Homo sapiens
tagggtctagaaaaataccttcagtgggccagggccaagatggctgactagaagcagtggcgatcagaggctcccatagaaaagaaccataatagttgtgaatcctgtactgcaaccaaggtatccaggttctctcatcagaactgactaggcagcyggcatgatccacggaaaggaaggaagagcagtgtggtgcagtggcccacctgagagccacatggagcaggggagcccccaccccttagccaagggaggtggtgagtaagcatgctacccagccagggaaaacatgcttttcccatggaaccatgcaacccatagatcggaagatcccactggtgaatccatgcaactgaggcctagggtcccaaacttggaggcatgcagattctcaacagtctctcagctagaatctgcttaagcctgctgagttttctgggggagggggatcagcaccagagttgtggctgcctgatgtctaagccttttaagctccttgtgggaggggcaacagccagcactgagactcataactgtctaacatgctaagctccctgggtgggggaaggacagcatccatctctatagatccaatccatgcttttcccctgctggagccagggagactgga

SEQ ID NO: 750677 - DNA, 503 bp, Homo sapiens
ctagcaagataagacaacatgcaaattcaggaaatacagagaacaccactaagatagtccatgagaagatcaaccccaagacacaaaattatcagattctcaaaggttgaaatgaaggaaaaacgttaaagggaaccagagagaaaagccaggtcacctacaagggaagcctatcagactaacagtacacctctcagcagaaaccctacamgccagaaaagagggccaatattcaacattcctaaagaaaagaattttcaacccagaatttcatatccagccaaactaagcttcataaatgaaggagaaataaaatcctttacagacaaataaatactgagggaactcatcaccaccatgcttacatcgcaagagctcctgaggaaagcactaaatatggaaagaaaaaaaacagtagcaaccactgcaaaaaccacaccaaaatataaagattaatgatgttatgaagaaactgcatcaactagtgtgcaaaataaccagag

SEQ ID NO: 750678 - DNA, 503 bp, Homo sapiens
ctagcaagataagacaacatgcaaattcaggaaatacagagaacaccactaagatagtccatgagaagatcaaccccaagacacaaaattatcagattctcaaaggttgaaatgaaggaaaaacgttaaagggaaccagagagaaaagccaggtcacctacaagggaagcctatcagactaacagtacacctctcagcagaaaccctacacgccagaaaagagggccaatattcaacattcctaaagaaaagaattttcaacccagaatttcatatccagccaaactaagcttcataaatgaaggagaaataaaatcctttacagacaaataaatastgagggaactcatcaccaccatgcttacatcgcaagagctcctgaggaaagcactaaatatggaaagaaaaaaaacagtagcaaccactgcaaaaaccacaccaaaatataaagattaatgatgttatgaagaaactgcatcaactagtgtgcaaaataaccagag

SEQ ID NO: 750679 - DNA, 647 bp, Homo sapiens
tgtatttgaacaactgtggaaaacctccatgtgtgtagtgtgctaacacagtatttagccttcacatgttacgaaaaaagtcataaatatacacaggagcaccaaaactatatgaaatttagttcaaccagaatataccaatttgcagatcgtaatccaaatgaaacaytaaatttaaaatatcttctgtatacttcaaatccccaagaacacacacacatgcatacacacacacataccacacacacgcaccacacacacacaccacacacacgcagcagtgtgaaaaatactagttttttacaggaatgctggtaacattttttaccccttaacacataggcaagacacttgaagaagtatcccagggttatgctcagttctggatggttatttataactccactcatttctctcccactcaaaaaaaagcatattggaattcaagtcacatgaattcatagagataacccaaaatatgatctaatttacttgtaaagcattttgctaaattaaaaatttaaacaataattaataaattatttgtagtacattttagaatactaggaatatcattgattttactacagttacagttaaaaataaaataaaatttaggggagaaacaaaggggagggcgtaactca

SEQ ID NO: 750680 - DNA, 494 bp, Homo sapiens
ttcattaatattcatttatgtccagtttctcatacctggggtagttatacatgatgtttttaatgtcttaattctggcttgtaaaaaatattttaaaagacacattccttatacttgtatcatgtataatataattacagtctacagggttctttgttttttggacatcaggtacagaatgttctcttaatcataccattcagttcacagctaattattatcactggtctatacaaggcactatcttgttttatttgactctgggttttattttctttttgtyttgtttttagacaggactcactctgtcccccaggttgcaatgcagtggcacgatcatggcttactgcatccttgacctcctgggttcaagtgatcctcccaggtaacagggaatacaggtatgcgccactgtgccctgctaatttttttgtattttttgtagagacagggtttgctgtgttacacaggctggtcttgaactctagggctca

SEQ ID NO: 750681 - DNA, 546 bp, Homo sapiens
tagtggtcttctgttttgctgaattattacatatgatataataggcagtccatgtagaattagtcactaacgcataacagaatgctttacacagtactaaggtatcaacaaaattagagattttggggtttatttcaggaatataagaaatcaactacaaaaactcatcctgtttctatcccattcttaacattttccttcytaaattcttgtacttttggatttaaaatgatcggctctggctacttccatgaattacaggaaataattagctgctaaactttattttacatcagaaagtttggaagtggcatgtttgttaacaagtgtcttttatgtttcttagaactggaagacctgcctcatgtttcatgaagcttccatgatactacgtttagttgtagtcacactgtgtgacagaacatattgccttcatattcctaaactcaaataagaatttgcctttaaatttgtgacttatgaacacattaggatagaaatctctagtctgaggtctgtgaacctattgaaatggtgtaaaatttg

SEQ ID NO: 750682 - DNA, 546 bp, Homo sapiens
tagtggtcttctgttttgctgaattattacatatgatataataggcagtccatgtagaattagtcactaacgcataacagaatgctttacacagtactaaggtatcaacaaaattagagattttggggtttatttcaggaatataagaaatcaactacaaaaactcatcctgtttctatcccattcttaacattttccttcctaaattcttgtacttttggatttaaaatgatcggctctggctacttccatgaattacaggaartaattagctgctaaactttattttacatcagaaagtttggaagtggcatgtttgttaacaagtgtcttttatgtttcttagaactggaagacctgcctcatgtttcatgaagcttccatgatactacgtttagttgtagtcacactgtgtgacagaacatattgccttcatattcctaaactcaaataagaatttgcctttaaatttgtgacttatgaacacattaggatagaaatctctagtctgaggtctgtgaacctattgaaatggtgtaaaatttg

SEQ ID NO: 750683 - DNA, 587 bp, Homo sapiens
aatttcctttctctactcctcactcatttttgggacagcaataatccaaagagtggcaacagaaagagcggagggccatcagccagtctcctctcagttcctttcatgggccacaaaatgccttagaactccttcttccccagaggtttccctaaattgccaggacgtatagagattcagagaaaactccaacgatgatggaaaacctttaggcttactccagcctaactctttccccactgttagctgtctacatcacctaactttcagaggagaacgtaraattattgggctttttgtactcatccacctgcactgtgctgtttgcaagactgtgtgggtaatggaagtgatgctggacttagacacaacagacataggttctggttggcctctcagatatcagacaaatcactaaacattaactggggagtttggtctagaggaactttaagtcctttctaactaaatttctattcagatatactcgtagtgggcaaggggcatcaggagatggtagcctggtgactacttactataaaaggatataggtaatgctctaaggttagattatatttttaaaaacc

SEQ ID NO: 750684 - DNA, 638 bp, Homo sapiens
ggccctttgtggaatctgatgaatcaatccaccttctccttgatgcctgctgagtcaccctctccgctgctcctttctgtggtcggaaaggtaaatgaaaatcccattattcagcccatgctattgtgatggcagtttcctttgagcctcttggcaaaaccctgcttgctttagaactgtacatcatattggatccattgagagccattatgtatctgacaggatatttataaaagccgtcattagctgcagctccaagtcaatatgtttctctcttgctgacacacatcacaccaacaggcttgaaatattkaaatacaatagtcccttcaagaaatcattaatttttctatcactcttagaagtgataatttgatggaaatggatttagttgaaatagctgagctgactggagtggatactttaaagtgcccagacttcagagaagtcagcctaggacacagtgagggtccactgaggaccagaacccagagccctgggggcagcagcactgctacagcctgctcacctccagtgccaccccacccacttcagtggggaagacgcatgctccgaaggaaaacgtttaactatcaaggagaagaaatgaaacagggacgaaccacctcattactggc

SEQ ID NO: 750685 - DNA, 611 bp, Homo sapiens
agatcccccgtgaatgcctgaaactggatagtaccaagtctgattataattactggaaacacatttctgttcctgtcttctatccacaaatttaatgccttttccatcttaactaagcacttatcatggaccgtggctataatttttgcagtttgaagtgcaacarcaagactagcatagattccttcctcaaaatgttatggtagaagattcatttttagcatagatgttatcaatctcagcatattaatgtttttttttctttcctaattaggtcaagaactttcaccttttcaattaaaggaagcattttacaacttcttttgggaatatctgagttgttagcaccactactctggggctattactaagtagaataagggttacatgaacacaagcactgtgacaggtggcagttggtctgataaccgagaaggctaccaagtgactaatgaatgggtaacatctacagaatggatacattgcacaaagggaggactcctgtcccgggtgggatgaagcagggcagcattagatttcatcacattgctcagaatggcatccaatttaaaactcattaatcgtttatttctggaatttgtcattgaata

SEQ ID NO: 750686 - DNA, 616 bp, Homo sapiens
taatagatgactcttatgccatttaaaaaatcagtaagtacttgtttggttagtaaaactcaaatgctcagttatatatttgagcgtgttaatgtatatttcattttttttaacgaacttctttgaatccagagtgaatgacttaaaaaagacctcctgaaggaataccagcaccttgaacaaccccgtaagagaggacagaaccctacttgtgtggagtatggaaaggaagctcccctcagttttgtctgtgaaagtaaggagcgagtgttaagatggggtgggatgtgtggtggaatccatcaactactcttaccaggtttatctactttctctggccccttagaatttctggggtaatttattttcagaatataattcagaatgcagattttttttccctaagaaaacagtgacaatctgtccatacktccataagagttttacactgcttccttaatttgacatcaaaatttgcctgtgtctttacgaatggtgagggctgtaggaacactggcagacactagtatgaattttggctgggtttctctaggtttagatctcaatgtggttgtatgaaatccacaagcttagagatgggcttgagtgatttaga

SEQ ID NO: 750687 - DNA, 609 bp, Homo sapiens
attccgaggctcaattttcttagttgttaaatggggaaactccccacataggattatttggaatgcagcacatggtagttcagtaagtgttaactcttctcccctgttcttgtggagcttttcctacctgccatcaaatcctggttaggtcccatctggaggagagaagtgattactttgtaaagaaagcctctttggggctgttgtgtttaagtgtgaygttgaatgcccattttagcatgaggggactagtgaggcatgagaggattgtgaagcagagtaggcttctagcttctctgaaattggctgtctaaactttgtattaatatttctaatgttatgaatagtgagcaatctccctgtttctttgctatgcctgtgtttaaattacttacaattatagtcttgatttgaggaatctctgggtattttctgcccctaagttaacattaaagaaatggtcttcctggctctgccagtatttatggcttctccggacctcttttcttcatctgtaaaatgagggggctgggttaactattaatatttgtaattctttaagctttaaaattttactgttctcaggagttgggtgttctgttgttcatt

SEQ ID NO: 750688 - DNA, 588 bp, Homo sapiens
atcacacactggggcctgtcagtgggtaggggtctaagggagggatagcattaggagaaatacctaatgtagatgacgggttgatgggtgcagcaaaccaccatggcacatgtatacctgtgtaacaaatctgcacattctgcacatgtatcccagaacttagactacaataaaaacaattgtcatagtccatctgagctgctataacaaaatatcatagactaggaggyttataaacaacaaacatttatttctcacagttctggaagctgggaactataagagcaaggctccaacagatttagtgtctggtgagggccttttttctggatgatacgagtgccttctggctgagtcctcagacagtggagggagttaggagtttctttccggtctctttcataatggcacaaataccattcatgagggctctgtcctaattacctaatcgcctcccaaagcccccacctcctaatcccatcaacttggggattaggatttcaacctataaatgttgggggacacaaacattcagaccatagcaaaaataatagtctgaaaagaattagcataaatcaatatttatag

SEQ ID NO: 750689 - DNA, 594 bp, Homo sapiens
aatgaaattattttcattataaattacccaggttacagcaacaaaacatgaactaagacacattataaaaagaaaagctgaaggataaattagtagtcatctcacccaacaggcagtgctattcttggagcagagtatggaaaattaacagaaagccaaagaaacgtgaaagaaaccaaggttaaggttccaggtactgagtgtytagtacatgccagaaagcagactaggttctttatatctactatcttaaagccctagcagccttaccaaagttcctacaagaagaaagtggaagcttcctttggtggagcctatacgacagctttggtgaagcatatactcagcagggattctggaagaaggttgtggtcagctgagaagttcccatgagataagtgctatccaatagaacaaaaacgccttaaatatatgtacagttgacctttgaacaacacaggggttacagatgccaacgccgatgcagtgaaaaatctgagtataacttttgactcttcaaaacacaattactaatagcctactgttgaccagaagccttattagaaacaattaacacatactttgtatgttata

SEQ ID NO: 750690 - DNA, 551 bp, Homo sapiens
caactccgagacttcatagattgacccagagggacctggacaggtatgactgagctcagctttgtacaggcatgactgtttacatgctcacagcctccagggcttctgcctttcggtgcttccatggcttacagcattcttgtcctacatacctctgctcagaaaccacctcctttatacagtgttctcatacttttacaaagggttaaaaaacagcaggactcatttccacctcctgggtgttgaatgtcttattcatgtcacaggaggcatgtggttacaagaggacatgtttgttaattaaatgggagtgtgtataatcacccttattcacaagggtgatttttaaaaatatgggtgtgtgtgtgtgtgtgtgaggtttcttcacagcaaatgtttgcaaagctyttggagatccatggaaagagattgcttggccaaccccaagaattattagaaatacaggctttgctgttgttggctctactctagaagactcttatcatataacaagtgcttgcgtttataaggggcactgtacaggaagtcta

SEQ ID NO: 750691 - DNA, 621 bp, Homo sapiens
gtgcaatggaataacaaaagaattgaaggcattgggctttgcaatatcaggtattgcatgttgtcattacaggaagtcattgtgccatcttggtttccccttaataacatatggtggtttatcttgaaacttcaaaagtaaacatagcgtaagcacctataataaattattgccaaaaaaaatcacatgcagaattatttttgctatgtgaatttagtggagaatccaatccagtaagactttttgcacatttgaatggtgaaacaagatgatttggctcctctagtagctttgttgcatgcacagttgaccatttttgtttgtagctccttgtaataagatatttaacacagggctttatattgggacatagtgattttataaatgggtgggagaaaacactgaatttgacagaactaacttctagattatttcaatgtaaaattttcatgcttaaaatttttaagtgttagrtgtttaaaataacttactcaaaagtaattcttagtaaaatgaaaatcagtgaaaagcactcagttttttaaaagcaagaatgattttattggtttcaaagttaaacttactatttgaatcaaatttttataaaatccatttattttt

SEQ ID NO: 750692 - DNA, 545 bp, Homo sapiens
gtctataggagttcagcacaacaccaggcaacaaaatggcttgagtctgggctatcagccccttctctttaccgccttccaacattgcttggccagttagtgagagagcacctggtctttgcttttgcctgtacttgaggcccttctaaccctcactttgaatgtttaagaattacattttgaaaactacctgaaccaggtaatcaaagtaaataggctttccaagagtcaaattgtttggatgttaattgttaactcaatgataagcctttctagcagcctttacagaaatttacttatccagactttacattaagttaaatagtaaggatttagggatctaatcaaagtctccaaatgcatgagcaaggcctttggttttcaaatgcagtttatactttgttrcagtgaatttgggatgagaaggtgagtggcattctctctcagaaaggtgagttatttttctgataggtggtttcacttctctgccagggaagtaactgagaaaccagactggaacttgtatctgcaacctggtatggagt

SEQ ID NO: 750693 - DNA, 631 bp, Homo sapiens
ccctcgaaggtcagcctacgtcccactcttttggctctcccagtgcttttgcaaatgcctaattctctgtattaaatcccattctccttcaaatgcctagagttatttctaaaaatttaaataatataataaaaattcatcctggaatatggaactttccctacaaatggagaatatagattttattcaagcatcccttcgttatttatggttgcatttctcagagtgcagctatatcaggattaactgagtactagggaaaatgcattttcccacccctattgaattataatttccagagaggaactaaacatacgcatttcaacacctcagggattctcatgtaccctaaaatrtgagaatccctggtttataataattgtgcaagtgttagacttttaaaaacttaataaatagaaactgtacatgttacattttctgacccacacaattaagctagatattataacaaagtattacatcataagaaaccagtaactgaaaaatttatgtatcctactcactaaattgtctcaaagaggaaagcagaataaaataatgagttaatcagaaaataatatctattgggtcattacataacacgaggtaatgaatgcagtcaaagatgctt

SEQ ID NO: 750694 - DNA, 601 bp, Homo sapiens
aaaattatacatagaactcttaaaactcaacaataaaaaaacaaagaaccaagaggaaaaattgggaccaagatcttaacagacattgcaccaaagaagatatacaggtggcaagtaagcatattaacgtgtgctccccatcacatattagagaaatgctaattaaaacaagttaccactataccatggcccatatttgtaacatggataaaaccaaatgctggtgaagatgtggagcaacagaagccctcattcttcgttggtgagaatacaaaatggtacaaccattctggaagacggtttggcagtttcttcaaaactaaacacactcttaccatatgatccagcagttgtgctccgtggtatttatgaaaatkatggcaaaacacttgtccccacaaaaatatagacacagatatctacagcagctttattcataattgtcaaaacttggaagcaaccgggatgccgaagtccttcagtaggtgaattcagtaggataaactaactgtggtacatcctgataaaggaatattattcaacactaaaaagaaatgtgctatcaagccatgagaagccatggaggaaacttaaatgcata

SEQ ID NO: 750695 - DNA, 601 bp, Homo sapiens
aaaattatacatagaactcttaaaactcaacaataaaaaaacaaagaaccaagaggaaaaattgggaccaagatcttaacagacattgcaccaaagaagatatacaggtggcaagtaagcatattaacgtgtgctccccatcacatattagagaaatgctaattaaaacaagttaccactataccatggcccatatttgtaacatggataaaaccaaatgctggtgaagatgtggagcaacagaagccctcattcttcgttggtgagaatacaaaatggtacaaccattctggaagacggtttggcagtttcttcaaaactaaacacactcttaccatatgatccagcagttgtgctccgtggtatttatgaaaatgatggsaaaacacttgtccccacaaaaatatagacacagatatctacagcagctttattcataattgtcaaaacttggaagcaaccgggatgccgaagtccttcagtaggtgaattcagtaggataaactaactgtggtacatcctgataaaggaatattattcaacactaaaaagaaatgtgctatcaagccatgagaagccatggaggaaacttaaatgcata

SEQ ID NO: 750696 - DNA, 654 bp, Homo sapiens
ttacttatccactactgccaaaaagaaacctcatcagagagactcaagaattttctctggagaatattgtgttgtaacttgactccattgagccccacacatagaacagaagacccttgaacaaactggtagccgggttgttaaatagtcactgttatctgygaacaatcacttattaagtagattttattttatatattattccacccccatcgtctggaataatatattgtttattttgacacaggacagtatggatgaatatctcatcacaacaaactttggaacgagttctttaaaaaaaattctaactcttccttgtgtctggggacatgcaggaaatgtacactttatctctgatgctcatgttaaccatgaaagggaggggcattgccctgattcgtaataggaaattgacattgagataaattaactagaccaacatccctcagccagaaaacagccaaattaggttagggccccatctgtgataaaagctgatatatttccactacctgatgccaccttccaaatgtgaccaggatacacttccctacaacaaattcatctgagcgaatcatagaattttaaaggtgttggagagtttaggggtcatctcatcatcctctctggtgaatcaaattgttctcaaac

SEQ ID NO: 750697 - DNA, 659 bp, Homo sapiens
ctagtcttaggatggatcccagcacaaggaagagtcacaaaataatgtattaaatggatacattaatgaatgtaaggtattgtaataatggcaagtcagagtatggtgagtgtcattattaaaaatgcctaatagtcaggagatcaagaccatcctggctaacaccatgaaaccccgtctctactaaaaatacaaaaaattatccaggcatggtggtgggcacctgtagtcccagctacttgggaggctgaggaaggagaatggygtgagcctgggaggcgcagcttgcagtgagccgagatcactccactgcactccagcctgggcgacagagcaagactccatctcaaaaaaaaaaaaaaaaagtgtctaataggagatgaattttgagcaaaactttaaggaatgtgattgacatcaattgagaaatgtgttccaaagcaggggactatattttattaatactcaggatgagaatgggcttatttcttgagatagataacataacacaatatacgatttgcagttcaatatagtgtgtactctatttgtttctagacttgaaactaatgagtgtttaactatcttaaatttacacagagaaacatgttgtgtctgtaaatttattactataaaatggtggccttttcctgtgcatt

SEQ ID NO: 750698 - DNA, 650 bp, Homo sapiens
gatcaccattgttattggctttagaattattagcttctgtacctggatctgaccttaattttaaccacaaatgtgggaatggttttgacaaggcatacagttttggcaagtcacctcacttgggtactaattacttctgggtacccagttactcctgggtcctaattttatctttaaatgcttgttatgttacttattactttcatatgagaattttgataatatgttgtattaaaaaattattagttttatagtgatcaatcaatgaggaaattctctgaaagtgatgtttctttacaagaaaagcacccaggctggaaacaatataaacattgtaaaaatatgtgaatcaacactgtcaattcatattatttttcttagtatagttttagtttactgaattcatatgcttgctaagagctagaagctttatatatattcccactttatatgacartataagaagatcaaactattatatcccacaggggaaatattttaaatctttcacaattgctggttttccccttaacacaatttcttgattataacatttaagctattatactgctatctatctatctatctactaaattttatctatctatttatctatccatttctatagctagactataatctcttcaaga

SEQ ID NO: 750699 - DNA, 563 bp, Homo sapiens
cagtgatattagaggttgtggctcagtatgtgtataaagtatttcttcttcttacctttttgcaattgccctatatcaggtctccatccagcagcggattggattagtgattctccacaattgccctcaactatgcagaaataccaagctgagggaagtgcagtttcttcttgacatagtcgatacatataatgttgttatatttttatattgaygtgatgacttagtataaattatacttcatttgtagtttttaatttcatttctgattccactatgagaatgaggaaaaattgctaagctatattaaaattctgttgttcaccattttttatttctgttcctacatagaattcaccattgaaatccaattaacacaagtctttaataaactgtgatcactgtagtgcccgtcaccttgtttcttaaaactaatcttctaattaaactatcaactaaaatagacaacataaaagacaataaattatttccattgaattataaaagattatattgaataactatatgtttttcctctgggatctattttttcacttgttaat

SEQ ID NO: 750700 - DNA, 564 bp, Homo sapiens
aagaggatccagtccagagagcagttgcaacagtgtgcacaatttttattaaaccgaaataaaagttcttgggctatggaagtcacctaaattcacttctcttttcctatgaactttcactttttttccttccaactctagttagaagctgwcggctgacacgcccttcctttgtgcattttatcctgggacaaaatgagaagacatccttcagttcccgtaagtactattcttttagtaggaaatcaaacacaccccctaactggagtactatttattctattccatctgtttcacataagagcagtaaagtgattggaggtgaaatgaaaagaaagaaaatggccagacatggtgcacaaataactttcaaagactcataaattgcacatcttgaagatctttatgcctgagaatactgggcatctatgattcacaaaacactttacaaactaatattcttggcccccattttgtaactggcaaaaaaaggaggtaggcaataataagaacattattcagagtcatggaggaagtcacgaagtgcgccagatacagagccag

SEQ ID NO: 750701 - DNA, 564 bp, Homo sapiens
aagaggatccagtccagagagcagttgcaacagtgtgcacaatttttattaaaccgaaataaaagttcttgggctatggaagtcacctaaattcacttctcttttcctatgaactttcactttttttccttccaactctagttagaagctgtcrgctgacacgcccttcctttgtgcattttatcctgggacaaaatgagaagacatccttcagttcccgtaagtactattcttttagtaggaaatcaaacacaccccctaactggagtactatttattctattccatctgtttcacataagagcagtaaagtgattggaggtgaaatgaaaagaaagaaaatggccagacatggtgcacaaataactttcaaagactcataaattgcacatcttgaagatctttatgcctgagaatactgggcatctatgattcacaaaacactttacaaactaatattcttggcccccattttgtaactggcaaaaaaaggaggtaggcaataataagaacattattcagagtcatggaggaagtcacgaagtgcgccagatacagagccag

SEQ ID NO: 750702 - DNA, 543 bp, Homo sapiens
atgaagttcaaggctgtagttaagtggtaacagaaaaatacattctgaattggcctgagccaaaggctaaaggctggcttctagggtgggctcgattgggagacagaagtgattaactgaacaaggagatccaagtctcaagaatgacaccaggctaaaagcacaagtgtgacccatcgaaccttaaggtactttactttagataacagcacatacatttctttgcttcatttttctgtgtataatctgcataatacttgggtgatatgttttaagaaatacagaagaatagttaatttctggctgctggcctaatatttgctttgagccaagaccagaatatctatggtcctcctgtctgttagttttcctgggtcatttttgtcrctgtctgatcctttccaccagcttggcctttgcttctacctaggatgctggtgttaattaccttttccccacatctgtttactcactctgagttcctagatggttctaaatagcttctctttcaaagagctcctcccacacctgacctgctgtgag

SEQ ID NO: 750703 - DNA, 523 bp, Homo sapiens
tctcaacagccatttaaaagggaagctgcatatccaatttctaatgtgctccgtaagaggtatcctctctgggtgaatgtaacaacctgagttctcagcctttcaacaaatcaaatgagaatcttaaacagatctccctgcaatgaagcactgcttcccatttctaagtaaccagttatttgtcaaacactaacatttgcaatattttgtccaccaaaaggaattttcttccagaaacatattttaaaaakctacagattgtaagactgagactgatttgaaagtgaacacatattttcaaagcgagacgaggctgaaagaaaatgatttaccccagaatccattgaatccacagtgaatcatgtagtaccttgtgtcagttttcccattgttcttcctttgtttgttcagtacctaccaagtgccttctgggcattagggattccttttgaaactactggtgtaaaaataataatagcaatataaaaagctaatatttgttgggttcttattatgtgctagg

SEQ ID NO: 750704 - DNA, 450 bp, Homo sapiens
aggtgggccaaagccctcagtgtctccagcagcctgcctatagcctactccccacccaggcctagcaacactccagaggcagctctccacccaggaggggccggggtgcagtgtgctgggacagctctggcctgggtgccagttcgggctctgccgctgactggccccaggatgccgggcacatcacctaaaccctctgagcttcggtttcagactaggaaactgaaagggacgcataggtgtgaaggcacsttgccagggggctggagggcttccagggcaggtactacgctcctcccccacggaaaaaccaccagatgggtcctcatttctagggctggcccacaccatgcctgtccctgtgagaaagacgttactgcacgctcactgtcactcattcactgcagatctgagcccttcctgtatgccagggacttcatcatgatcctg

SEQ ID NO: 750705 - DNA, 468 bp, Homo sapiens
gaaaaaattcctccctggctgcccctgggtgatgtcagaggagctggaaagaagaaatgagcttctggaggtgggataaatgctcttttcttttgcagaaggaaaaaaaaaggtcacgttgttccatatttatttaaatatgaaatttatttatagagyaaaaagagttggtgttgacttccagcacccggccgggaagtggtttggccttgtttttgtctcctcagagcaccctgtcccctggtgacctaatgtgatttttcagagttggaggctagaccctgtccccaggctttcagacctccctggtcccacccagtctctggagcccatccatccccgcctggagaatggcaggttggggctcaagcttggcactgggctcctctgtcactcagtcctcatctgcaaaatggaggcgcgcacatctgcctcatgccgccctcgcagataaaaagcagtcaaata

SEQ ID NO: 750706 - DNA, 568 bp, Homo sapiens
ctatggaaatgcagcttcatgacaaaaaccttgctttctactatctgccatctctcagaaacttttaaaaagacatgtgaaatcactctatttcctccaaataaactgaattatcaatgttaatgggagacagggataaggtraaataaagctcaagtaattaaactattttattgtaaatattcatattacctccgagctaatttttactagaggtgctggcaaattcaaaacaaaataaaaattagtttcagattacttcttactcactagctaggtgacttcctaaccaatcaacttactcattctcacatcaaattcagaattcaagcttgtgtctcagcaaaattacaaatttaatggacctctagaatgctttaaatatagtggaaccacaaatgttacatccacatatgccaagagtttattttaaggccttcatcacttaatgatgaagtcattggtttgactctcagacaactgataggataataaatatgtagttaacattagttcaattcacacctcatctgaaagatcttttgtttcactcccattttagaagtcc

SEQ ID NO: 750707 - DNA, 627 bp, Homo sapiens
aaacacatggaaagatgctaaatataattattaattagaaaagcataaatgaaaaccacaatgagataccacttcacacccataagaatggctaaaatcacaaacaataacaagcattggtcaggatgtgaagaagttggaacctcatacattatgcgtaggaatgtaaaatggtgcaaacaccttgaaaaataacttggcagtacctcaaagttaaacacagagttatcatatgacccrgccattccactatcatatctcatatacctaagagaaatgaaaacatatgtccacacaaaatgttcttagccacattactcataatcaccccaaagggaaaacaacccaaatgtccatcaactgacgaaatggataaacaaaatataggacagccacacaatagaatacgattcagcaaataaaaaggaatgaagtactaatacatattacaacatgaatgaccagagtagggaatggatccactcacctcccaactccaagcatgaaggtagaaacttttccatttcttattcttcattctgtaaatattttttgagcacccactatgtgccagttgccctcctcaacagtgagcagaaaatattatgctaagtaaaataaaacagt

SEQ ID NO: 750708 - DNA, 628 bp, Homo sapiens
tacattgttttgcaataaagacacttagtgtgtaatttcatagattgtttggcttttctgtattctctcaattttgttatgtagggtttttgtttttcttctgttcctaaagagtttgtaattttcccatttgtgctttttaatacagattcaaagcatctttaaatttccaatagtatatcaatcagggtaaatgtttgttgttaattttatccttattgtattttgatggatgatgtggtctgtatgacttctgccttttaaaatgtgttgacctaagcctggacatcaaaatgagaccccttctctaaggaatttaaaaaatagctgggtgtactggcacgtgcctgtagtctcacctacacaggaggctgaggcgggaggatcacttgagcccaggaggctgagactgcagtgagctgtgactgtgcctctcygctccaacctgggcgacagagtgagaccctgtctccaaaataaaaataaaaataaaagtgttgacctatagtttgtgatctagttaagtttcgagaatgttctatagttgtatggaaaacatgttaatatgtattctccgtttggaggtgctaagatattcataaagatgttcctgtgtgtggttataata

SEQ ID NO: 750709 - DNA, 598 bp, Homo sapiens
tattattaactgtagtcaccctacagtgctatagaacactataacttattcctcctatttagccataactttatatccattaatcagactctccttgttctcccttcccctctacccttcatattctctaataaccacaatgtctcttttctaattcagaactcaacttttttagctcccacatatraatgagacttgggggaatgttgaggagaaataattgcattttgcaatgtgagaaggacatgaaatttgggagggaccaggggaagaataatatggtttggatttgtgtccctgcccaaatatcatgtcaaattgtaatctccaatgttggaggaggggtctggtggaaggtaattaggtcatggatgtaaacttctcccttgctattctcataatagtgagttctcatgagatctggttgtttaaaagtgtgtaacacctctcccttctctcttttcctcctgctccagttatgtaaaatgtgcctccttcctttttgccttctgccatgattctaagtttcctaaggccttcctagccatgcttcctgtacagtctgtgaaaccatgagtcaattagcctctttttgtat

SEQ ID NO: 750710 - DNA, 511 bp, Homo sapiens
tgagggtcattatgaaagcagccgagaattttttttttaagttcacaatgtaactaaagtatacagtcaataactccagatctgagccttaaatcctaaaaccctgatatggccctatggcttaacccaaattccagagaccatgtagccagttccctaatatagacaacattctagcaactgaggtgaaacgggtgtgaacaggagctgcagctatttaraaacaaaatctaagtgaggctctagtacataatataggtgaaatatatactgtggctcagagtgggattgcagcagatattctgacaaatagatatgttaccagcttaacattcctaaattggaagaagctccgttcttaccaccaccaactccaagaacaatttttaaggcaatttcatgtggtatttttttatagttaaatatttttaaattgggggccaggttttgcataaaagaaaatgtgcttaaactgtactccatctcaaccatctttaaactgaaatgagtc

SEQ ID NO: 750711 - DNA, 575 bp, Homo sapiens
tagacttgtcatcacatatcccctccgtactactctcaccaaggtcactgataacttctctattgttaaatcagacaactttccatctgtattttgcttggcttctaggcagcaattaattctatcgacctctcccttcttccaacacttatttaccttgtcttcatgatactacactgtattgatcagggttttgaattgcaaacaacagaatccactctgacgttttaagcagaaaaggaatatgttgaaggacgttaggtagctcacaatgcatgtgggaggactggaagacaggttaagatgatattcagccamgaaaatacctattacatcttggtacaaatcccactacctctaccttttggtatcaacaccacaactcacataaatgttgtgaacgttcactgatgccatccaagactggactccagaagtgaatgccatggcgaccatgctaaatgctgatatgccttctctattatgcttgctaaattttgcaacctgcaaggttataaagttatcttctggattgaatttttgcatgagtgctcccatttggtagtaccaggtca

SEQ ID NO: 750712 - DNA, 621 bp, Homo sapiens
aatataggtgtgttcaaaaggtgatgactgcctaccgttttgacatttgtctctccaacactcctctagttttgctgctacctctctgagcaatttttctccacctgctttctttacttgtcacttaaatgtccaagtcccccaggtatccattttaattgttttctgctcattctacatcctctacctgtgtgatactgtctaacaccatggctttaattacattctttgtgcctatgactctcaaatcttgatctctagcccagtgctgtttcctgagtaagctctagacccrcatatctcactgcctctgggacatttttatctggatgtgtcataagcatctcaaattcaacctgtttaaaactatgcttctctgtagctcaattgcagtcctccagttccctacactatggacccacccagttgtttagttaaaaaagaaggatattatctttgagagcatccctccctaatcttcagacatccagtcagtgccagagtgcaagcaatattagatcccatgtattttttttaatctgcctcactcctttcatgttctgcagtcatagttacaagaactgaaactagtatcaagtgagcttcctcctagcttccagt

SEQ ID NO: 750713 - DNA, 659 bp, Homo sapiens
agacaatctaaatcgtctatagctattaaagaagttaaatcaataataatattctaaaaaagaaatgactcatctgtcatgaacctaccatgacagatgggttcactggtgaattctacaaaatatttaagaaggaaattacatcaattttctgcaatctcttcctaaggagagaaacagagggaatactctttctatgagaccagcattaccctaagacaaaaatcacatagacattacaagaaaggaaaactgaagaccaatacctctcatgaatttataaatgcaaaactcctcaayaaaatattagcaaattgaatccaataatttaaaaaaagaaatatacaatatgaccaattggaatttatcccatgtatgcaaggctgatttaacatttgaaaaccaattaatgtaattcatcacatcaaaaagcaaaagaaaaaaaatcacataatcatattaataggtgcagaaaaagcatttgataaaaatctaacccccattcattataaaaattctcagcaaactaggaatagagtgcgaatttcctcagcttggtaaaaaatagctacagaaacctatatctaacattatacttaatggtgactaagattgggaataaggcaagcatgtcctctttcatcagtgcttttcaacat

SEQ ID NO: 750714 - DNA, 581 bp, Homo sapiens
agcttttctttgagcctttgattccatttttcaccatttgcatggcagttctgccctttctttttcacttactatggaccaacaatatattggcactgcctcctgtgtatttgcccaagatcacccatatgatgggaaggtgctcacatattgataaattaacctttagtcagctctatattccagtaaaccttgatccagagccatcaaaaagtccaatatgtattctgttggttcctggtttcctaggtcatacaactstttcggttcctagtccctttccacccttcacaggcccagcatatcctccatcaggttatgttatggtgtgtccctaataactggtgagcagccaagagtggaattgggagtaaattctaaaggaggggcaaaggggagggaatgtgttgtcctgcaaagcagaggactttgtgttgtcttcaaacaagggggagtgctatcctttaatagggaaaagtgggttacttttgcatatgccaagggtctaagaggacctgggatttcaaggttctttagtgcactgacccagatatccccatccaggtcctagagtcccactt

SEQ ID NO: 750715 - DNA, 581 bp, Homo sapiens
agcttttctttgagcctttgattccatttttcaccatttgcatggcagttctgccctttctttttcacttactatggaccaacaatatattggcactgcctcctgtgtatttgcccaagatcacccatatgatgggaaggtgctcacatattgataaattaacctttagtcagctctatattccagtaaaccttgatccagagccatcaaaaagtccaatatgtattctgttggttcctggtttcctaggtcatacaactgtttcggtwcctagtccctttccacccttcacaggcccagcatatcctccatcaggttatgttatggtgtgtccctaataactggtgagcagccaagagtggaattgggagtaaattctaaaggaggggcaaaggggagggaatgtgttgtcctgcaaagcagaggactttgtgttgtcttcaaacaagggggagtgctatcctttaatagggaaaagtgggttacttttgcatatgccaagggtctaagaggacctgggatttcaaggttctttagtgcactgacccagatatccccatccaggtcctagagtcccactt

SEQ ID NO: 750716 - DNA, 514 bp, Homo sapiens
ttccccctcccctcaaacacctgctctggggctcttaggccatctgaaatgaacactggaggtgtgccccacttgaggagaaggccagaggcctgcacagtccctgggagtgggctcaggctgttgggatagacagtctcagtgtggcctaggagttacacaggccctgaggccataggcacctccctgtagccccaagcattcctcaagggtggaggacccaaagctggagcaggacsactgcaggctcgtatcacgtgcagacccaggtaggcggccttgttagccctggtcaaggggccatgctgtcccctctttttctgcctcaggggatatctcagccaactgtccttagctagctctagcttcaccttctcctctgtccctccaatctaggggaccccatggcttcctgctgtttttacctctgggtttcctaggtgtcccttgtgggcttcttgttctcttccagcgccagtgtaaccaattccctgtgttaaacttactttgcttt

SEQ ID NO: 750717 - DNA, 580 bp, Homo sapiens
taattttcataactctgtgaaggctagcaggcaaactctccattttacagatggtacaactgaggctttctctaggtaactggtgctaggaggaaacctaaatttcttagctccagatgcaaagcactgttgtttctgtggatttggcttcttgtcacatttacactcttgaccgcctctgaattacagtaaagtttatcattgtgttaacagaaaatacttttttctttttgtgtccatagaaagggtttaacttacygttttttgagtgacattaagaattagcaacatagaaaatgatttcccacacccccactccctgccatattgcctttttcctgggattatgtctcaaactgaatagatttacgaagtgaggtggagaagggtgttttgtgggagttacaccctcctccaaatacttctaggttgtagtgttttcctctgaagtagatagctaatacttaacatgagaggaaaagatattaaatattataattagttttaaaaaatataaacagaaccaaatctttagctctttgcaaagtctatgttttctaataagcttattcccccatct

SEQ ID NO: 750718 - DNA, 657 bp, Homo sapiens
taagggtttttggaaattgtggtgataggagaaaaagagagatgagataattctatttgcagtggattattaggagagaaacaaaaatataaaatatgaatcctttgttttttttctaaaataatttgtgcccacagctcaatttgagcacatggatttggctggcctcccaaaccatgtgacttggaaattgatttaatctttcctcccaaatcatgtgacttggaaattgatttaatctttcatatgtgatcaaagaatctttatgcaccgcccccccsctcctccttcagtagcaaaatgatggactctttgcatccatagcctacctgtgtaggattgggagagatttcgaactaggagaagaaatggaggcagcagcagaaaggtgttatgctcagagtctgtagggatattgttggtccaaactcatgtgacttatttctgttgttttaggagtctgcaaactttctctttaaagggcctgagggccaatagtaaattaatttaggttttgcagctgacatacggtttctctgatttcttcttcttcttattcttttgcttgtttttttgcttttgtttttacaacactttataaatgtaaaaaccattcttagctcaaagatagttcaaaaacaggccatgggttcgatg

SEQ ID NO: 750719 - DNA, 559 bp, Homo sapiens
aatgccttgcagtgcttttcagtgaccagaaagttttattgatcacttctgctaaagaacagaaattataacaaactatctctcagaccacagtgcaatcaaactagaactcaggattaagaatctcactcaaagccgytcaactacatggaaactgaacaacctgctcctgaatgactactgggtacataacgaaatgaaggcagaaataaagatgttctttgaaaccaacgagaacaaagacaccacataccagaatctctgggacgcattcaaagcagtgtgtagagggcaatttatagcactaaatgcctacaagagaaagcaggaaagatccaaaattgacaccctaacatcacaattaaaagaactagaaaagcaagagcaaacacattcaaaagctagcagaaggcaagaaataactaaaatcagagcagaactgaaggaaatagagacacaaaaaacccttcaaaaaatcaatgaatccaggagctggttttttgaaaggatcaacaaaattgatagaccgctagcaagactaataaagaaaaaaagagag

SEQ ID NO: 750720 - DNA, 584 bp, Homo sapiens
gttattaatcccttgtcatatgaatagtttgaaaatgttttcttgcattctgtggtggtttctttactttgctgattgtgtccattgctgtgcagaagcctttaagcttgatatgatcccatttatctatgtttgcttyggttgcctgtgctttgagatcttgcccaaacagtctttgcctatatcaatgtcctggagcacttcttaatgtttctcctagtagttttatagtttaaggtattggatttaagtgtttaatccattttgatttgatttttgtgtatggtgagagatagggatttagtttcattcttctacatattgttatgcagtttctcattacatttagtgaagagactgtcctttccccattgtatgttcttggcacttttgttgaaaatgagttggctgtagtggagagaggcagagcaagatggaggaaaagaatgctccactgatcgttccctacacaaggacaacaatttatctacacgaaaaacaaaacaaacaaaacagacagacaaacaaaaaaacacctttagaagaaccagaagttagatgagccctcacagtagctagtttta

SEQ ID NO: 750721 - DNA, 373 bp, Homo sapiens
catcaagctaccaatgactttcttcacagaattggaaaaaactaaagttcgtatggaagcaaaaaagagcccgcattgcaaagtcaatcctaagccaaaagaacaaagctggaggcatcatgctacctgaattctgttccctttctattccagaattaaatagataggaacaataaactagtasaaattgctactattaagacacagttaagggaattattaaagataatgcagattccaaaaacttatgagtatattataaacaacttcatgccaaaacatttgaaaatttagatgagtatgaaaattttctagaaagtacaaattataagactgatttaggcaaaaataaaatgacctgcgtagtcttatg

SEQ ID NO: 750722 - DNA, 634 bp, Homo sapiens
tagaagctgggaatgacccctggcttacagtgagtgagaaaatcaagaccccagtcctataactacgagaaactgaaatctgccaacagcctgaataaagacaaaacatgcttccctagaataaacaggaaacatgcttccctagagcctccagaaaggaaggcagcctgccatcatcttgagagtatattgagacccatttcagacttctgatctacagaactgtaaggtaatawatttgtgttattgtaagctactaaaatgtgatgatttgttatgctagcaatggaaaatgaatacattgatgctttaattttctttccaagataagaagtaaattggagcatttaattttttatttacagtgttattgaattgtgattagaaaatgtgatctgtttgtttttgtttttaaattttatcaatatttcctatgggccctaatatgctaatgtagtttttatctcctgacaggaccctgattaacattctagtgtatgtaaatatctcaatttttatttgaaaataatacacattcaccatttatcgggtataaaatgcaacgttgctatgtggaactattaaataaaacttagttatttaaatcctttatatttttacttaatttttttca

SEQ ID NO: 750723 - DNA, 624 bp, Homo sapiens
agtgttaaaaactcctgggggacaagtctatgggggcacctctacacttctgtaggttgtacttccaagagtcccaccaggtaaagatcagagataaaatccacttgtgttcgtccaggtttgtggggaaagtaaccatttgaaataggctcagagctttctccaccaaaaaggcgtttatcaagcaagggaaaatacttcatcagagatgaacctaacttgaggaaagggaaattactcaactccagccccttctagccttcctatctcacataatggggagaaaggttgagaagcatttgtgaaagtcacagcccaaggacacaggccyactaaaaaactgagacttcataagattatagaatgtttgcactctctgcacttattatcaaatcaacttgactcctgtataatgacactaaattactgccaaaagaattgcaagactcagtctttacttaagaaagagtttctagggaagttcaaagacaacaagggagacaaaacaaaatcattgtaaaatattgaagcctctgacatgtacaactacagcaaacagtagatacaacccaacttctagacagataaacataaaacctcaaactaaaggcctatctacctcag

SEQ ID NO: 750724 - DNA, 624 bp, Homo sapiens
agtgttaaaaactcctgggggacaagtctatgggggcacctctacacttctgtaggttgtacttccaagagtcccaccaggtaaagatcagagataaaatccacttgtgttcgtccaggtttgtggggaaagtaaccatttgaaataggctcagagctttctccaccaaaaaggcgtttatcaagcaagggaaaatacttcatcagagatgaacctaacttgaggaaagggaaattactcaactccagccccttctagccttcctatctcacataatggggagaaaggttgagaagcatttgtgaaagtcacagcccaaggacacaggcctactaaaaaactgagacttcataagattatagaatgtttgcactctctgcacttattatcaaatcaacttgactcctgtataaygacactaaattactgccaaaagaattgcaagactcagtctttacttaagaaagagtttctagggaagttcaaagacaacaagggagacaaaacaaaatcattgtaaaatattgaagcctctgacatgtacaactacagcaaacagtagatacaacccaacttctagacagataaacataaaacctcaaactaaaggcctatctacctcag

SEQ ID NO: 750725 - DNA, 624 bp, Homo sapiens
agtgttaaaaactcctgggggacaagtctatgggggcacctctacacttctgtaggttgtacttccaagagtcccaccaggtaaagatcagagataaaatccacttgtgttcgtccaggtttgtggggaaagtaaccatttgaaataggctcagagctttctccaccaaaaaggcgtttatcaagcaagggaaaatacttcatcagagatgaacctaacttgaggaaagggaaattactcaactccagccccttctagccttcctatctcacataatggggagaaaggttgagaagcatttgtgaaagtcacagcccaaggacacaggcctactaaaaaactgagacttcataagattatagaatgtttgcactctctgcacttattatcaaatcaacttgactcctgtataatgacactaaattactgccaaaagaattgcaaractcagtctttacttaagaaagagtttctagggaagttcaaagacaacaagggagacaaaacaaaatcattgtaaaatattgaagcctctgacatgtacaactacagcaaacagtagatacaacccaacttctagacagataaacataaaacctcaaactaaaggcctatctacctcag

SEQ ID NO: 750726 - DNA, 577 bp, Homo sapiens
attctaaattagtgagtattatgttagctatgctacatactatcagttcctgattatacttttgggaattcttaactaggacattttattacctcctttaataatttattttgttttaatgtaaaacagttctttgaaggcaacagaagcctcctattttttttcttccttggtaaatattgtcatctctatacagtgcattaaaatatgcgcaaaggtatgtcatgctttttacttacctgagaaactcagtcattaacattataggatcartttccctgtgtttccttttagggtcatgtggttatgggtaacaatgcagtctcaccctatcagcaagtgattgaaaagaccaaaagcctttcctttagaagccagatgttggccatgaatattgagaagaaacttaatcagaatagcaggtcagaggtaagaaccacacatcttctattctgtctggggtttagcaaccatgtaattgttacatgaagtttcaaagtgtattgatgagttgtagctgattttgtttttctctttaaatatatgaacatttttaagaaattactaaacagaaaat

SEQ ID NO: 750727 - DNA, 649 bp, Homo sapiens
gccttgttttcacttaatcatctctttaaaggccctatcttcaaatacagttacattctgaggtactgaggtttagggctttgacacaggaattttggagggacacgattcagcccttaacagccacccaaaaattttgaacacctttcctgtattttggggagtttcccacttcaggagtgcatactttgagatggtagaatccagaaactgacattttgagcatatgccaggaccctgcaaactcctatgcttgttgtgtrcaacctcagaagatggcttgcacataaaccacaatgagaaggattccttgcagggtttttctgtgttcagcttgtccagcatatgacatagacccattgttttccatcattttgaaactactgtcacagagcaggtattgcagctgggctcactgggcagtggacagggtcactcaagtttctgtctctggaagttgcacagtcctgctcccaacagcactgaaatggatttctgctttgtgacagtagtttcaaatggattggtagatttaaatgctatctcactgtgattttaatttgcattccctgatttgtcaattagatttagcatcttttgttatatgtgtattttgtttctgctccagtgaaattcattttttttctat

SEQ ID NO: 750728 - DNA, 649 bp, Homo sapiens
gccttgttttcacttaatcatctctttaaaggccctatcttcaaatacagttacattctgaggtactgaggtttagggctttgacacaggaattttggagggacacgattcagcccttaacagccacccaaaaattttgaacacctttcctgtattttggggagtttcccacttcaggagtgcatactttgagatggtagaatccagaaactgacattttgagcatatgccaggaccctgcaaactcctatgcttgttgtgtacaacctcagaagatggcttgcacataaaccacaatgagaaggattccttgcagggtttttctgtgttcagcttgtccagcatatgacatagacccattgttttccatcattttgaaactactgtcacaragcaggtattgcagctgggctcactgggcagtggacagggtcactcaagtttctgtctctggaagttgcacagtcctgctcccaacagcactgaaatggatttctgctttgtgacagtagtttcaaatggattggtagatttaaatgctatctcactgtgattttaatttgcattccctgatttgtcaattagatttagcatcttttgttatatgtgtattttgtttctgctccagtgaaattcattttttttctat

SEQ ID NO: 750729 - DNA, 576 bp, Homo sapiens
gaggggctcctcacttctcagatggggcggccgccgggcggagggtctcctcacttctcagacggggcagctgggcagagacgctcctcacctcccagatggggtcgcggccaggcagaggcgctcctcacatcccagacggggcggcggggcagaggcgctccccacatctcagacgatgggcggccgggcagagacgctcctcacttcctagatgggatggcggccgggcagagaygctcctcactttccagactgggcagccaggcagaggggctcctcacatcccagacgatgggcggccgggcagaggctgcaatctcagcactttgggaggccaaggctggcggctgggaggtggaggttgtagcgagccgagatcacgccactgcactccagcctgggcaccattgagcactgagtgaacgagactccgtctgcaatcccggcacctcgggaggccgaggctggcggatcactcgcggttaggagctggagaccagcccggccaacacagcgaaaccccgtctccaccaaaaaatacgaaaaccagtcaggcgtggcggcgcgcgcctg

SEQ ID NO: 750730 - DNA, 582 bp, Homo sapiens
aatacagtagaacaattatttaaagtatacgagaagatgtgtgtaggttatatgtaaatactacaccattttatataaaggatttgagagcatcttcagattttggtatttgagggggtcctgaaaacaagctccctctcttgcccccatacagaaggacaacagtattagagtcactgtccttcctatctttgaaaaagttgagggctgggcatggtcagtcacacctgtaatcccagcaatttgggaggctgaggcaggaggatcccctgagcccgggagttcgagatcagcctgggcaacacagtgaggccctatctctacaaaaataatgatgatgaaaataataaataacttttttttwaaaaaagaaaaagtaggaacctgggctctgcccaccaatgaactgtgtgaccttggacaagctacttccagtctgcagccttagtctcttcttctgtaaaatagaaataacaacgatacgttcttcaagcgccttgctcagtgcctagaacatggcaagctctcggtatttgtggttgtggaagggttcaatatcaaagcgacacttcttagtcagtg

SEQ ID NO: 750731 - DNA, 605 bp, Homo sapiens
catggagacacctgaacaatttagtgattctgcaaggcagtgatgatttaagggttcctattgtctcatctgtgttcaaaacaaaacaatcatgaagtctttgtgccactgcctgactgtcatcttctccagatcttgtttacagagtaataatgacgttaaacaggtatcagaaaggggaaaaagtttctaggccaagagctgctggtggattctcttgagcagaataacaagttgcttcctgctccagggactgccattagcttgtgaagtctctaggtgccttgttatttcctagtgaagttgcagaatccagggttytttccaggtttgtcttattttatcagcacccacgtccaggcccaacagcttggtaggctggtgaggtccacacacggccaggtctgggagataagggaggaagcagtggcctggaacaccccacctgtctgctatcagcactagacagctcaggctgtcttggaaacgtgtactttgttaactgccttcctgtcctcttgtctttgaaagctgtctcgcgttccacagtcagcttgagggcaagagtgggatgctggggacaggtctttcccgtcctgtgggtg

SEQ ID NO: 750732 - DNA, 635 bp, Homo sapiens
ttacatattcaaacacgacaggagtgttaattaaaaaaggtaaaatctctgtgattcccctgttccccacctaatcctaatccatagagaggtattgattttttactgtttagcttaaatccttcaatgcacataaatgtgtttgtaaacacaaatatgcttattttttgttcttcaccaaaaatggggtcactttatgcctygtgtgctgtactctgttctttctctaagtatcccttggaccctttccccgccagtccacagaatcccccatctctctgccttgtgtttcttactgtatgtagatgtgctgttgtttattcaccatggctctcctgctttgtttgtttgtttgtttgtttttgagacagagtctcgctctgtcgcccaggctggagtacagtggcgcaatctcagctcactgtgacctccacttcctgggttcaagtgattctcctgcctcagcctcccgagtagctgtgattacaggcgcccaccaccacactcggctaatttttgtatttttagtaaagacagggtttcacgatataggtcaggctggtctcgaactcctgacctcaggtgatccagctacctaagcctcccaaagtgctgggattacaggcgtgagccac

SEQ ID NO: 750733 - DNA, 584 bp, Homo sapiens
taatttttatgaatcgagtagatgaaaagggtacctcagtttgcatttctcttgttggaagtgaagttgagcatctgttgatgtgtttattggtcattcccctcccccgccctgggtctggaacattgcaggctgctgtggcagggaaggagcatggtggaactgtctgtagttccaaaaggctgctgccaagggtcacgacaggggtytaccccactcacacctcattgtccaaacctagcagtaggtacaggttttgaggagcttaagactcatgattttggaaaaagaaagacaaaaacacaagacaggtacaatagtgaatattgttttaaaataagaaacacactaaatgacaaagggggggccttcttttgacatccaacaggaaacaataaattacaaatttaaaaagcattttctttctgtttttgttttggcctccactgcaatagatccttcgtagatttgaacttcagtatgatcagtaattctgaaaaagtatacaaagtctacctgacatttcggtgtacacaagtgcagttcagattttaggttgccactatattgtttcgagcaacgtc

SEQ ID NO: 750734 - DNA, 530 bp, Homo sapiens
catcagttaacaacctaatgtgcctcaaggaacaacattaggaaaaacaaggacaaaccaaacccaaagctagcagaagacaagaaataacaaatatcagagcagaactaaatgaaattgagattaaaaaaaagctgcctccaacaccccaacccacacacgcgcattcaccacacagtcatacaaaggataaatgaaacgaaaagttggttcttcgaaaagataaacaaattgattgttcattagctgcattaagcaaaaaaaaaaaaaaaaaaaaaagmcaagcttcaagtaagcacaactagaaatgacaaaggtgacattacaactgatgccatagaaatgcaaaacattatcattgactactatgagcatctctatgatatgggagggggtcagggaagtgctgggtagagaagggtgggatccctggtgagggctccaccctgaggcctgtgcccatggacctaagtgacaataggcacttctgttttcaagcccaaatgttgcattttctaagaccactctgg

SEQ ID NO: 750735 - DNA, 631 bp, Homo sapiens
tcttgagttgctatttttcatcacatttgggacaacatttatttgttcttttttcctttttctctttcattctttatggggggtgcatcagtttcacactcctttcgggtctccaattatataggtgttatatcactttatgttttctcatagatgcattgaagtttcgttcattttgttttccccccagccttttccctttttgtccttcagattgtgtagaattctgttgccctgtctttaagttattaatgttttcctctgccatatttaaactcctgaaaagcccacccagtgcatttttaatttcagatattttatttttattcctctttttcattcttttatttttttgttactactgagtttccttatccatccatttggtataccacattatacttattttttgttctttagattcttgaacctatttgtaagatcattttaaaattcttgtctastatttccaacatctgttatcaccaggtctatttctgttcatcattctgatagaggcaggaggcagacaaatgcctaggcagacaggggtgggtccctggtgaaatacaaccttcaagccagaaacagtcctgggtaaatccttggaccagattgagaacccaccttc

SEQ ID NO: 750736 - DNA, 590 bp, Homo sapiens
gttaatgctatggaatttgggaaaaaaatttacttagtctctcagagacagtatgttcatctgtattatgagattagtaaagcccagcaaagatctgtgctgtcaaagaaatacaaaatgtttgtgaatatgatctataaaccataagtttctaagcccatagaaggcattaatatgattattttttacaaaatataaaccacagatgttgagagataattacgaatgaattccttatatttcattatgtattggagcatgccttttttctttattttcccttcaaaggaatttgtatagaaaacagccttgaaatatagaaacaatgttttcttctggagcaaaacgcaggattccttaacattttggaagayagagataggagctccctttagggcaaagaatagctatgcttgcttttcattatgaaagatttgggccccctaagaccggggttcctctcttgaaacacaaaccctgattatagagatggccaccctcagtgagactgcagctctagtaactgggcaaaagaaatgctaatagtaggccgggagtggtggctcacacctgtaatcccagcactttgg

SEQ ID NO: 750737 - DNA, 597 bp, Homo sapiens
atgcttgcttttcattatgaaagatttgggccccctaagaccggggttcctctcttgaaacacaaaccctgattatagagatggccaccctcagtgagactgcagctctagtaactgggcaaaagaaatgctaatagtaggccgggagtggtggctcacacctgtaatcccagcactttgggggtccgaggcaggctgatcacgaggtcaagagatagayaccatcctggtcaacatggtgaaactctgtctctactaaaaatacaaaaattagccaggcgtggtggcaggccccagctactcaggaggctgaggcaggagaatcacttgaacctgggaggtggagtttgctgtgagctgagatcacgccaccgcactctagcctggtgagagagcaagactccgtctcaaaaaaaaaaaaaaaaaaaaaaaagaaaagaaagaaaattatttttctcggatctaggagtcttacgacttctaccagaacacataaaggctaaattgacatttcttgacagtaggcaagtaactttctggactaatttgggtttagtctagcatacagaaagctagagttcacatggccttgggtat

SEQ ID NO: 750738 - DNA, 597 bp, Homo sapiens
atgcttgcttttcattatgaaagatttgggccccctaagaccggggttcctctcttgaaacacaaaccctgattatagagatggccaccctcagtgagactgcagctctagtaactgggcaaaagaaatgctaatagtaggccgggagtggtggctcacacctgtaatcccagcactttgggggtccgaggcaggctgatcacgaggtcaagagatagacaccatcctggtcaacatggtgaaactcygtctctactaaaaatacaaaaattagccaggcgtggtggcaggccccagctactcaggaggctgaggcaggagaatcacttgaacctgggaggtggagtttgctgtgagctgagatcacgccaccgcactctagcctggtgagagagcaagactccgtctcaaaaaaaaaaaaaaaaaaaaaaaagaaaagaaagaaaattatttttctcggatctaggagtcttacgacttctaccagaacacataaaggctaaattgacatttcttgacagtaggcaagtaactttctggactaatttgggtttagtctagcatacagaaagctagagttcacatggccttgggtat

SEQ ID NO: 750739 - DNA, 597 bp, Homo sapiens
atgcttgcttttcattatgaaagatttgggccccctaagaccggggttcctctcttgaaacacaaaccctgattatagagatggccaccctcagtgagactgcagctctagtaactgggcaaaagaaatgctaatagtaggccgggagtggtggctcacacctgtaatcccagcactttgggggtccgaggcaggctgatcacgaggtcaagagatagacaccatcctggtcaacatggtgaaactctgtctctactaaaaatacaaaaattagccaggcgtggtggcaggccccagctactcaggaggctgaggcaggagaatcrcttgaacctgggaggtggagtttgctgtgagctgagatcacgccaccgcactctagcctggtgagagagcaagactccgtctcaaaaaaaaaaaaaaaaaaaaaaaagaaaagaaagaaaattatttttctcggatctaggagtcttacgacttctaccagaacacataaaggctaaattgacatttcttgacagtaggcaagtaactttctggactaatttgggtttagtctagcatacagaaagctagagttcacatggccttgggtat

SEQ ID NO: 750740 - DNA, 643 bp, Homo sapiens
aaataaacattcaagattctgattttggtatgttttgtgttgatttcctagccaacaatagatttaacgagatgcagtgaagtggacgctgtatttaaactcgaactctttaaaaaaatattccaagaaaattttgtctttatgaagtaaaagaaaattttaaccttcttgctactacataagttatgtaaattaaaatcagtacacccttcaaattagtacttatttttaaataaataaacaaatatgaagtgaaaataaagcagtcaatgaccttcaaattaattcacatttcyctagagactccaacatatctccacttacatatttttcattctggctggaaacaaaagagaaaaaaaaaagtactcatctaccctatctagttttacaaactaccagctcatatgattcttgttagagtttccaaatcaagaatgttgagatgtacttaattaattagtgagctcctttaaacacttcccttacagacaatttttcctcattttttactttacctaaaaggtctcaagacatttaaccaatacttggtgtagtcattctttacagtaaaagataagaaggcagtttcaatcctaggaatgtgaacacattacagatatatgcacatttcttcagctta

SEQ ID NO: 750741 - DNA, 643 bp, Homo sapiens
aaataaacattcaagattctgattttggtatgttttgtgttgatttcctagccaacaatagatttaacgagatgcagtgaagtggacgctgtatttaaactcgaactctttaaaaaaatattccaagaaaattttgtctttatgaagtaaaagaaaattttaaccttcttgctactacataagttatgtaaattaaaatcagtacacccttcaaattagtacttatttttaaataaataaacaaatatgaagtgaaaataaagcagtcaatgaccttcaaattaattcacatttccctagagactccaacatatctccacttacatatttttcattctggctggaaacaaaagagaaaaaaaaaagtactcatctaccctatctagttttacaaactaccagctcatatgattcttgttmgagtttccaaatcaagaatgttgagatgtacttaattaattagtgagctcctttaaacacttcccttacagacaatttttcctcattttttactttacctaaaaggtctcaagacatttaaccaatacttggtgtagtcattctttacagtaaaagataagaaggcagtttcaatcctaggaatgtgaacacattacagatatatgcacatttcttcagctta

SEQ ID NO: 750742 - DNA, 556 bp, Homo sapiens
catacacacatattttataccatcctgagcttcctaaaattcatgtttaaccaaaacatcagattgtgaatctgacaacagagggttttcatccataaacaaatgccaactgtctatgtgacatcagtgtacctcgctaatataatgagaaaataatcagtcaaaatgataagttattgaattttttcttgtgttttaaataaaagatggagaaaaattttcttaaytaaaaataagacaagatgccatgggatgaagtaagtcaccacctggagcaaatctaaagaatttgggaaaaaaatcgctagggaagaagccaaaaaaaagaaggcagggaaacctcaaacacaatgaaaagtaaaatgagtttgatggctttaaataaatgtaaaggaaatagtgggaggaaaaggaaaacttcaatagtggaagcataagactgtctcagaaagtgacagaacttaatcctatcaacatctcatttgcatatccatagtaaaaaataacaatggtatttttgtgaccaaaaatatatgcaaagcagtcattgttatag

SEQ ID NO: 750743 - DNA, 556 bp, Homo sapiens
catacacacatattttataccatcctgagcttcctaaaattcatgtttaaccaaaacatcagattgtgaatctgacaacagagggttttcatccataaacaaatgccaactgtctatgtgacatcagtgtacctcgctaatataatgagaaaataatcagtcaaaatgataagttattgaattttttcttgtgttttaaataaaagatggagaaaaattttcttaactaaaaataagacaagatgccatgsgatgaagtaagtcaccacctggagcaaatctaaagaatttgggaaaaaaatcgctagggaagaagccaaaaaaaagaaggcagggaaacctcaaacacaatgaaaagtaaaatgagtttgatggctttaaataaatgtaaaggaaatagtgggaggaaaaggaaaacttcaatagtggaagcataagactgtctcagaaagtgacagaacttaatcctatcaacatctcatttgcatatccatagtaaaaaataacaatggtatttttgtgaccaaaaatatatgcaaagcagtcattgttatag

SEQ ID NO: 750744 - DNA, 556 bp, Homo sapiens
catacacacatattttataccatcctgagcttcctaaaattcatgtttaaccaaaacatcagattgtgaatctgacaacagagggttttcatccataaacaaatgccaactgtctatgtgacatcagtgtacctcgctaatataatgagaaaataatcagtcaaaatgataagttattgaattttttcttgtgttttaaataaaagatggagaaaaattttcttaactaaaaataagacaagatgccatgggatgaagtaagtcaccacctggagcaaatctaaagaatttgggaaaaaaatcgctagggaagragccaaaaaaaagaaggcagggaaacctcaaacacaatgaaaagtaaaatgagtttgatggctttaaataaatgtaaaggaaatagtgggaggaaaaggaaaacttcaatagtggaagcataagactgtctcagaaagtgacagaacttaatcctatcaacatctcatttgcatatccatagtaaaaaataacaatggtatttttgtgaccaaaaatatatgcaaagcagtcattgttatag

SEQ ID NO: 750745 - DNA, 556 bp, Homo sapiens
catacacacatattttataccatcctgagcttcctaaaattcatgtttaaccaaaacatcagattgtgaatctgacaacagagggttttcatccataaacaaatgccaactgtctatgtgacatcagtgtacctcgctaatataatgagaaaataatcagtcaaaatgataagttattgaattttttcttgtgttttaaataaaagatggagaaaaattttcttaactaaaaataagacaagatgccatgggatgaagtaagtcaccacctggagcaaatctaaagaatttgggaaaaaaatcgctagggaagaagccaaaaaaaagaaggcagggaaacctcaaacacaatgaaaagtaaaatgagtttgatggctttaaataaatgtaaaggaaatagtgggaggaaaaggaaaacttcaatmgtggaagcataagactgtctcagaaagtgacagaacttaatcctatcaacatctcatttgcatatccatagtaaaaaataacaatggtatttttgtgaccaaaaatatatgcaaagcagtcattgttatag

SEQ ID NO: 750746 - DNA, 623 bp, Homo sapiens
aaaaaataacaatggtatttttgtgaccaaaaatatatgcaaagcagtcattgttatagttcagtagctatttttgaaatggaaattttcttacaatttgaaacagytcattcttcaaaacaccaaaaggcatcagcatctactttagactacagagcattttttcattgtgatatgctggatttaaccacggtattccctctagaggcaaaatttacccgtctgtaaaaaattgatagattttttttcttcttgtatttgagattgctataaacatctgaagcgactaattaaaaaaaaaactgcgtcagtgcaatgaagtgatacagctatgtcagtttgcttcttattgtcataaaaaaattttttgcaagccctgggaaaaaaaaatatatctcaagtggaaaagagaagtaatgttaccatcaataacacaagaaaatctcagattgtttattagttctgacctccttcattgatggctgtataaactcatatttctgtcattgattctgtgcttctattcagcactaacattttaataagaaaaaatgttaaatatcaaagtaatagatgagcattcctctaaaagccaatttcattaaataccatcggtattaatc

SEQ ID NO: 750747 - DNA, 594 bp, Homo sapiens
tgaggtacttctattttttcccgaactctaaatcatacaacatgctccacacaggcctgaagagactagatttaaagagaaaagggatgaattgactcactttacaaataggaaactcttgtcaaacaatcctctagttattcaaactgtatcacaaatcatttcaaatatccagaaatcaataaccgtaaacattttattctgatttctttacattgttcttttgcaawgtaaaagttatagagcccaaaggaataattttacccaatctctccttgagttttaatgataattctgaatattagtcaggcttatatgctccagaaacataagcaaattgttaatagagatgagtttgttaattaaaattaccagaggcagaagaatacctgtaacaatgagaaatatgatgaaactataaaaggcacatgaaattaaatactgtgcctattttggaatatatataatatgtatatactatatattatatattttataataatatatatttttataaattatgacttctataatttataaattatatggtaacataacatatcatttataaattatataatttataatatttta

SEQ ID NO: 750748 - DNA, 628 bp, Homo sapiens
ctctatggaatttcctcagctgactaagaaagattctttccaaaagaattgctgggcacggtggctaatgcctgtaatcctagcactttgggaggctgaggcaggaggatcacttgaggccaggagttcaagaccagcctggccaacatgacgaaacctcatctctattagaaatacaaaaaattagctgagtgtggtggcatgcayctgtagtcccagctactcaggaagctgaggcaggagaattgcttaaacacgggaggcagaggttgcagtgagttgagattgtgccactgcactccagcctgggtgatagagcaagactccatctcaaaaaataaaataaaataaaataaaataaaataaaataaaataaaataaaataaaataaaataaaataaaataaaataaaataataaaataaaataaaatagaaatgcaattgccttaaaactccctccctaggaatctcatgaaataaccaggaaagattaaccacaagagaagaaactagtagtcctcaccttgccctgacagacttttcatgtattcctccaagggcagctcagagagagtacctgagaggctttatctgaataataaaacaacctttgttcacagtaaagtt

SEQ ID NO: 750749 - DNA, 628 bp, Homo sapiens
ctctatggaatttcctcagctgactaagaaagattctttccaaaagaattgctgggcacggtggctaatgcctgtaatcctagcactttgggaggctgaggcaggaggatcacttgaggccaggagttcaagaccagcctggccaacatgacgaaacctcatctctattagaaatacaaaaaattagctgagtgtggtggcatgcacctgtagtcccagctactcaggargctgaggcaggagaattgcttaaacacgggaggcagaggttgcagtgagttgagattgtgccactgcactccagcctgggtgatagagcaagactccatctcaaaaaataaaataaaataaaataaaataaaataaaataaaataaaataaaataaaataaaataaaataaaataaaataaaataataaaataaaataaaatagaaatgcaattgccttaaaactccctccctaggaatctcatgaaataaccaggaaagattaaccacaagagaagaaactagtagtcctcaccttgccctgacagacttttcatgtattcctccaagggcagctcagagagagtacctgagaggctttatctgaataataaaacaacctttgttcacagtaaagtt

SEQ ID NO: 750750 - DNA, 628 bp, Homo sapiens
atctgtgtatatatcttttacagtaatccccacatccaccagagaacctaggttattggcagaatgaggtttgggaattttggtcctctggccagacactatcagttagtactctgattccaccatttttgaaattatatacaacaaattttaagtattgtttattttggagagttcaggttaaaggaaatgaagactattattcagtattatttctgtaattttgtaattttaaccataacataggtttcttatcaaaacgtatggaagccagaaagcagtgaagcaacaatattttctccaaaacraacaggacaaactttggcaggagtgacaaatctggcatgcaatggtggcttctatatcagaaatcaagccttttactttgtgagaggcaggagtttttagttctttgtcttccttttggctgccagaggaattgaacattgtgaattcattggcatagtcccaagaaactttacttggcaagcaagctattgattttggcgggggtgggatggtgtttatcagtcacccctactagcagagatgtgataacactgcagtcagagtagttgagttttaaaattttgacttgccaaccaacagaacattatttatgtggtaa

SEQ ID NO: 750751 - DNA, 628 bp, Homo sapiens
atctgtgtatatatcttttacagtaatccccacatccaccagagaacctaggttattggcagaatgaggtttgggaattttggtcctctggccagacactatcagttagtactctgattccaccatttttgaaattatatacaacaaattttaagtattgtttattttggagagttcaggttaaaggaaatgaagactattattcagtattatttctgtaattttgtaattttaaccataacataggtttcttatcaaaacgtatggaagccagaaagcagtgaagcaacaatattttctccaaaacaaacaggacaaactttggcaggagtgacaaatctggcatgcaatggtggcttctatatcagaaatcaagccttttactttgtgagaggcaggagtttttagttytttgtcttccttttggctgccagaggaattgaacattgtgaattcattggcatagtcccaagaaactttacttggcaagcaagctattgattttggcgggggtgggatggtgtttatcagtcacccctactagcagagatgtgataacactgcagtcagagtagttgagttttaaaattttgacttgccaaccaacagaacattatttatgtggtaa

SEQ ID NO: 750752 - DNA, 536 bp, Homo sapiens
  misc_feature 1, 2, 3, 4, 5, 6, 7, 8, 9, 10, 11, 12, 13, 14, 15, 16, 17,18: n = A,T,C or G
nnnnnnnnnnnnnnnnnnacagaattgtagccagacagccaacttccaagagcagaggtgtccgaggtggcaggaagcttaaggcccccatggggccccctctcacacgcatggccctgtcacaagggcagtcaattgcccatctcctgtttgctttatggggcgcacccagctgaggaggaatgatgggtagaagattcatgtggccctaaggttatgggcaaggaaggaagttctaatttgggactccagagtttgctcgtggcaactgaaaatatttcccgtgaaaggcaaaagaaaagctgaactgacagatgatcccttttyttcatggactctgcacccagtcaatgtcactgcctcctcctctgtgaggaagactcttggcagagctgccccatactatccttttgaaagaagactctgttaattaaaaacccctgtgcttccaggagacattttttaggcaaattattgattccaattcaactcgaaggaaatgttccctgcaatcttgggaggactccctgagatgg

SEQ ID NO: 750753 - DNA, 575 bp, Homo sapiens
tgaatgacccagtgcctgacctctctcctactcttccttccgcccctactgccctggcggcatggtttccattgttacttcaactcacagaactctagtctgcctaagacctccctccactcctgccattgcatcaccctcggtgctctcccaccctctctttgccagacttgtycttgtcatagctcaagtcccagcctaaatatcacctgggacctgggtgacttctcctcacaatttaaactatgtccctgtgattctgcctgcagcctgggactttcctccttagcttctagcactgctggtccttgggcatctgtttgtgtaactcttggtataacatttgtctctcttgggagaatgtagactctgtagggccggtgcttggatttgcctggcatctgctctgctcctctaatccttacttcacatgacaaagagaagatgctcgcttagcactgatggaatgaattaatgcctgaatgaatggctaataaaatttcataaaatgacataggatttagaaagattgaacccatgctatggaaaaaagtacacacttagcacgagtagtg

SEQ ID NO: 750754 - DNA, 595 bp, Homo sapiens
gctgatgttgtattgcaatatcccagcctttatctgggccacctaacacatgggactatgactacttcaatggttttagatcctgcctcgacctttttctttagcaaaagtcttaaagaaaacccaaatgattctaaaataattgagatgattcaaaggctccattccaagttagatgagcagrcatctggattagacttgaggattttccaagccccagtggcaaagagattgtgaatgaaaattttttaatgcaaatattactgttcattgggtggtatgtcagtaatgtgcactcagaaatgtgacaggagtgaatgtttgggggttatataaagctccaatcaaactgacttcagatttttggccctttatttctccaattgcattgttcttaatataaaactttatataaatgcaagaaatatctcagtgagtatttattccatgggtgaatataaatgcattattcttcatctgaactggtacccagaggccagtacaatactgacttcacatgagccgttcactactttctagtcatgttgtaaagaggtgatgaatagactttgatcttgcccaactgggaaggaat

SEQ ID NO: 750755 - DNA, 605 bp, Homo sapiens
agcatcattggacccaacctacctatttccatgggacagatcaatcattactgcttagtgagggtacactcacttccctaacagcaggatgcacttagccatctgcttggggttggaccctaatctgaacagtttctttcatataatcctttaattgccatgtgatatggaaagttcrtgctttaggaatgaattaatgagatgcattcaatactgcctggtatatactgatctaatctggatctgaattagagtatgtgtcatctatgcttagggttgaagtctacttaactttaggctaattatattatttctaataataagagtcaaaagagcttgtgttaaaggggggtttgtgacttgctttttctgtaaatatgcatgttacattcactttttttttttctttttgagacggagactcactctgtcacccagctgggagtgcagtggcacaatctcagctcactgcaacctccaccttccgagttcaagctattctccggcctcagcctcctgagtagctgggactacaggcacataccaccacacccggctaagtttttgtatatttagtagaaacagggtttcaccatgttgctcag

SEQ ID NO: 750756 - DNA, 632 bp, Homo sapiens
cagatgatagaattgctatatcttgattatagtagtaaatacacaactgtaaatatttctcaaaactcatagaagtctatggcaaaaggagccaattttatcacgagtaaattgaaaatgtaaataaaaatacagtaaaatataccataagcaataacagctaaaaagaaagaccaaaacatatgctgtttcaaagaggagaacttaaatacaaagacacagataagtggaaggtaaaaagatggtaaaagatgtaacatgctaattctaagtggaagaaagctggtttggctaaattaagatcagacaaagacaaaggatgtcaccagagataaagacggccatattctaagagtgaaaataagacagaaaataagataaccaagaagacataaaaattcyagatgtgtaagcacataataacaggatttcaaaataatgaaacaaaaatttacagactaaagggagagagacgtagatccacaattgtagttggagattttaacaaatctctcttgggattttatcaaacatttcagccataaataaattagaatacagaagatttcaacaacacaatgtcttgacctaattcacatttatagaatatttcaactaacaactaccaaata

SEQ ID NO: 750757 - DNA, 644 bp, Homo sapiens
cttagcatggatttcaatctgcttgttctaggtaccacaaccaaattttccaactattacagactttggttgcttgaggatttcatgtctatttggataaaacagcacaacttttagaagcaattgctttatcatggatgttagtgaaagagagagagagtcctaaatttaaggcaaaataagttgttaggaaaatacagtgacttctcaggaaggttatacaactacatctcagactcaaggacaagaccccagtttatccgatttttaatcgctggtgctcactgcagtatctgtcttcacatgtgttcacagggagcagaaacctgcataaatgaatacatttaataaaatatatttactttcatctaaaaacggcagggttgtaccttacagtttttgcttttaaaaatatggttaacgccagggaaagcaaacaaacttattgcttcagaggggagaagtgacatcacagasgacaatttataaaaagaaataaaacatacactaaaatgagatggaagatgtatgtcatgataccctaaaccattaatttgtcccattctttaaaaatcacagagttggtgatctggtgaaatccatcgctgtttactctctaccctctctaaattgatggcgatggc

SEQ ID NO: 750758 - DNA, 618 bp, Homo sapiens
aaacatgatctaactttgtgaatattccatatgaacatatatatacatatattctatatatatgtttgtgtgtatatatacacatatatatgtatatacctgtgtgtgtatatatatatatatagtgttgttgttaaagttttctataaatgttacttaggtaaagttggtttctatattcttacagattttctatgtattctactttttctgttcattaccaagagaggagtgttgcagtctccaactgtaattgtagatttgtttatttctctttcaatgtgtattcatttttggtctcatttatttgaggtttggtcattagatacatgcatatttaggattgttatgcctttttagtgaattgrctcctctgtcattttgtgatgtccctttttacacttgtagtattccttgttctgaagtacgctttgtctaatattaatatagctactgcaggttcattgtgactaacattttcgtggaatctttccccatcttttagctttaatcttttcagtatgcttacaattaatgtgtgttcttatagataggacgtaattgggtttcaccttttaatccagtatatcaatctaccttttaattggtacatttggg

SEQ ID NO: 750759 - DNA, 438 bp, Homo sapiens
ggaggaagcttagcaattactgagatctaaacaatgttgacaaataggcctaagttttggaaaagttgatcttgggactttggcttatgaagagactgctagtcctgcttctaacagtggaggtgactggagctaacagttcttttggatgtatactgggaattataatcytgcaataaacattctttccaatttagatgggagaaaggaggggactgtcttagttggttcaggtctctataacagaataccacagactgggtggcttaaacaacatttatttttcacagttctgtaggctggaaagtccaagatgacaaatttagtgtctatcaggggcctgcttcctagtttgcagatggccaccttttctctgtgtcctcacatggtggacaaagagggagctctggtctcttactctccttatcagggcactaa

SEQ ID NO: 750760 - DNA, 602 bp, Homo sapiens
atcagacttacctactactttatatcttttgacttacatcttccatttcctacccaccactgagaataaaacagtagccactgttttttattctccatttctgtatatctgacattttaaaaaattccacatacaagtaagattatacaatatttttttctgtgtctggcttattttacatagtataatgttgtacaggtccactcatgttgtaacaaatggcatgatctcctttttaaagkctgaataatattccattgtgggtataaatatcacaatgtctttatccattcattcattgacagacacctaggttgtttctatatctgtgctattgttaataatgctgcaataaatatggtggtacagataacttaaaatttttttaatttaaaaagccataggggtacaagtggtttttgttacatggatgagctgtatagtagtgaagtctgagattttagtgtacttgttacctaaatagtgtacattgtaccccaataggtaatttttcatctctcagggagtgcagatatctttacgaggtggtaatttcatttcctttgggtatatacacagaagataaattgctgggtcatata

SEQ ID NO: 750761 - DNA, 602 bp, Homo sapiens
atcagacttacctactactttatatcttttgacttacatcttccatttcctacccaccactgagaataaaacagtagccactgttttttattctccatttctgtatatctgacattttaaaaaattccacatacaagtaagattatacaatatttttttctgtgtctggcttattttacatagtataatgttgtacaggtccactcatgttgtaacaaatggcatgatctcctttttaaagtctgaataatattccattgtgggtataaatatcacaatgtctttatccattcattcattgacagacacctaggttgtttctatatctgtgctattgttaataatgctgcaataaatatggwggtacagataacttaaaatttttttaatttaaaaagccataggggtacaagtggtttttgttacatggatgagctgtatagtagtgaagtctgagattttagtgtacttgttacctaaatagtgtacattgtaccccaataggtaatttttcatctctcagggagtgcagatatctttacgaggtggtaatttcatttcctttgggtatatacacagaagataaattgctgggtcatata

SEQ ID NO: 750762 - DNA, 528 bp, Homo sapiens
tacagctttttctcattcatataacagatacatttctgtttgtgtacagcaaagggttagaaccctaataaacttatttatgatttcagaagtgtgctattttagaaatgcacttcatagaacttacttcactgttccatggtattttgctatagcagcctgaatgaactaagacaccrttgcagcaagaattgatatctctattgctttctcggaagcaatccagtctctgtgtccctctccagacaaccccaatccaagcttttggtggctgggttaacttagggaaaactgatttaacctatcttgtgtttattataagttagaggtgattttagaaaaaaaaaaaaaaagaactgagaaaactagaggctgtaaaaattatcaataaaagtgataagattaaaatatgacttcaaaatcagttatttaattgaattccagttatttttaatttttttaaaatttatttatttattttttactctactcctgtgacagattaaggatcctaatcattttttaaaa

SEQ ID NO: 750763 - DNA, 607 bp, Homo sapiens
caaaaaattccatcagctctccaggattggaatgggctgcaggttcaagaaacactagagctgtaactcattttcatcctaggtaaaatacttgtgaatgggaggagggaaattcaccatgaagattatccaaggcactcttcagttggtaatttgattttattacgtccatgcttcttcagtatcacagaattaattgagcagttttgttcataagagagcttgctgtgcctaggccacttctgttcakatctgtgaatgtggccttatttaaaaatgagggtctttgcagatataatgaagttaagaaggttattagagtgggcctgaatttaatatgactggtgtccttacaggaaaaggagaagagacatggggcacagtgagaacaccatgtgaagatggaggaagagatggcagtgatgcttcctctgctgtgagagctgcagttgttgaagcaaggaggggtgaaaaaaggcctggttggaggacagtggtttattctagaaagcatcaggggtaaggtgaattagttagctaggcaggggtcggggagaagaagaaagtatagagacaaaggggccagtcaggagagaagtagaaaggt

SEQ ID NO: 750764 - DNA, 589 bp, Homo sapiens
taaatgatctcttaatagttcctttaataatttgatttccaactctcttactgtctttctcactttctctgaatgattgatagtgtttagaggcccctctatgttatcaataactgatcagaatatttcatactgatacgaacatcaaatttctcttagtttagcytaagatgtaaggttttaaactttgcagttcaattgcattgtgtttctatgctcaaattaactcatagatttttttacttgaactgccaaaatataagaccctccttaatttatatttgagtgaaagagattttaaatccaattaaaatcaacccatcaaaaagtgggtgaaggatatgaacagacacttctcaaaagaagacatttatgtggcctacaaacatatgaaaaaaagctcatcatcactggtcattagaaaaatgcaaatcaaaaccacaatgggatgccatatcatgccagtcagaatggcgatcattaaaaagtcaggaaacaacagttgttggaaaggatgtggagaaataggaactcttttacactgttggtgggagtgtaagttagttcaaccattgtggaagacagtgtg

SEQ ID NO: 750765 - DNA, 629 bp, Homo sapiens
atatgttgtgcactgcttgggacacagcaaagtacaagtcacatcttatgccttccaaaacttcataatctagtattgaatctgcttgtttctaatgcgtttgctgttttcacattaaatctcctaccaagacaaaaaaaatagaaagactgtacaaaattaaaaggaaaactatttctgaaagaatcagagcactaacaaggcagtgcaagtttgaaagtccaagatttcagagagaagggaagtctaatgtggtgattacatttacatttggtaacacatttttccttgaggtatttgtaaattaaaaaaaaaaagaaaatatgctgaaaggctgctaaactgaagagaaaaccatagctcagaggctaaaaagataaacagcttttagcagtctcacaggaccagggttttaaaaactasagtccagtcctgtcaaaaagaaggggccaggtagaaagcccataccttcagttggaatcccttaatggccacatccttggaatagagataacccagacataagccagcctcactggttgccataaacaaaagttagtcttctctagaggaagatagcatcatccaatttttaaattttcatacgtaaagtctgacattcaattaaa

SEQ ID NO: 750766 - DNA, 653 bp, Homo sapiens
cagacataagccagcctcactggttgccataaacaaaagttagtcttctctagaggaagatagcatcatccaatttttaaattttcatacgtaaagtctgacattcaattaaaactaatttaacattcaaaaagacaagaattgaccaaattccaaccaaaaaaaacaatagaaacagacttacagtaacagacttacctaaagaatgaaattaacagatacaggccctgaaacaactgaaattaatatatttttttaaatgacaagatggagaattacaacagagaattagaaaatataaaacagtaaacataaatgtttgaagtaattgatgttatttactctgatttgcttattacacactgtttacacatatcaaaacatcgcttaaaaactatattttaagtgaaaaattttaatatttttaaatataataatgtaagaatataggctcattcattataataaatataccacattaatggaagatrttaatacctaatagggaaactgggcgggaagtaaggaagtagatgggcgctctctgtactttctaggcagttttttgtaagctaaaactgctctaaaaatgaagttattaatttaaaaattcactatgcagtaaaaaagtagacaaatgaaacctctaaaat

SEQ ID NO: 750767 - DNA, 501 bp, Homo sapiens
gtggaaaactaaaaattggcagaggctgaatggacaggaatttatttaaatgcatcccctgttcatttaggccatttttcaagcacacaaccaaggaggacaatctgagcttaaacagctccactaaaataaagcacatgtgaaaatggagagttgactctcatamaatgctcacattctggtcatgtcatatggaaaagactacctgagtcagctttaagagactaaggaaggcttgcctaaaatgatgctctacgaagaataaaagaactagtattcctgatttctggattcccagcacattcctcggctgggcaatatcttgagtcaagatgattcttgcatgtcttaagagggtcaggttactccgaaagtaatgactctcattctatagtgtgtgcctcggctgcttttacagggccaatcttgccaacctgtggttttcgtatggtactaatgatcaaaatacctaaatacttttgactcttgaacaatctgaac

SEQ ID NO: 750768 - DNA, 584 bp, Homo sapiens
atggttaattagctcaattgagccattctacaatatatacatattttataacatcatgttgtgcacaataaatagacacactttttatttgtcagttaaaagaaataaattacaaagataaataaatgctttttttwaaaaaaaataaaaatttggtacaatcctgtcaaactctatctcctaccgctgaattctctaaagacaagtaagggttgggtgatgccatggacacacaaattgaaaatactcagtagacttaaatggtttcgagcatttccttaaggtccgatcatcttttaatcccttattccactccggttctctctgactacagcactccggagggataccaagaggagagaaaacctgaatgaagtagcagtgcaaatggctgattttaaaaagaaaccaagcttcctaagttggtaatcaaggttgaagcacagcagtaggcagggggcagtgactctcatcttattctttagtactgtgggtggtccgtttgatgtttaaaacactcctgaggccttttatgatcatctttatgtgatagcacaagcctaaataaatacagaggatctgat

SEQ ID NO: 750769 - DNA, 653 bp, Homo sapiens
tggctgtttgggtggctagagaaagaaaaagacaaacattactttagcattgtccacacattcaattgtactatggagtatttacagaccaggctcttaagaaaacagggatgaacaaaccagacaagtacttgccctagaaaagcttamcatctggccgggtacagtggctcacgcctgtaatcccagcactttgggaggccaaggcaggtggatcacctgagatcaggagtttgagaccagcctggccaacatggtgaaaccacgtctctactaaaaatacaaaaattagccgggcgtggtggcaggtgcctgtaatcccagctactcaggaggctgaggcaggagaatcacttgaacttgggaggtggaggttgcagtgagccaagattgtgccattgcactccagcctgggtgaaaagagtgaaaatccatctaaaaaaaaaaaagagaaaggaaaaagaaagaaaaatttaccatctgataaaggagaggcagataaatatatactaggcacagaacacagtatctgaagccattgccttgtagttcatttccttccatttttactatgctagagaagagattttattacgcccattttactgatgaggaaattagagaccagagaaatcgatacataaaataatttc

SEQ ID NO: 750770 - DNA, 529 bp, Homo sapiens
acccaccaattctggacacagtggtgtctgcagggcttctccacgattacactactcattttcctttgcacttaataagcatttgatggagaagtgctttgaattcgtataagttcattcatcaccaaagtttttctttagagctttgttaccaaaacaccagggtttcagtctacatcctgttgattgctgcacagaaagccaatcgctgagatgacagatactgctgaagaagactttaatcgggtgctgcatctgagaggatgggaactcrgcctcaagtccgtctccctgttcactaaaactaggggcttagatagcagggaagaaatgtaacaatgtgtaagaaagtaggaactagggagggggcaatgaggcatcaggtgctgtgatctggtgagtttcggttcttcagtactattttttgagaggcctgaaagtcctttcctgaggaaggaactaggataaaacaaatacaggtttcacgctttaacagtagaagggtcaatttctagtctatgtttatcca

SEQ ID NO: 750771 - DNA, 529 bp, Homo sapiens
acccaccaattctggacacagtggtgtctgcagggcttctccacgattacactactcattttcctttgcacttaataagcatttgatggagaagtgctttgaattcgtataagttcattcatcaccaaagtttttctttagagctttgttaccaaaacaccagggtttcagtctacatcctgttgattgctgcacagaaagccaatcgctgagatgacagatactgctgaagaagactttaatcgggtgctgcatctgagaggatgggaactcagcctcaagtccgtctccctgttcactaaaactaggggcttagatagcaggraagaaatgtaacaatgtgtaagaaagtaggaactagggagggggcaatgaggcatcaggtgctgtgatctggtgagtttcggttcttcagtactattttttgagaggcctgaaagtcctttcctgaggaaggaactaggataaaacaaatacaggtttcacgctttaacagtagaagggtcaatttctagtctatgtttatcca

SEQ ID NO: 750772 - DNA, 517 bp, Homo sapiens
tttaagccattactgcaagagtgagaactcactcatccccacaggagggcatcaatctattcatgagggatctgcccccatgacccaacaccttccagtagggtcaacgttgccacactgaagatcagacttcaacatgarttttggtgggtacaaatcacattcaaaccatagcattccatccctgaacccctaagactcatgtctttctcacatgcaaaatgcaatcattccatctcattagtcccaaagttttaacttgttccagcaccaatttaaaagtccaaagtcaagctattagcctgtaaaataagacacaagttatttacttccaagatacaatggtgggacagacgtagggtagacatttccattcctaaagggagaaataggccccaacagtagaggaatatgattctggagaatagttcttggaagtgcagcctaggcaaggcctgtttctccagccgttccaataattttgtaatacatgggaaaaaaattccttgctatggaa

SEQ ID NO: 750773 - DNA, 570 bp, Homo sapiens
catggaggcctaaaatgtcatcatgacttgttaaaatgagagtatataaaggcttgataataaattaaaactggctcaaatgagtccacagggtacatgggcctacctagtagtcatttctctgatcccaggtatgacaagctgagtaacagcacaacacttacattggatctgtggagtgaaatctgtcatagygtgaaattctaggtggaagcctctgatactgcaaaactcccatctaagcgagcaaaaaaataaaaaaataaaaaaaaaacaccatatcccatgaggttggcagaaattagagtcaatgtaacagagtgtagagttggtgattcctgccatttcttgacttaattcaacactctggcccctgaacaagatgaaagaatcttggaaaatgggattatattatgtcagacttaaccaaggattaaccctgattgtagccacagtcactatgttagatgaaatatctttgcttgagcagattaaaatagccccagatagtgggaatatagccactgaattatcaaatgtattctttttcattactatcagagtaaggga

SEQ ID NO: 750774 - DNA, 634 bp, Homo sapiens
aaaagttaaactgatgaccatgggagggtttcaggtgaatgtaatgactcactatgcttattgcttatctgctgtgagtaggatactttgtgtcactttgggtgctggtgaccacagttcccaccactgagtacggatattgatagtttggttgcttgtggtgcagaacatcaccaccacctgaggaggtatgcccctcgtagctaagaatttgagctataccagtggtgcatatccaacccggcctgccacctaagacctcataagttactcaagactkacccaaaacctcttaagttactcagcgaaagcagtactgcataccaagtggagaataagacgctactttcttaattcaaaacccactacagataaaaatgtcacaatgcactcgcctagtctggctagtcagaaaggcctttggggcatgaagactaatggatagtcacaggctgaatgtcaaggtcacttggacagaaagccaaggaagtatcccagatatagtcaaacaaaaattgttggtgctggtggcacttactaatgaaaaagaagccccacagctggtaggtctcttgggtactaaacacagcatataacccatgtgggtctttttttggccccctttaatccaggt

SEQ ID NO: 750775 - DNA, 665 bp, Homo sapiens
gcttacagttctcaagaataactgtagaatgtgctgataatgcaatatcccaagaaagggaggcaatggttagaagagccaggactgttctatctgctcctccagctgccctaaaacataatctcaatgcttcagcccagtgtctcatgttactctagggtataaactcagagcaggctgttttctggggtccctcagctgctgtgcaagttgagcacrtgcaaataaaattcaaaccaccctaggcagcttttctgagccttgggagatcagcttgcaatgaatcctagacttctgttttcccttgttgcctatcaataagtaataaatccatttcacataaaatgttgtgtatgaatgtgttatgtctgctggcttcagacaagttggtaatctgcacacaataaacctgcttcatagagtttagggagttaagcctgcttatagatttggagggcatcaacatatagatgatatttagagttacagagctggatgagaccacctatggcgtgagagtttataaaagatatcagagtgctagccttagggcatactaacattaagagatctagaagaataaggggatacagaaaagaaggatgaaaaaggagcaatcagtgtgtgaagcttaaggacatgacaagactaaagaaaaatgaacc

SEQ ID NO: 750776 - DNA, 665 bp, Homo sapiens
gcttacagttctcaagaataactgtagaatgtgctgataatgcaatatcccaagaaagggaggcaatggttagaagagccaggactgttctatctgctcctccagctgccctaaaacataatctcaatgcttcagcccagtgtctcatgttactctagggtataaactcagagcaggctgttttctggggtccctcagctgctgtgcaagttgagcacgtgcmaataaaattcaaaccaccctaggcagcttttctgagccttgggagatcagcttgcaatgaatcctagacttctgttttcccttgttgcctatcaataagtaataaatccatttcacataaaatgttgtgtatgaatgtgttatgtctgctggcttcagacaagttggtaatctgcacacaataaacctgcttcatagagtttagggagttaagcctgcttatagatttggagggcatcaacatatagatgatatttagagttacagagctggatgagaccacctatggcgtgagagtttataaaagatatcagagtgctagccttagggcatactaacattaagagatctagaagaataaggggatacagaaaagaaggatgaaaaaggagcaatcagtgtgtgaagcttaaggacatgacaagactaaagaaaaatgaacc

SEQ ID NO: 750777 - DNA, 665 bp, Homo sapiens
gcttacagttctcaagaataactgtagaatgtgctgataatgcaatatcccaagaaagggaggcaatggttagaagagccaggactgttctatctgctcctccagctgccctaaaacataatctcaatgcttcagcccagtgtctcatgttactctagggtataaactcagagcaggctgttttctggggtccctcagctgctgtgcaagttgagcacgtgcaaataaaattcaaaccaccctaggcagcttttctgagccttgggagatcagcttgcaatgaatcctagacttctgttttcccttgttgcctatcaataagtaataaatccatttcacataaaatgttgtgtatgaatgtgttatgtctgctggcttcagacaagttggtaatctgcacacaataaacctgcttcatagastttagggagttaagcctgcttatagatttggagggcatcaacatatagatgatatttagagttacagagctggatgagaccacctatggcgtgagagtttataaaagatatcagagtgctagccttagggcatactaacattaagagatctagaagaataaggggatacagaaaagaaggatgaaaaaggagcaatcagtgtgtgaagcttaaggacatgacaagactaaagaaaaatgaacc

SEQ ID NO: 750778 - DNA, 665 bp, Homo sapiens
gcttacagttctcaagaataactgtagaatgtgctgataatgcaatatcccaagaaagggaggcaatggttagaagagccaggactgttctatctgctcctccagctgccctaaaacataatctcaatgcttcagcccagtgtctcatgttactctagggtataaactcagagcaggctgttttctggggtccctcagctgctgtgcaagttgagcacgtgcaaataaaattcaaaccaccctaggcagcttttctgagccttgggagatcagcttgcaatgaatcctagacttctgttttcccttgttgcctatcaataagtaataaatccatttcacataaaatgttgtgtatgaatgtgttatgtctgctggcttcagacaagttggtaatctgcacacaataaacctgcttcatagagtttagggagttaagcctgcttatagatttggagggcatcaacatatagatgatatttagagttacagagctggatgagaccacctatggcgtgagartttataaaagatatcagagtgctagccttagggcatactaacattaagagatctagaagaataaggggatacagaaaagaaggatgaaaaaggagcaatcagtgtgtgaagcttaaggacatgacaagactaaagaaaaatgaacc

SEQ ID NO: 750779 - DNA, 661 bp, Homo sapiens
caccaaaagtaaacaatttcattgacttctcacaccagagattagtttggcatatcaataaaattgtgcattatgtataaccctctttttttgacagtggtccagccgttggacatcagctataccatccttttgtttaaataaaagtgaacaatctrgaatcaccaacatatatgagagagaaggagagcagtactaaggagaaaaaacaaacaaacacaagtttttaagggaacaaaataatttagggaaaagataagagatgtaatgatctcatattccactaatagaattaccataaggagaaaacagggaaaactaagaggaggaaattatcaaaaacataatggaagaaaatttcccagaactagaggacataagtcttaagactgaaaaggcccatcaagcgttcagtccaataaatgaataaagatatacacatagccttaactttttaaaactgtaggctatcaaagataaagagatgactctaaaagcatccggagaaaaatgacaagtcacttataaagggataagaaacagtggcttcagtttggcatcagcaaaagtggatgtctactagagaatgatgtaatagtgatgtctaaaagttctgaagaaaagttattttccacccagaaaattactatattattattat

SEQ ID NO: 750780 - DNA, 661 bp, Homo sapiens
caccaaaagtaaacaatttcattgacttctcacaccagagattagtttggcatatcaataaaattgtgcattatgtataaccctctttttttgacagtggtccagccgttggacatcagctataccatccttttgtttaaataaaagtgaacaatctggaatcaccaacatatatgagagagaaggagagcagtactaaggagaaaaaacaaacaaacacaagtttttaagggaacaaaataatttagggaaaagataagagatgtaatgatctcatattccactaatagaattaccataaggagaaaacagggaaaactaagaggaggaaattatcaaaaacataatggaagaaaatttcccagaactagaggacataagtcttaagactgaaaaggcccatcaagcgttcagtccaataaatgaataaagatatacacatagccttaactttttaaaactgtaggctatcaaagayaaagagatgactctaaaagcatccggagaaaaatgacaagtcacttataaagggataagaaacagtggcttcagtttggcatcagcaaaagtggatgtctactagagaatgatgtaatagtgatgtctaaaagttctgaagaaaagttattttccacccagaaaattactatattattattat

SEQ ID NO: 750781 - DNA, 618 bp, Homo sapiens
ctattgttttgtaaactattgctgacataagtgggagacacagtttatagaaaagtgctacctgttcaaattaagtgggaaacagtgtgtaaagggttggtgagtcctatgaaacccctgtgtctgcattatatgacgtcagccactcacagaagccccattgctgagttatgtcagtgtcacagccccatgacttttgaagaggtaactgggtctaggaactgagagcacagtctttgaagattgacagatgcagtttcaaatattcctttagcaatatactagacctgtggtcttggcaacttaagagtttctggctgtctctttcctcagctacacaatggasatatgtgatttttatccatgtagggtgtatggcatgatgcctggcacatagtaaatgctcaaaaaatggtaatcatcactattattgttgctattattatctttcctgttgcttattttcttccaccttaagtctgatatgagaaattgcttttattattattttttaatttttgagacagggtctcactttgtcacccaggatcattacaacctccgcctcccgggttcaagcatttctcctgcctcagcctcccaagtagctgggattac

SEQ ID NO: 750782 - DNA, 670 bp, Homo sapiens
cagctcacaaaaggaagatgttgcgatgtcagaggcagccacctactaccgaagcactcagaggagaagtgggaggaaaggaggatgctggatgcagatccaggctctaggagaacctgtcttgtttccctggcccagaagtcagaggaaggtccatgaggataagacctgtggtgaagaaagtcctgcaacagcaagagaacaaggcttctctatttggaattttgtgtttgcaaaaagcgaaaataaagtaactttcaaaaaaaaaatcagcttcgctgggctcagtggctcacccctgtgatcccaacactttgggaggacaaggcaggcagataacttgaggtcaagagtttgagaacagcctggccaacatggcaaaagcccactctactaaaaatacaaaaattagcgtggtggcatgcgcctgtagccccagctaytcgggaggctgaggcaggagaatggcttgaacctgggaggcagaggctgcagtgagccgagatcacaccactgctccaccccaacccaggcaacagagcaagactcctctttaggtcctgctgtctctcatcttccctgccttcctctccagtagtgggacatctcactgctctcacatcatgctgggggcgggggaaaccatgaggctaggacccactgactctga

SEQ ID NO: 750783 - DNA, 670 bp, Homo sapiens
cagctcacaaaaggaagatgttgcgatgtcagaggcagccacctactaccgaagcactcagaggagaagtgggaggaaaggaggatgctggatgcagatccaggctctaggagaacctgtcttgtttccctggcccagaagtcagaggaaggtccatgaggataagacctgtggtgaagaaagtcctgcaacagcaagagaacaaggcttctctatttggaattttgtgtttgcaaaaagcgaaaataaagtaactttcaaaaaaaaaatcagcttcgctgggctcagtggctcacccctgtgatcccaacactttgggaggacaaggcaggcagataacttgaggtcaagagtttgagaacagcctggccaacatggcaaaagcccactctactaaaaatacaaaaattagcgtggtggcatgcgcctgtagccccagctactygggaggctgaggcaggagaatggcttgaacctgggaggcagaggctgcagtgagccgagatcacaccactgctccaccccaacccaggcaacagagcaagactcctctttaggtcctgctgtctctcatcttccctgccttcctctccagtagtgggacatctcactgctctcacatcatgctgggggcgggggaaaccatgaggctaggacccactgactctga

SEQ ID NO: 750784 - DNA, 670 bp, Homo sapiens
cagctcacaaaaggaagatgttgcgatgtcagaggcagccacctactaccgaagcactcagaggagaagtgggaggaaaggaggatgctggatgcagatccaggctctaggagaacctgtcttgtttccctggcccagaagtcagaggaaggtccatgaggataagacctgtggtgaagaaagtcctgcaacagcaagagaacaaggcttctctatttggaattttgtgtttgcaaaaagcgaaaataaagtaactttcaaaaaaaaaatcagcttcgctgggctcagtggctcacccctgtgatcccaacactttgggaggacaaggcaggcagataacttgaggtcaagagtttgagaacagcctggccaacatggcaaaagcccactctactaaaaatacaaaaattagcgtggtggcatgcgcctgtagccccagctactcgggaggctgaggcaggagaatsgcttgaacctgggaggcagaggctgcagtgagccgagatcacaccactgctccaccccaacccaggcaacagagcaagactcctctttaggtcctgctgtctctcatcttccctgccttcctctccagtagtgggacatctcactgctctcacatcatgctgggggcgggggaaaccatgaggctaggacccactgactctga

SEQ ID NO: 750785 - DNA, 670 bp, Homo sapiens
cagctcacaaaaggaagatgttgcgatgtcagaggcagccacctactaccgaagcactcagaggagaagtgggaggaaaggaggatgctggatgcagatccaggctctaggagaacctgtcttgtttccctggcccagaagtcagaggaaggtccatgaggataagacctgtggtgaagaaagtcctgcaacagcaagagaacaaggcttctctatttggaattttgtgtttgcaaaaagcgaaaataaagtaactttcaaaaaaaaaatcagcttcgctgggctcagtggctcacccctgtgatcccaacactttgggaggacaaggcaggcagataacttgaggtcaagagtttgagaacagcctggccaacatggcaaaagcccactctactaaaaatacaaaaattagcgtggtggcatgcgcctgtagccccagctactcgggaggctgaggcaggagaatggcttgaacctgggaggcagaggctgcagtgagccgagatcacrccactgctccaccccaacccaggcaacagagcaagactcctctttaggtcctgctgtctctcatcttccctgccttcctctccagtagtgggacatctcactgctctcacatcatgctgggggcgggggaaaccatgaggctaggacccactgactctga

SEQ ID NO: 750786 - DNA, 583 bp, Homo sapiens
gatggaaaaggcacaaagtttgtcagggcaagacatgaaaagaaatgtgttcctattgacggcaattgcgttcggtactatccgaggtttcaggcatccactggggtcttgaaacatatcccttgaggataagggatgactatatgacctagtgtgggtagaactagagccctgggataggaaccacgagacccagaactgaaaaacaaatcagagtgtaggatttaataggcaggacctggtggagttggaggggatttaccaggagaacacacagcccaagagcaggatcacagtcctgctgagcagtgggcgtgcaggaggagcccgggctcctgtatcactggraggaagatcctagtaggggtgagtggggtgggggatgagaactcctgtttcctctccctggtaagattcaacgagatacgatctttaaagacgcatcaaaatgacaaagggaattttaaaatgcatctttgtcaggggtgcggatggcccacagacatattttgaaacaagctatttgttgtgagctccccggatcctgacctgggatgactctactttgtttcccaagggtaag

SEQ ID NO: 750787 - DNA, 518 bp, Homo sapiens
tttctggaattttccatttaatattttcagactgcagttgatggcaggtaactaaaacaacagaaaatgaaaccctggctaaggggggactactctattcttactcacactttgattctaagtcaggaagcagactaatccgcataaagcaattagcaaactgtccatgacaagcagagacagaagttcagaagagaaaacgcagcagtggtcagagtcaccagggaagtttctaaaaagcgtgtacttggatgagactttgaaggacagagaaggctggggaagtgagggggaagaacaagcatttccggcccacgaggggagcagcttgaatgtgatttctctgcacactggtcrggcttcatcacttactagctgcgtggcctttggcaaattacttaacctctgtcaaccttcttttccctaactgcagcaagatcatattggtacctgtctgtaaggctgtactaatgtaattcttatgatgttcttaccacagtgcttgggtcatataaagc

SEQ ID NO: 750788 - DNA, 527 bp, Homo sapiens
ttattcaaagaaaaaagagcccttgatcaacactttgacaaatgcacagtcagatgtgtacttagaagggggtaaaaaattatttccaaagaagagccaatcagaaggaggcatcattaggtaaaagatgaagattttacaacagcagcctcagatccaagtcagcacaaacacattcctactggctttcaaaaggattgattytcccaggcatcaccccaaccctcactaaaaaaaaaaaaaaaaaaaaaaaaaaaaatcacacaggctggataagagacaactactctctaagttcttctttatttacaattttccaatctgttaagttgcttttacttatagactatatgccaaagtaatttttcaaaagaaatcagctttgggcagtaaataaaggcttattgagtgaacatgttataaatctttgaagaaaacacttccctggtatttttttttctttatttctaatcaaaacccatccccttgttctcctttcatccccacccgcgtcatcgcttctctca

SEQ ID NO: 750789 - DNA, 581 bp, Homo sapiens
atgaaagcaacaggtctgagaaagcttatgattcggctggagagactgggcacacctgtgttgtaatgggcagtactgcagatttgttcaaagtgtaaaatctggggagttctgaacacaaaagtagattgcacaatgggggtgacttttagggtacatggggattacatccagttgtaatctgtgatccagagtggcagaaaggaagtcaaaggctcttcaagtggaagaatgtcactagcaaaggtttggaatttggtctgcagcgactaaaacttctagmtggagtgaaggcagtagagaggctagaaagtgttctcagagtagatataaattctgctgctgtctttgctgcttataagactcatgtccttggtttttccttcaactctcaattttcatcttcccaaaatactaagaggaggaaggaatgcttagaagaaacaatagagaatgaaaaacaaaccttttatttttcagaacagtctgtctaaatctgtgcaagaaagcttgcaaatttgcgtatggttcaacctgtttgcccaagatttataagaatagtggaactactcccttggaga

SEQ ID NO: 750790 - DNA, 618 bp, Homo sapiens
aggtgagccacatgcatcattttaaatgccatacagggccaggtgcgatggctcacacctgtagtctcaacactttgggaggccgaggcaggcggatcacctgaggtcaggagttcgagaccagcctggccaacatggggaaaccaygtctccactaaaaatacaaaaaattagccaggcgtagtggcaggtgcctgtaatttcaactactccagaggctgaggcaggagaatcacttgaacccaggagttggaggttgcagtgaaccgggatcatgccattgcccaccagcctgggcaacaagagtgcaactgtgtctcaaataaatagccagacagccacattaaaaaacaaacagatgaagttaattttaacaatacattttattaaacataggatagcaaaaatcatttcagcatgtaatcaactccaaaaatcagtaagatacttcatatttttttttttttactaagtttttaacacatctcaatttggactaaacatttcaagtgctcagtagtcacacgtggttagtggctgctgtgttgtacagcgtaggcatagattcttgatctttattctgaatgaaatagaaaagctatgaacactctgggacag

SEQ ID NO: 750791 - DNA, 618 bp, Homo sapiens
aggtgagccacatgcatcattttaaatgccatacagggccaggtgcgatggctcacacctgtagtctcaacactttgggaggccgaggcaggcggatcacctgaggtcaggagttcgagaccagcctggccaacatggggaaaccacgtctccactaaaaatacaaaaaattagccaggcgtagtggcaggtgcctgtaatttcaactactccagaggctgaggcaggagaatcacttgaacccaggagttggaggttgcagtgaaccgggatcatgccattgcccaccagcctgggcaacaagagtgmaactgtgtctcaaataaatagccagacagccacattaaaaaacaaacagatgaagttaattttaacaatacattttattaaacataggatagcaaaaatcatttcagcatgtaatcaactccaaaaatcagtaagatacttcatatttttttttttttactaagtttttaacacatctcaatttggactaaacatttcaagtgctcagtagtcacacgtggttagtggctgctgtgttgtacagcgtaggcatagattcttgatctttattctgaatgaaatagaaaagctatgaacactctgggacag

SEQ ID NO: 750792 - DNA, 618 bp, Homo sapiens
aggtgagccacatgcatcattttaaatgccatacagggccaggtgcgatggctcacacctgtagtctcaacactttgggaggccgaggcaggcggatcacctgaggtcaggagttcgagaccagcctggccaacatggggaaaccacgtctccactaaaaatacaaaaaattagccaggcgtagtggcaggtgcctgtaatttcaactactccagaggctgaggcaggagaatcacttgaacccaggagttggaggttgcagtgaaccgggatcatgccattgcccaccagcctgggcaacaagagtgcaactgtgtctcaaataaatagccagacagccacattaaaaaacaaacagatgaagttaattttaacartacattttattaaacataggatagcaaaaatcatttcagcatgtaatcaactccaaaaatcagtaagatacttcatatttttttttttttactaagtttttaacacatctcaatttggactaaacatttcaagtgctcagtagtcacacgtggttagtggctgctgtgttgtacagcgtaggcatagattcttgatctttattctgaatgaaatagaaaagctatgaacactctgggacag

SEQ ID NO: 750793 - DNA, 592 bp, Homo sapiens
gatcatgtgagcattttctttttttcaatacttttattttcaataaatttgcctgtaaacattgtatctttctgaaatgaggttttggtctagaatatatggttatacttgaaaatattaactgttccagaaaatgccaaaactgcccattactcctgtagacaattttcattgtagccacattacctgtttccgaaaatagatatttttaaagtcaatgaaaatctcttgatgttctggtcaaataacttttattataaacatatttccctttaatatcacttaccaacagagatggtgattaaatgatttaaatgaggacttcacatgcaaataatttagaaatttttttcagtgctatttttaaaamttctgtttaacatcataaaattaatttagaattaaaatatttgtgactctttgccacttgtatggtatatactgtcctcttttaccctgaaatacttttaactctcatataaatattgcctgacagaataaacagtatatagatagtaaatgcattaacatgactttcctgttagttttacgtttcccaacttaaaaaactctattaagtttttaaagatta

SEQ ID NO: 750794 - DNA, 624 bp, Homo sapiens
cagtttggatgcctaggactgggatttgaggggtggggcagtgactacaaaagggaagagggaactttttagggcaatggacctattctgtatctttttttttttttttttttttgagatggagtctcactctgtcacccaggctggagtgcagtggcacgatcttggttcactgcaacctctgcctcatgggttcaagcgattcttctgccacagcctcccaagtagctgggatacaggcatgtgccaccaygcccagctaaatcttgtatttttagtagagacggggtttcaccatattggcgaggctggtctcaaactcctgacctcaagtgatccacctgcctcggcctcccaaagtgctgggattacagacatgagccaccgcatgtggcttattctgtatcttaattgcagcggtggttacatgagtgtatgcttttgtcagagctcaccaaactctacactcaaaatggctgcaccttatttcccacaattatatcccaatgaggttgattttaaaaccaaaataaatattgcctttgcatgattcactgtctcctgtcctcctaagattctgatcaaaggtattttaaactgttatattgcatttatttgtctctc

SEQ ID NO: 750795 - DNA, 624 bp, Homo sapiens
cagtttggatgcctaggactgggatttgaggggtggggcagtgactacaaaagggaagagggaactttttagggcaatggacctattctgtatctttttttttttttttttttttgagatggagtctcactctgtcacccaggctggagtgcagtggcacgatcttggttcactgcaacctctgcctcatgggttcaagcgattcttctgccacagcctcccaagtagctgggatacaggcatgtgccaccacgcccagctaaatyttgtatttttagtagagacggggtttcaccatattggcgaggctggtctcaaactcctgacctcaagtgatccacctgcctcggcctcccaaagtgctgggattacagacatgagccaccgcatgtggcttattctgtatcttaattgcagcggtggttacatgagtgtatgcttttgtcagagctcaccaaactctacactcaaaatggctgcaccttatttcccacaattatatcccaatgaggttgattttaaaaccaaaataaatattgcctttgcatgattcactgtctcctgtcctcctaagattctgatcaaaggtattttaaactgttatattgcatttatttgtctctc

SEQ ID NO: 750796 - DNA, 556 bp, Homo sapiens
ataaaacagaagttggagtgagaactatattaaagaaggaactattacgcaggagtggggccaatgaaaatgacagtgatcaagagccttgaaacagaaaacataggaggaaaagaattaggtcacataggctaatatgtgcaaagtctgatcagttcaacccagtaaagaaaaataagaagcaatcaagagtaaaattaagaactgatagctgtttgctctttgctccagtcctaggctaccatttgaatataggtggtcataacttgcaagatgggttttattttggggaggtatggtctcattggttctgccatagccaaattcttacaaaaacaaaggctcagctttttttgagggttataaaatgctcaatgytaaatccaagtgcatttgatttattgcttataagccagtgtattctagggagttatatagttaatatatagcaaattatatagataatattgtgaaaatcatgtgtaaaatctgagtcactagggctgaaatcaagaatccatggcactctcattagtcaagttcgtagacttagtag

SEQ ID NO: 750797 - DNA, 634 bp, Homo sapiens
ggactacagagacagactctgtctcaatcaatcaataaataaaaattaaaccctaataaacatggagatctctgtggtttagctcttatataacatcacattacactatttaaagcaagttttgttctttactccggtttctcatgggatgttatagaacttggttcatatggcctgtaatgtacttcttacrcaattttttctctttctcaattatctatagcacaggttctctccaacctttcgttctccaaaactccctccctacatcagctttctccactccctgtaagtccaagccttccccatttcttccaactcttcatggtgttgactggagtgacctcttccaatgaggtctttcctacgccagactgtcaagcttggtccttctctgtctgatctctggcatctcaaaatccaggactctctctggtcatatagacacacatcttcatttaacttgcgtgagagaaagatgtctgaaatgaaccagttaaattgtgtacttgagaaacgtacccttaaagataatgagccatttcttaaaagcgttcacctaatcttaagaaaggaggtagccatctctaagccatcatctatatgtgtgttatcctcttatttttggaatgac

SEQ ID NO: 750798 - DNA, 627 bp, Homo sapiens
agtgagaagctgaggggcatatgggagaatactgggggaacccacccccaatatttcaatgtaggttctttctattttccataagtgtcggccggctgagaaagagagacagtataaagagaggaattttacagctgggctgctgggggtgacatcacatatcggtaggaccatgatgcctgcctgagcctcaaaaccagcaggtttttattaagggtttcaaaaagggaaggggtgtaagaacagggagtaggtacaaagatcacatgcttcaaaggccaaaaaagcagaactrctaatcagggtctaacaaagatcacatgcttctgagggaacaggacaaagggcaaaagcagaactactgatatgggtccaacaaagatcacagggcaaagggcaaaagcagaaccactgataagggtctgtgttcagcggtgcacatattgtcttgataaacatcttaaacaacagaaaacagggttcgagagcagagaaccagtctgatcacaaattaccagggcagagtttttccccaccctagtaagcctgagggtactgcaggagaccaggacatatctcagtccttatctcaactgcataagacagacattcccagagcagccgttt

SEQ ID NO: 750799 - DNA, 657 bp, Homo sapiens
attcttcttttattttctataatcacgccctcaacttctaaaactgttaagactcatttttctcagccctctgctgagtgggatctacccctcctatcacaatctacatattatgaacccaaatctctggtctccctttcttccagaactcatattctttctgtgtcatcgaagacattcagattaaccataaagactctcagaaatatcctatatgtattttagtaaagactgattcatcaatatatattattagcaataaatctggcacatactacatacactatagtttattaataaactgtttctaagaaatgtcatcctctgtcttataaaactaattgtctcttgtgttttgatcaaattccataatatttttaatacaaagatactttatttaaagaatgttatgagtcatttcattcaactacttttcattgttcacaatcaactttctcctctatctacaatattgtttaaatgtacattttcccacatcataaactatyaaaagtacacgagtaagaaatagatttcctatcatcaaaaagctgaattatatgaaactgtcagcagcaactagatttttcagccttgctctgtcatatttcaatattagaataaatgacaattcttttaaaaatacctttggtttct

SEQ ID NO: 750800 - DNA, 613 bp, Homo sapiens
taaagcagtggcagcgtttgggaggactgactctaattttgaaagttctactgcaggtaaaaagctatcaaacagcaccacatgctagagattccttcataaaaggaggagtcaattaatgcagcaaactttgttgttttatattaattgctacagccaccccaacctttagcaaccaccaccctgatcagtcagcagccattaacatagagacaagaccctccaccagcaaaaaggtgacttgctgaaggctcacacagtcatcagcatttcttagcaataaaatatttttaaggcctggtgcggtggctcatgcctgtaatcccagcactttgggaggccgaggcaggtggatcacctgaggtcgggagttcgagaccagcctgaccaacgtggaraaaccccgtcaccactaaaaatacaaaattagccaggtgtggtggcgcacacctgtaatcccggctactcaggaggctgaggcgggagaatcgcttgaacctggaaggcagaggttgcgtcgagctgagatcacgccattgcactctaacctgggcaacaagagaaaactccgtctcaaaaaaaaaaaaaaaacaaggtatgtacaatgttttat

SEQ ID NO: 750801 - DNA, 590 bp, Homo sapiens
acaaaaaggtcaattatatatacaattgatttgttttacttaatcttatttgctcagatcttgcaaatgcaatgagaatattaagcctgaggctagttctcagtgtataggtttaacaaattaaggctcattttcccaaatcaaaatagtttttagttttccttttaaattatgaattacattcatagtacctgccaccagccttgccctcaatgaaatyttaatgcaggagcagcattctacttcattatggaatttccctgacaccagcacttagccccttctaaaaagctcccatctgcactagccttacagcatattacattgcctctggcttgcacctctgtttccacctgtgtatttcacagaagcccaacacagattagttgaaatattcacacaactgtttttcaaaacaatttattgcatcatatttggtaccttatgtttgacaacaaaaaggaaattacatctgtaactgcaagaaaaagaagctggtctgttatttgaaaaaaaaaaaaaaaaaaaaaatcttgggccctttaaaaattacaaagtcttgggcttgcctgaaacaactgagcaagaaa

SEQ ID NO: 750802 - DNA, 590 bp, Homo sapiens
acaaaaaggtcaattatatatacaattgatttgttttacttaatcttatttgctcagatcttgcaaatgcaatgagaatattaagcctgaggctagttctcagtgtataggtttaacaaattaaggctcattttcccaaatcaaaatagtttttagttttccttttaaattatgaattacattcatagtacctgccaccagccttgccctcaatgaaatcttaatgcaggagcagcattytacttcattatggaatttccctgacaccagcacttagccccttctaaaaagctcccatctgcactagccttacagcatattacattgcctctggcttgcacctctgtttccacctgtgtatttcacagaagcccaacacagattagttgaaatattcacacaactgtttttcaaaacaatttattgcatcatatttggtaccttatgtttgacaacaaaaaggaaattacatctgtaactgcaagaaaaagaagctggtctgttatttgaaaaaaaaaaaaaaaaaaaaaatcttgggccctttaaaaattacaaagtcttgggcttgcctgaaacaactgagcaagaaa

SEQ ID NO: 750803 - DNA, 590 bp, Homo sapiens
acaaaaaggtcaattatatatacaattgatttgttttacttaatcttatttgctcagatcttgcaaatgcaatgagaatattaagcctgaggctagttctcagtgtataggtttaacaaattaaggctcattttcccaaatcaaaatagtttttagttttccttttaaattatgaattacattcatagtacctgccaccagccttgccctcaatgaaatcttaatgcaggagcagcattctacttcattatggaatttccctgacaccagcacttagccccttctaaaaagctcccatctgcactagccttacagcatattacattgcctctggcttgcacctctgtttccacctgtgtatttcacagaagcccaacacagattagttgaaatattcacacaactgtttttcaaaacaatttattgcatcawatttggtaccttatgtttgacaacaaaaaggaaattacatctgtaactgcaagaaaaagaagctggtctgttatttgaaaaaaaaaaaaaaaaaaaaaatcttgggccctttaaaaattacaaagtcttgggcttgcctgaaacaactgagcaagaaa

SEQ ID NO: 750804 - DNA, 634 bp, Homo sapiens
taaaagatattatacaaatgaaactaaggttcttggggaatgtgattttattctactaaaaattcttatttttaaaaaataaaatcacttaccagtcacccagaaaaacactgtcatattttaacctcctataacctaaaaaaggggattttgaattctagaattcttaactgatttttaaccctagatactttattattgctggatagaaactatccaaaaagaaggaagtagataaaacagaaccagagaaagaaagacagaaagagaaacaggtcagatagccaagggggaagaaagaagagatgtaaactaggacaggagaagtacaaaggagactacagagaccatgacagaatgagtgaatgttctttataattcaaacaaagtgaagtataatcaagctattcaaaatactacactatccattctgtcttgctttgttctataaattctacaggaattcrtatttattcaaatgacatattaatggtgaggtggcattttaaaatattaatatttatagaactgtgttcctaccaatttttattaattacataaatgtcatagtaattatatacttgcaatcattactaggcaggtataatgcaattgtgctactattctactcctg

SEQ ID NO: 750805 - DNA, 601 bp, Homo sapiens
attaaatatacaagaaaaagatgtcagaaatctatcattggcaaccaaaagattaaaagagagttaaaagaaatattaagttttcagaagaggaaaactaaactctaattttatatgtatcctatgaagcctaaaggaagtgaaaacattatttgcctaactttttaatttatttgattgatttctcttttagactaaaatttagactttagagagaaattaattaggcacaaaagataaggattaaagatataatcctgaggaagaatcaacatgtaccgtttaaaaatacttttggccaggcacrgtgcctcacacctgtaatctcaagacttcaggaggccaaggtgggcagatcacttgaggtcaggagttccagatcagcctggccaacatggtgaacccccgtctctactaaaaatacaaaaatagccaggtgtggtggggggcacctgtaatgccagctagttgggaggctgaggcacaagaattgcttgaacccaggaggcagaggttgcagtgagccaaaattgccccattgcactccagcctgggcaacagagtgagactccgtctcaaaaaaaaaaaaaactttcaatga

SEQ ID NO: 750806 - DNA, 545 bp, Homo sapiens
gttaaaatttcaaaaactacttaagcgcaggcatggtatagtctaaccataacgttagattttataaaggttgtgactaggagtattcaagcctgatttctttccttgactggctttcattgcaaaataaccacttcattacgaaaaacattttgtttcattatgcctagcaatgcatccttaatgatacattgcaaaaggggcacacagaaatstgttacacggtgaaatattctttagtcaaattcctttggagtacatttatttttaccatcatttcttttcttgcagcagtctagctggtgtttaaatgattatctctaaggtagcttgccccagtcacactgtgctctaagttgttcctctctccttccatttgagcagggaaacactagatgggagaaagcgcggaaagggctagaagggacgtggtagaacacaccacgacgatattgagctcactcagaatcaaacttccacatctccatttggacgcccaccacaccccatcaataagacctgtccatatcacaacacacttgaaa

SEQ ID NO: 750807 - DNA, 602 bp, Homo sapiens
tttactcttctgcacataaaaatgctgcataattgctaatgtatgctgtggtatcagtgtgaagatactaatttagtcataggaatactaactgcataagagtaagatgattatgggctaactgaaacataaaacatgaaattagatataggtaagaggtaaataactggaaagtgtgaaagataaatacagacatgtttcaaaatcatactgacctgatagtaaaagttgaaaatgaagttctcaraaagaaattagtgccatgatattccatgtaggaaagtagttttagaatacatatatactagatttcaaggcaacactgaatcgtgcagcgaaaaaagatggtagtgaatctaaaagcaaaatatttcatccagatacctggatgacaacttagttgttggataccatagaggcaaatcattattttagatacaataaaagttaatggagggttaatgctaccaagaattattaaattttgatgtcaggtaatgttgagagcatttattcaatattggtgaaaaatgttcagtaatgaaactgcatctggtctgaaactaaaccagaattagtagtaaaacaaaataggcactaga

SEQ ID NO: 750808 - DNA, 618 bp, Homo sapiens
tagtaattatgaaaatactagtaattatggcctgagaacagcaaagtatgtctcttacttattttcccctcacagtatgtgtttcctagcttccagagctgctcaagtcacacagtactgtgaaatgatgaaaagaatacctgacctatcagcctcagtttcyttagagttgcatttgcaaaagtgctttataaattgcaactatgtagactagtactatagaacactatcctgcatgtagaagccaaagcttaacaaatattttgaatgaaaaagaaattcatacttcataaagacattgattttactctaataaaattaatccagaaaatcaaaatcccattatctttgtaagttctttaatctagatgaaaatcacttttagatagggttttagataggttaatggttttagatatggttaatggtctttaaggaagggctaatactactgggctttaaaggctttggaaggcttacgtaagaacagacagacagtatttctgactcagataaaggcctatagaagatgctcaataaataatactttctgtgcacattgtctacctttcctatgcgtatcactctgacggtgagccccataccttctccaatata

SEQ ID NO: 750809 - DNA, 590 bp, Homo sapiens
gaataattatgtgatattttctgattgatataagcaaaaaaaattatgaattgaataaaagtgtatttattggctgggcgcagtggctcacgcctgtatttccagcgctttgggaggccgaggtgggcagatcacgaggtcaggagatcgaaaccatcctggctaacacagtgaaaccctgtatctactaaaaatacaaaaaattagctgggagtggtggcgggcacctgtagtcccagctactcgggtggctgaggcaggagaatggcgtgaacctgggaggtggagcttgcagtgagccgagatctggccactgcactccagcccgggcgacagagcgagactccgtctaaaaaaaaaaaaaaaaaaaaaagtgtatttattatatrcctgaactttttgaaggactattttcatataacattgattctatgaaactgtaagggctagccgacataattttggctaaaatgtgtattctaaaagatctgaaaagttgtatttaatagtataaaatgtcagatcaaacaatatagaatttcaaaggaatatacacaaagctggcacttaggctcaacaaaccaattgct

SEQ ID NO: 750810 - DNA, 598 bp, Homo sapiens
tcatataccctttgggaaggaaaacaatatcccccttaaaggaaaatttcgggggcagaggggggatatgggatggttatcacacaaaattgtgaccctgtatttaggacatttctcaagccattgatccaggaaactggaaaagtcttgagtttcaaggccattgatgacatcatagaatatggattttttttttttttttttttttttttttttttttttagtataacctatcattgatacttttcaaagttacccatgcaggagaacaatttactctcttggttcatgttgtctgccctctccttcttcaaggkctcattttccttctaagcatctcctctctctggcagtttttgtgagataaaactcattatacatggaaaatttctataaaaatcagagacttgaagacattaagaatctctgagctcaactaacaaccattcatctctgttatgcttaaaagttatcagtaggcacacagtgggaatccaataaatggttttatactaaactacattgaaaactttttcaccatgccacgcaattagttaagaggaaatcaagctatttaaaaatattaggaaatgcattc

SEQ ID NO: 750811 - DNA, 604 bp, Homo sapiens
actgttttttccagtgactgtaccattttactttcctgtcagtactgtataagggctctgatttcaatgagcatactttaataaatattcttrtaggattgtgcctgcccaatgtgctttactgactaggaataaaaaatctgaaaagtctggagcctaccccgggagagtactttgaccccatgtaaggtaaggtaagtgcatgatcaggtgtgttttggggatgggatagggctgaaccactgtactaatgggaatctgggtctgacttccgtttgcctaagcttctctatctgtaaatgagaaatttctgcaatgagattgtagggtagccttcagtaggccactggtcattcattatccctcaggatctgcttgcttaaattttataccttagaaaatggaaacaagttacaatctgacttcttataaactataagaaaatcatatgcaccatttgcttccctccttctcagcacactggtctgtgttgtgattatcttactgcaggtgcctttgttgctaatgcaatctgttttttaaaaaggtgtcatgcagtaacaacaataaaaatgatatagagaaattaccttgtataatgcac

SEQ ID NO: 750812 - DNA, 551 bp, Homo sapiens
gaaaaattaacttaaaaatatcaaaaagtaaagcctaagtactatgtgtaaaattatcatataccttcttctatatatttaaatgttttcatttgcacttccaaatcatattattagacaagtatctaacaattaatataaataatgtacttttaaaaagatatgttcactgaagttttatgttccagatatttctgcagctatgacataattgtgttatactctggattactatttctgtggtaagggttattttaaaataaaggcaatacgcttacttaagtaaaaaaacatgaatatgggaactgacagtgtgtcatggacttgatttaaaatagcccatgttstggagttcagaggaactcagaagtatgtcaaagggcaagggggaaaaaaagccatccagaaagaagtgaggacaatgtcccttggtctgatttgtgagaaagtaagaattacatttgcagagtttggcaagacaactaggaaaaagagcaagagctagaataacttcttccaagttccagggcaatcagaaatcaaaaccccag

SEQ ID NO: 750813 - DNA, 617 bp, Homo sapiens
aaggtctcttcttcctctgtggatcctctacctacatgtgtctacctgctaatcagacaggcacatgcacactagttttccttacccccaaaattcaatttgcaaataggaccaaagagctccctgttcccctcatgacactgacacaacaaaaaagagttattccactagttcccttgctggtcagtttaggactttctgcctccactactgctctcggtactggaatagcaggcatttcaacctctgtcacgaccttctgtagcctgtctaatgacttctctcctagcatcacagacatatcacaaacttcatcagtcctccaggcccaagttgactctttarctgcagttgtcctccaaaaccgctgaggccttaacttactgctgaaaaaggaggactctgtatattcttaaatgaagagtgttgtttttacctaaatctatctggcctggtgtatgacaacataaaaaaactcaaggatagagcccaaaaacttgccaaccaagcaagtaattatgcagaacccccttgggcactctctaattggatgtcctgggtcctcccaattcttagtcctttaatactcatttttctccttcttttattctgacctt

SEQ ID NO: 750814 - DNA, 644 bp, Homo sapiens
tgcctgtttcgaagtatctcatgtacccataaatacatacatctactatgtacccacaaaaatcaaaataaaatttaaaaaattcctacctttctagactctgcttcatgacactaggggagggacttagaaaacctcatttctccttccgagtggtccctgttgggctatgccaacaggctgtaaggctagagaagggagaaggaacattgttcttcctgtttctttgttgtttctctaagtgttgcccagcaaaccttagtcatctcagcagtggcagttcgttccagtaacaagtgatccagggtccaggtttttcactctcccttctcacagcccccttagagctattagtgccaactgagcagaactccttctgtagatctccagtctccattctgcatggtccctaacccaagctcctgaggcaccagcaagggcagaaycccctcctctaaggaggtcagtcccagcttcatgaggtcatggcttgtctcttcgtcctccctaaagggaacggtcctagggatgatggttgcttcctacagttactgtctccaggctacctccgtgttcctttatgccttctcattcttcccatacctgtttaacaaattcctaacataaatcatctgttaaaaatt

SEQ ID NO: 750815 - DNA, 636 bp, Homo sapiens
ttatggagttcctctgtgacatgcaacgatgatgcagatgtgtgatagaacattattcacagagaggtaacttggaagttcattcctgcttgtgaaactgagttaagtatagggaaaggtttaagaactcagatttgcttaaatgcaaagtgcaaaagattagtttactttttagttgggatgactttctcctgtggcatcgttcccaatccagttgtctgtagcagagccttcacgaggctaaatcgttcattatagggctccacatattaagggtagaaggatcctgagggatcacctttttcagacttctgctgctgaaaaactgccattgttatccccaatttcctgataagcaaactaaggcacaatagtgtaagcgagcyagccataatcatgcaactgacaaaggctgggcgacaggctccaacccagagctctatcccaggtggaaagcagcgtctaacttttatccataagcatactggactactgttgagggaacagtgaaatatcctttaccccgggcttgagaaagatgtagaaaaaggtcaatcagctggtgggttttgtatcataactgttggtgttttctcctccctcattgagccaacctcatgagttggcaaaatagga

SEQ ID NO: 750816 - DNA, 640 bp, Homo sapiens
catcagcactgtttgtcagctcaaccttggaaatgcatttagattccagaacatgtctccccatttccattgctgtgcccttaatctgaagccatccattctctcccaagttatttaaattgtctcccaactggtckctctgcttccagccttgccttcacagtgttctccacagtacagcagagtgagccttgtaaaacctagtcagatcgtggcactcttccactcaaaaccctgcaatggtttccatctcactcagaataaaagcccaaacacctaccttcctgtaagatgctataatacttgtccctgccactgccctgatctcatttcccccctttccttattgtgctctccacacactttgtgctcttagttgtccctcaaacatacaaagtatgtctaaaatagcacctttcctattcctcactatatatccttttcctactccattttcagatttcttaagcttagctcacgtattatctatttattatctgtcactactggaatattggaatataagtcctatgaaagccaggattatctattttgtgtgcagctatatccccagtgcaacagtccttcatgctcaacagatatctgttgaacaatgaagtaaatatgtaaatgatgaata

SEQ ID NO: 750817 - DNA, 640 bp, Homo sapiens
catcagcactgtttgtcagctcaaccttggaaatgcatttagattccagaacatgtctccccatttccattgctgtgcccttaatctgaagccatccattctctcccaagttatttaaattgtctcccaactggtcgctctgcttccagccttgccttcacagtgttctccacagtacagcagagtgagccttgtaaaacctagtcagatcgtggcactcttccactcaaaaccctgcaatggtttccatctcactcagaataaaagcccaaacacctaccttcctgtaagatgctataatacttgtccctgccactgcyctgatctcatttcccccctttccttattgtgctctccacacactttgtgctcttagttgtccctcaaacatacaaagtatgtctaaaatagcacctttcctattcctcactatatatccttttcctactccattttcagatttcttaagcttagctcacgtattatctatttattatctgtcactactggaatattggaatataagtcctatgaaagccaggattatctattttgtgtgcagctatatccccagtgcaacagtccttcatgctcaacagatatctgttgaacaatgaagtaaatatgtaaatgatgaata

SEQ ID NO: 750818 - DNA, 526 bp, Homo sapiens
aaaagttgattattgaacctttgtgaagaggggtagatatatttgccacagagggtgtgttgaaaataagattaaaaaaaaaaaaagaaaagaaatgtagctttgagaatgtgacttctgagatcactgataggaaatgtagcttcgagaatgtgacttctgagatcactgatagaatgcctatagrcgttttgaaggttgcactcatatgatcaagtgactcccagtggaaaacaatgttgtacttcccttttttgtaattttttaagaaatttaagtaaaataaaataagtattcatgaaatttgttcttcctttaaaatcaaattatatttactttgctaagtttgagctacagatgatgtgcaaaatcagaattgtcactggaaatttgcttcaaaatttgctctacttaaccttacttgaaagatgtataggagatattatatttagtggccttcaagtatataatcacaagtaacaaatatacttgaataatttagaactactttgaagaagttcaaaat

SEQ ID NO: 750819 - DNA, 630 bp, Homo sapiens
ctatgtaaccttggtgtactactcaactacactgggctctgtttcctaatcagtaaaatgtgcacaattatagtatgttatttcataagtttttatgtaaataaaatgaataaatacatgtagagtgctcaaaaccattcatttctttcattgtaatgatgacatctctgaaatagatgacccaggtactcctgccatgtgtaacacaggagattgagaattttcctaagaagcagcttctttgtttgtgatattttaacctgttacttcattataggctgtcttatgtacggcctaacctccaatatgcatattatgcatattcaattttctcagattatatgctccaatggagtagatgtgtgataaataaatcaataaataaaacatatataaatattcatattatatatcattaacataatgtatgcrtttatatttatgtttacacatatatttggatgaaagtatagactggatatatatattagtttttattaatttgattgctttatttctttgaaggttattgttgtttgttcatgggctaaatcatatttttgcttctgaatatcattatgtgacactgcgagtaacactctggatatcagaaataaacgccaaactgta

SEQ ID NO: 750820 - DNA, 626 bp, Homo sapiens
ttccatgttttaaaatgcaccattagctaaaaggctgtgtagggtttcctccaagggcactatatcatcagcaatatgtaaatgttgtctttgtcagtttatttttccaggtgaaaactcttcctgtctgtgaaagaggscttttgtgaccacatctccctggtttgcaataaaatcagaagggatcaaattcctttagaaaacgtgctgtctaaacttgaaatctgaaatcgacttgtcagagcaaggggctgataaacaagacctactttaagttaggtccttatctcattttaggaagggatggtcaggggcctgttcccccaaggcatggagcagacacttagagaatattcttctgtctgttgactttaacctgcgctccctcattggaaggtaaacacagactctggtttgggggcatagatagcaattggcctctctccttcgtaaattctatttgtggcaacagtttttaatcaaactatccacaatcatgtcattcaatctcttttccttctagttaaatttttttatggagaataccaacatgggaaaaggtgctggtggcatttaagaggcaccctgggcaaagggccatagaacagggctttgtgttccaggaa

SEQ ID NO: 750821 - DNA, 626 bp, Homo sapiens
ttccatgttttaaaatgcaccattagctaaaaggctgtgtagggtttcctccaagggcactatatcatcagcaatatgtaaatgttgtctttgtcagtttatttttccaggtgaaaactcttcctgtctgtgaaagagggcttttgtgaccacatctccctggtttgcaataaaatcagaagggatcaaattcctttagaaaacgtgctgtctaaacttgaaatctgaaatcgacttgtcagagcaaggggctgataaacaagacctactttaagttaggtccttatctcattttaggaagggatggtcaggggcctgttcccccaaggcatggagcagacacttagagaatattcttctgtctgttgactttaacctgcgctccctyattggaaggtaaacacagactctggtttgggggcatagatagcaattggcctctctccttcgtaaattctatttgtggcaacagtttttaatcaaactatccacaatcatgtcattcaatctcttttccttctagttaaatttttttatggagaataccaacatgggaaaaggtgctggtggcatttaagaggcaccctgggcaaagggccatagaacagggctttgtgttccaggaa

SEQ ID NO: 750822 - DNA, 464 bp, Homo sapiens
ttaatcttaaggttgatttttttgtttgtttgatttttcttttgagataaggtctcactctgccactcatgctggagtggagtgcagtggtgtgatcacagctcactgcagccttgacatccccaagcttaggtgaacctctcacctaagtctccagagtagctggggctacagatacatgccaccaacctggctaatttttttttttttttttttgaagatgaggttttttcatgttgcccaggctagtcttgaactcctgagctcaagcaatccagctgtctcagcctcccaaagtgctggcggtwtcggcgtgagctactacaaccagccaatcttgattttagatacacatttttcctttttccaacttctttctgatactgatgagcttccactttgcattttccttttctttagtctagaactatcatgagtttttaaatttattcttcaagatattt

SEQ ID NO: 750823 - DNA, 614 bp, Homo sapiens
aatctctatcaaaatcccaatgaccttttttttttcagaaaataaaaatcctacaattcatatggaatcccaagcaactctgaatagacaaaataatattgaaaaagaggaacaaatctagaggccattcctttcctgattttaaagtatattacacaactatagtaatcaaagcagtgcrgtcctatctggaagacagactgaatagaaaagaattaacagcccagaagtcaactctcctgtgtaatgttaaataatttttcacaagggtgccaagaccacatgacgtagaaaagacagtgttgagaaaactggatatccacatgcagaacaatgaagttatatacgtcaagcatgcacaaaaaatgaactcaaaatgaattaaagaaataaatataagacctaaaactacaaaactcctagaaaaaaatatagggggaaaacttcatgatactgtatttggcaatgttttcttggacgtaacaccaaaagtacaggcaaaaaagtgaaaatagacaaataggactacaacaaacctaaaaactttggcgaccaaagtgaatcaaaaatagactgaaggaggagccaagatggccgaataggaacagctccgg

SEQ ID NO: 750824 - DNA, 619 bp, Homo sapiens
cacgcctgtaatcccagcacttcgggaggccaaggcgggcagatcacttgaggtcaggagttcgaaaccagcctggccaacatggtgaaaccccgtctctactaaaaatacaaaaatttagctgggcgtggtggtgggcgcctgtaatcccagctactcaggaggctgaggcaggagaatcacttgagccggggaggcagaggttgcagtgagctaagatcgcaccactgcactctagcctgggtgacagagcgacagagcragacttcatctaagaaagaaagaaagagagaaagagagaaagaaggaaggaaaggaaggaaaagaaaacgagggttctagatgttacgtaatttgcccaaaggcccacagagtcagaccttgaacccagatcagcatgccctatccagagcatacagccaggtaggggggcagctcagatgaaatagatcatctcaggggtgtgcaggagaagctcgagaagggctgtttctggaagggcatcaaggcaagggagccccagaggagcgatggtgagagcctcctcgctttctgcaaagacaggtcaggggttgagacagggtccaaaagaagtgaggaggtcaggggcctgtgagga

SEQ ID NO: 750825 - DNA, 494 bp, Homo sapiens
tcacttttggggcttgcctgtcctgcatcatcaggagcaagccagattaccctatttcataaagaatagggaaaagacagtcaacaaaagaggagagggtgaccagtgtggagtgtaggaggacaaaaaggaggaggagggggagaagaaggaaagaagtccaccggagaggtgagagagagatgtgtaatgatgacttagagaaagtcttactctctgttttcattgtcacctcaatgattttcagcacagatatgcattgcttttttctttttaatcamccgtgagttgtaatttacatacataaaatgcacccattcttttttttttttcagacggagtctcactctgtcacccaggctggagtgaagtgatgcaatctcagctcactgcaatctctgcctcctgggttgaagcaattctcctgcttcagcctcccgagtagctcggaccacaggcacccgccaccacacctggctaatttttgtatttta

SEQ ID NO: 750826 - DNA, 621 bp, Homo sapiens
caagggattggattctgtaggtttttgagggtagagtcaacaaaatttgctgatgccttaaagataggttctgaaagagagaaaatattgactccatttttttttagtctaagcatctgaaagtctgaagtggtcattagcagaagagggaaagactgtagaagaaacaaatctgacaattgggggaagagcagtattttgatttggacatgttagttcaagttcctgttaggcatccaaatgaagatgtcaaatagtctatyagagaaaggattcggagaccagcgttgagatctcagctgaaagattaaatgttggcatcatcagcacacagaaaataagtaaggccatgagtagatgaacttacctaagaagtgggagttaaaagagaaggaaaaaaacgtaaatttagacccttattttatactgtacacaaaaattaactcataagtaattgatcatagagaaaaaaacttaagaaataagatactaacagatactgagacattgtacaaaacgcaagaaatcaaaaatgggttagtaaaccataattctatctatgtatttcttcacttatatcattatctaattatatatagatcatcatataattaaaattcc

SEQ ID NO: 750827 - DNA, 612 bp, Homo sapiens
taaccatatttttctttttgtaatactttggtcaaagaagagaataaaagcaagatctaggcattctcctgcaacttagaagaaactggaaattgatttgatgtcagtagctttttttggatagtatcttatctgttgctgggtcatcaccacaaactcttttcacaggcaaattcaatgagcagcactggatctcaaaatgtcattaaaattaattaaatagagcatctcaaccacagctccaccactctattccatgatttaaattttacgctgtttttgctttgttttgttttgttttttgagacggagtgtcgctgtctcccaggctggagtgcagtggcgcgatctcggctcactgcaagctctgtcccccgggttcacgccattctcctgcctcagcctccggagtagctgggactacaggagccygccacaacgcctggctaattttttgtatttttagtagagacagggttttactgtgttcgccaggatggtctccatctcctgacctcgtgatccacccacctcggcctcccgaagtgctgggattacaggcgtgagccaccgcgcccgccctatgctgttttaattagcagaaatcaaaac

SEQ ID NO: 750828 - DNA, 623 bp, Homo sapiens
tcatgatagtgagtgagttctcatgagagctgatggttttaaagtgtggcacttcctggttcgttctctctctctctctctctctctctctgtctcacctgctgctatataagatgtgccttgcttcccctttgtcttccacaatgattgtgaatttcctgaggccttcccagccatgcagaactgtgagtcaattaaatctcctttctttataaattacccagtctctggtggtatttttttttttgaggtaagactctcactctgttgcccaggctggagtgcagtggcgcaatctcagttcactgcaagccccgcctcctggattcacgccgttctcctgcctcagcctcccgagtagctgggactacaggcacccgccaccatgcctggctaattttttkgtatttttagtagagacgggatttcacttgtgttagccaggatggtctcgatctcctgacctcgtgatccgcccgcctcggcctcccaaagtgctgggattacaggcgtgagccactgcgcctggcctaatggtattctttatagcagtgtgaaaacggacaaatacagactccttccctagacacgagaaccatgatggcattagggatggagttatt

SEQ ID NO: 750829 - DNA, 616 bp, Homo sapiens
tagggatttttgtttaatttatactatcttgacaacccagaatatccactggtagccaaaatattcaatgggcaactcaataaatatccattttgtgattaaaactttttaatcacatagtggtttatgctcactcaattccaatttcagcatgcagttgccaattgtggtwgtttatgattgcaatcctctgtgtaatgtaaactattattctgcataatatgaggtcctattctgagaacatatttttgtctaaattattttctcttgtactgtgttgtttcaggcaggtgatagactgtgtttcagaaataataacatatgaagtgccatgaccaaaaaccttgtttaatcattgattgccactataatataagctatatcatttctaaacttgtgtagtttatgtttatagaatggggaaatgtgttaaacctgcactgtccaaaacagtagctactagccacctatagctgtctacatttagattaaaattaataaaattttaataaaacttaagtcagtttgtctcagtcacacatgccacatttcagttgctctgtattggctactgtattggacaagacaggtttaaaatattttcatccttgcagaa

SEQ ID NO: 750830 - DNA, 616 bp, Homo sapiens
tagggatttttgtttaatttatactatcttgacaacccagaatatccactggtagccaaaatattcaatgggcaactcaataaatatccattttgtgattaaaactttttaatcacatagtggtttatgctcactcaattccaatttcagcatgcagttgccaattgtggtaktttatgattgcaatcctctgtgtaatgtaaactattattctgcataatatgaggtcctattctgagaacatatttttgtctaaattattttctcttgtactgtgttgtttcaggcaggtgatagactgtgtttcagaaataataacatatgaagtgccatgaccaaaaaccttgtttaatcattgattgccactataatataagctatatcatttctaaacttgtgtagtttatgtttatagaatggggaaatgtgttaaacctgcactgtccaaaacagtagctactagccacctatagctgtctacatttagattaaaattaataaaattttaataaaacttaagtcagtttgtctcagtcacacatgccacatttcagttgctctgtattggctactgtattggacaagacaggtttaaaatattttcatccttgcagaa

SEQ ID NO: 750831 - DNA, 461 bp, Homo sapiens
tactaagtgaaagaagccaatatgaaaaggctacatactgtatggttccaaacacatgacactatacaaaaggcaaaactatggaaacagtaaaaagatcagcggctgccacgggttagggggaaggagggatgaataggtggagcacagaagagctttatggctgtgaaactgttctacaagatactacatggttgacacatgtcattatacatctgtcaaaatccaggccgattgcggtggytcacatctgcaatcctagcactttgggaggccaaggcagaaggatcccttaagcccaggaggtcaaggctgtggtgagccatgtttacaccactgaactccagcctgggcaacacggcaagaccctgtctcaaaaaacaaaacaaaacacaacaaccacccatagaaaagtgaggcctaacgtaaactacggattttgggtgattctgatgtgtgat

SEQ ID NO: 750832 - DNA, 624 bp, Homo sapiens
aaaaaaatgagtatataactcatttttttttttgagagtatgtaaccctctctcaacaaactacctccatttatagtgggcatgagtacatggaaaggcaatagataaatttccagactggtagagagaattttataagagatgaactggttagctatttatcctgtaatcctatgtgtctgtattytacatgcaagaatgtacacaactattcataaaagaaacattttacgtaagagaaatactattgttaacttaagagaaatacttaaagttatagcactagtcctcttttaaggacattaacaatactgaataacaaagataagcattcttacaaatttgagttcaataaatgcattatgttaggaagtaaataattaacaatcatttataaataatcctacatatttctctaccctgaactttcttttgttcaacattcctaaaaaatgttttagaaaaacattttttctgttcctgttttagaaaaacatttttcctagaaaatgctttagaaaaacatttttcctagaaaatgctttagaaaaacatttttcctagaaaatgctttagaaaaacatttttcctagaaaatgctttagaaaaacatttttcctagaa

SEQ ID NO: 750833 - DNA, 627 bp, Homo sapiens
ataagggtgcttgtccacaggtccctactttctcttggctcctccactgcttggttgagcctgctcccttggtgctccctccaggtgactcctgcaaggtatgttgtgcctccctttgtagaacctgtaaatacagtaaatcctttaattcatatggctccccagtgtaatctccacagccgtactggactgttgcttaaagattccacaaaaggtgcttactcccccatttataacacttatctccatcttaaaaaaaccctctcttgaccctgtatctttctcagctcctacccaattttaagcttctcatttccaagaaaagtgcttgcaagagttattcacattcaamatttgttcttttcttttctcttcaacttactgcaccatgggcaacaagtatacgcaagttgctaaatccaatgatcagtgttcagtcctgaggtaatatgaccttgcatcatctttttgagactgtgggtcatgctgtccatcatcacacaatttgttcccttgacttttatgacacctcctcacacttgcttggttttcaggttacttcactggctctttcctttcgtaaggttggatccttatgtttccaaccagaacctgctacataatttg

SEQ ID NO: 750834 - DNA, 595 bp, Homo sapiens
agttaatgctgaaatgagttaagactttgggggactattgagaaaccatgattcgtttttgaaatgtgagaacatgacatttggtaggggccaggagcagaatgatatggtttggctctgtccctatcgaaatctcaccttgaattttaaactcccacaattcccatgtgttgtgggaggaatccagtgggaggtgattgaattatgggggctagtctttcctgcactgttctcatgatagtgaatgagtctcatgagatctgatggctttaaaaatggaagatttcttgcacaagttctctttgcctgctgccatccacgtaagatgtgacttgctcctccttgccttctgccatgattgtgatgcctcyccagccatgtggaactgtaagtccaataaacctctctcttttgtaaattgcccagtctcagatacatctttatcagcagcatgaagacagactaatatacaatctagtataagaactataattttttaaaatttacataggatgctggtagagtaggatcatttacagaaggatgcatgaatagatcgagccttgtaaagacataaagtactcaaagcctctag

SEQ ID NO: 750835 - DNA, 627 bp, Homo sapiens
cagcatgatgccatgggacacaaaagatatgcactaacacttcattatatggttggtgtttttacctaaagatacaatatatataagtaattttaagagcacagaaaatagtaaaatgtgataaagtgataaggaagtaataagtttgagaaatttattacttatattttaaatataaataatttgttactttatatattttttgtaatggttgtgattaatgatcatctcacataattcctgaaacctaacaatttgttctcattaactagyataaggtggttccacgactctgctggataataattttaaatgatggcttacacggggacagcgataggaaaagaaggaatggaaatgtaggatgagtatggtatatgcgttcagaatattagagaagaggagacgatctgacttctgacaagaagagcagcaccagatgtctgccatttcactagatctagttttcaaagtgcattcaatcaccaactatgtgtaggtgagtaaaaccaagaaaacctggcaccttgttattaggcatatgacagatatttatatgagtgaagatatatatttcaatgaaaacgctaataacagcaacaacaacaaaagcaacatgaggcttat

SEQ ID NO: 750836 - DNA, 627 bp, Homo sapiens
cagcatgatgccatgggacacaaaagatatgcactaacacttcattatatggttggtgtttttacctaaagatacaatatatataagtaattttaagagcacagaaaatagtaaaatgtgataaagtgataaggaagtaataagtttgagaaatttattacttatattttaaatataaataatttgttactttatatattttttgtaatggttgtgattaatgatcatctcacataattcctgaaacctaacaatttgttctcattaactagcataaggtggttccacgactctgctggataataattttaaatgatggcttacayggggacagcgataggaaaagaaggaatggaaatgtaggatgagtatggtatatgcgttcagaatattagagaagaggagacgatctgacttctgacaagaagagcagcaccagatgtctgccatttcactagatctagttttcaaagtgcattcaatcaccaactatgtgtaggtgagtaaaaccaagaaaacctggcaccttgttattaggcatatgacagatatttatatgagtgaagatatatatttcaatgaaaacgctaataacagcaacaacaacaaaagcaacatgaggcttat

SEQ ID NO: 750837 - DNA, 609 bp, Homo sapiens
tgaccaatagctgggatgttcctatgtgaccagctccttgtaggagacactcaacaaaccttgagcttcctggtacctttgcatatgtgtggtggttgaaaaaccagagacaaagtgtgtccgtgcgaactggaaacaggaggacgaaaagccattgaggacactactgatgatgcatatgataaccattaataaattagcactatcttttctcatatttcagataagaaaatcaacaaaaatatacatgtatttttctttgtgyagcctcataggtttatattgcacaccccaggcaaggcgtacacaacacattggagactactggatatgaaagatacttaggaaatacctgggctggagatatagatgtgttgataatcagcacattaggggaatagaagcagaggagatggccaagaaatttgtgtagtttgagaaagtgagggtccaggaggatacgctaggaacatcaactttcaggaacaggtcatgaaagtaaagctgatgaaggaaaatgaggaggaacagccaaaaaggcaggagaagaaccaagaagtgatgtcataaaaatcaaagaatgagatgctgctgaggcagcaatactat

SEQ ID NO: 750838 - DNA, 543 bp, Homo sapiens
cacatcttgtcccactggaaggctgtcagggccagtaacatgcatggagctgtcacctcctataataacaatgttttcttctggatacctcctgaaggacctgcctgaggcagtttcacagttaccttttatgtaagtgggagcacactctaaaataacgataaaagtataatatagtaattacatacatgtggccaacaaacataggaaaaaaagcccaacatcactgatcattagaaaaatgcacatcaaaamcacaaaaagacaccatctcatgccagtcagaatggctattaataaaaagtcagaaaacaacagatgctggcgaggttgtggagaaaaaggaacacttttacactgttgatgggagtataaattagttcaaccattgtggaagacagcgtggcaattcctcaaagacctagaaccagaaataccatcaacccaccaatcccattactgtgtatataccccaaggaatataaatcattctattctaaagatacatgcatacctgtgttcattgcagcactattcacaata

SEQ ID NO: 750839 - DNA, 618 bp, Homo sapiens
acctcactttgttaaggatggactaaatgactgttattatcatttacaaagctgtattgaagttgatggggcttctgtcaagaaatgtttatattttttattcatatcttttaattctattttcctatgaacttgcaaaagtccccttgtacaatagattgcatagatttaaggtgtggaacttgagaaactttttaggtgaacaatctgagtatctccagcacagatcaaagataaggcacctcaraagcctccattgtgccccctcagtcactaacctttcaaagagcagtgtaattttaattcacctcctttcataatagttggtggagtgttcatatattaagcatcatctgattttatttttccatgaactgactgttcatttctctgcacatcagaatttttttctcttctctattttctatagatcattaattaattagcgttttgtacttgatataaatttcccctgccatttgttggttttatttaaatgttttctacaatgcaaaggctttttcatttttaaaagcaaattccttttattgtttctgggttttgtcatatttaaaaaaagcttcctactctcagattataaaggaatgcatcatgttt

SEQ ID NO: 750840 - DNA, 495 bp, Homo sapiens
cccctcacagccacccccgccccgaccgcgccccgcgcggctcgaagcaccttcccaaggggctggtccttgcgccatagtcgcgccggagcctctggagggacatcaaggatttctcgctcctaccagccacccccaaatttttgggaggtacccaagggtgcgcgcgtggctcctggmgcgccgaggccctccctcgaggccccgcgaggtgcacactgcgggcccagggctagcagccgcccggcacgtcgctaccctgaggggcggggcgggagctggcgctagaaatgcgccggggcctgcggggcagttgcgcaagttgtgatcgggccgctataagaggggcgggcaggcatggagccccgtaggaatcgcagcgccagcggttgcaaggtaaggccccggcgcgctccttcctccttctctgctggtctttcttggcaggccacagggccccacacaactctggatcccggggaaactgagtcagga

SEQ ID NO: 750841 - DNA, 628 bp, Homo sapiens
gccgccacggaacctgggtcaatgtcccacccccgcttagatgccaccaggggcgtgggagccaaggagagaagaggggctccaggaaggtagagtccttgtgtcttgtgcatctgtgaacagcactggtatgatttaaaggaaaattgagccaaattttccggcagtcagttaccccatccccaccggggtaggagtctggcagccgcagctccattctggccagtcggcagagagccttgaaattcttctttgtccacacagttgtctcagagaaacagagaggttgtttctgcttaaaaacaacacacttggtgtctgggcccacagactcctttgcacttattccacgtgtgacagccaatgtgcctcgttgcttagcagacagcatgttaccgtctttcctgctcagtttgttagctctatggaatggaatytataatcaatgcccataccaacatttcactaatatcataggagatttagtctccatctgggtgtacattacatttgctctggggtgctccaggctggggggttgccaaggaagagaagagaaaccgcagagaagacgggagggcagggcaggggtctctgagaaggggaggggtcccagagtgcaggagca

SEQ ID NO: 750842 - DNA, 527 bp, Homo sapiens
atatactgaagagtgaaattcctggatcayatgatatttctatttttaatttttggaggaatagttggttttaaattttttaaattttcttgtgtgttgtggaaagtcagggaccccgaacggagggaccggctggagccacagcaaaggaacatgaattgtgaaaatttcatggacatttatcagttcccaaataatacttttataatttcttatgcctgtctttactttaatctcttaatcctgttatcttcataagctgaggatgtatgtcacctcaggaccactgtgatatttgtgttaactgtacaaaatgattgtaaaacatgtgtgtttgaacaatatgaaatcagtgcaccttgaaaaagaacagaataactgatttttagggaacaagggaagacaactataaggtctgactgcctgtggggtcaggcaaaaagagccatatttttcttcttgcagagagcctataaacggatgtgcaagtaggagagatatcgctaaattcttttcctagcaaggaa

SEQ ID NO: 750843 - DNA, 520 bp, Homo sapiens
acgtctcactatattgcccaagctggtctcaaactcctgggctcaatcaatcctcctgcctcaacctcgcaaagtgctgggattgcaggtgtgagtcatccagcctggcctacgagcaggtttttgagctgaaaagagtctgtcctttctggattctccctctttgaggcacctcattcacctcagtggaattattcacagggttccaccagtaatccttgggttccctgactctccaaaaggcatctaagcttcctggcttcatattgcctgactctactccctcccacatttctttgtcccagctatttaacttcagcactggaggaatctccaaggtgcttgaagagttctgcccagcttcccgcaaggctgtgccttctcaggtcatcgagcaaggaagccatccctgagagtctcatccgagakcccttgcagtgggcatccaaggccataaatatttgcatgcctgtgaacccagctttcagaaatgatcttaaggaaataagcatgagtattt

SEQ ID NO: 750844 - DNA, 512 bp, Homo sapiens
ccttactgactcagctccttccactctttcctttgtccctccacctttttctttcttttttttttttttttttccagaaacaaaaatgtatatatttacaaattgtaaatgtcacaactacaggcaagcatcttgagggttttacactatttttaattttttttattattgccaaagaaaaatatatgcactatagggcratcagaacctacagatttgcaaaagaaagaaaataaaaaccatgcatattttcatcacttagttaataatttggagtatatccttcctgaccttttgctatgcctatttaattaaaaaatggaatgatgtgatttctatagcctggttctcctcactcaaaaacatatcatggttatgtctgtgttgttacttacatttctacaatatcattcttaacagttgcataatatttccttgtattaaagtattaccattttccaccaagtgattcccctattgttggacatggagattgcttttaatttattgtt

SEQ ID NO: 750845 - DNA, 632 bp, Homo sapiens
ccctagaagtttagggactgatttttatggaccacatgaacatggaagaacaagaaataaagcctagagccagaacggggtagaaggctggattagaggacctccaaaaaaccaacataccaggctgagcaacacagcgagaccctgtctctaaaaatacttttaaaaattagccgagcatgggggtgcacatctgtagtcccagatgctagaaaggatgaggcaggagaatcacgagcccaggaggacaaggctgcagtgagccatgattgcaccgctgcaactccagcctgtgagaaagaatgggtcccatttytaaaaaaaaaaaaaaaaaaaaaaaaaattaagacaaaaaatctattgtcagtgtatacagtgtatattttttaaccttccctacagtgtgagcaaacagtacaaacagtagagattttggccttgaatctgggtagaataggacccaaaaggggagggggaaaccgtctagagaattcttaatcacaagcctttactcatgtgaatttggagttggaatttatgctacccatagggacagaaaactctgaagtcaaaaatttcattgaaagtgatgccaggttgactagtaaatcctaaccagaatgaaccaaaag

SEQ ID NO: 750846 - DNA, 632 bp, Homo sapiens
ccctagaagtttagggactgatttttatggaccacatgaacatggaagaacaagaaataaagcctagagccagaacggggtagaaggctggattagaggacctccaaaaaaccaacataccaggctgagcaacacagcgagaccctgtctctaaaaatacttttaaaaattagccgagcatgggggtgcacatctgtagtcccagatgctagaaaggatgaggcaggagaatcacgagcccaggaggacaaggctgcagtgagccatgattgcaccgctgcaactccagcctgtgagaaagaatgggtcccatttctaaaaaaaaaaaaaaaaaaaaaaaaaattaagacaaaaaatctattgtcagtgtatacagtgtatattttttaaccttccctacagtgtgagcaaacagtacaaacagtagagattttggccttgaatctgggtagaataggacccaaaaggggagggggaaacygtctagagaattcttaatcacaagcctttactcatgtgaatttggagttggaatttatgctacccatagggacagaaaactctgaagtcaaaaatttcattgaaagtgatgccaggttgactagtaaatcctaaccagaatgaaccaaaag

SEQ ID NO: 750847 - DNA, 618 bp, Homo sapiens
atccagccctccagcaagtgtttccatttcctttgcctggatcccagggtaacatacctcttctgttgtacagtatcattctgttgtacaggtagtgggaacctcaaacccaaacaacagcagacctgcagggatgaagtcttcaaagagatttgtatttcctccacccaaacccaggattaaaagataattaacttattttttcttttttctttttttttttttttgagatggartttcactcttgtcacccaagctggagtgcaatggcacaatcttggtttaccacaacctctgcccgccaggttcaagcgattctcctgcctcagcctcccaagtagctgggattacaggcatgcaccaccacgcctggctaattttgtatttttagtagagatggggtttctccatgttggtcaggctggtcttgaactcctgacctcaggtgatctgcccacctcggcctcagtgctgggattacaggtgtgagccaccgtgcccggcctaacttgttattttttcttattgctggtgagcagaacttcttttagcgtgctcctacatgagggtcctagatttatgcaggggtttcacctgcaacttcccagttaacttgag

SEQ ID NO: 750848 - DNA, 618 bp, Homo sapiens
atccagccctccagcaagtgtttccatttcctttgcctggatcccagggtaacatacctcttctgttgtacagtatcattctgttgtacaggtagtgggaacctcaaacccaaacaacagcagacctgcagggatgaagtcttcaaagagatttgtatttcctccacccaaacccaggattaaaagataattaacttattttttcttttttctttttttttttttttgagatggaatttcactcttgtcacccaagctggagtgcaatggcacaatcttggtttaccacaacctctgcccgccaggttcaagcgattctcctgcctcagcctcccragtagctgggattacaggcatgcaccaccacgcctggctaattttgtatttttagtagagatggggtttctccatgttggtcaggctggtcttgaactcctgacctcaggtgatctgcccacctcggcctcagtgctgggattacaggtgtgagccaccgtgcccggcctaacttgttattttttcttattgctggtgagcagaacttcttttagcgtgctcctacatgagggtcctagatttatgcaggggtttcacctgcaacttcccagttaacttgag

SEQ ID NO: 750849 - DNA, 618 bp, Homo sapiens
atccagccctccagcaagtgtttccatttcctttgcctggatcccagggtaacatacctcttctgttgtacagtatcattctgttgtacaggtagtgggaacctcaaacccaaacaacagcagacctgcagggatgaagtcttcaaagagatttgtatttcctccacccaaacccaggattaaaagataattaacttattttttcttttttctttttttttttttttgagatggaatttcactcttgtcacccaagctggagtgcaatggcacaatcttggtttaccacaacctctgcccgccaggttcaagcgattctcctgcctcagcctcccaagtagctgggattacaggcatgcaccaccaygcctggctaattttgtatttttagtagagatggggtttctccatgttggtcaggctggtcttgaactcctgacctcaggtgatctgcccacctcggcctcagtgctgggattacaggtgtgagccaccgtgcccggcctaacttgttattttttcttattgctggtgagcagaacttcttttagcgtgctcctacatgagggtcctagatttatgcaggggtttcacctgcaacttcccagttaacttgag

SEQ ID NO: 750850 - DNA, 625 bp, Homo sapiens
agtaaagtttcattggaacatagctatgctcatttatttccatattctttctggctgctttcacactacaaagccattgttcagtagctgtgcctgggaccatatggcctgcaaagccaaaaatatttactatctggccctttacataaaatgcttattgactcctaaaattatagtaagcatactttacatctgtcagggtttgggtaacttctagttttattatatttactttaacatttgggtttggaaagaaatttatcttttttaactactggaatggattctaacaaggaaggactcagagtgcattctaacaaacaagggaaacaaggagggaagaagatccctaataattgtttgatccagtcaatagctaagactaattaggttaagattaatttcttccaagaagtaatgtgtgatccygacttcactgcaaggaagtagaggaggagctgaactcattacctacatcagttcataggattaaataatgtccttcaaatataacaacagtatatgacacaatataaaaaagaatctggcaggatgctcctctgactctagtgctaatatcaagtcttttgatttgctctgtggatctgatggtggattctactac

SEQ ID NO: 750851 - DNA, 601 bp, Homo sapiens
aaagttgttctaacccttgaattttccgaagaaacttcctttaaaagctttaatgactgcagtgctccttaagcataaacaaggagggacattcggcagggagatacctctctagcaacattccacagctgccagggccccacacctaggggcaacttgtggatacgtagaatccaaaccaaaccccccttctgagtgtgataaaatccctccaaaccccgaatggcctcaccatgtttcgaggggttccctccctctaaacattccccaaaccgctcagcccaagcaccaggaacctcattttgggaaaacacgggctcttcctgcccaaatctcgccctctagggagcggctytccctccgccgcggtctacacagctgtgcttacagcctgcaccgctggctgggtgcccgccacgcacagaagggcagtaggaacacaaaagggtgtggtggccagggacccagaagaagtgaaaggggacctgcgagcggggagttttctgaaaactgcacaagccttcttgggcagcgtggtgtcttttcaccaggacgcaggtgcctctgtctgccagcggtgacatgggtgaagggctgcgcg

SEQ ID NO: 750852 - DNA, 542 bp, Homo sapiens
tacccatcacccgggcagtatacactacaccctattcatagtcttttatcctttgcccgccctcccaccctccccccccatgtccccaaagtccaatatataatggacatttaaaatataaccataaaagttgtatttkcaaagaatatttgatgatttagggaaaggtccttaaaatatctttaaacagcacaaaggctatgaaatagtatgtgtacagtgtaatttcatttccataaagtttatgcatgtttgcacatgcatataataaaattttgggaggacagccattcaaaatgttcatagtagttatctttgaatgataggattgtgggagatatgcatttctttctttaaatgttttgtctttcaaattttacaccataaatatatactactttaataataagaaaatattatttttaatttttctgtattctgtagatcttggcagaaatctaagcaaagatttgtaaaatctttcttctcctatcactgttctctcccggccactttcattttgcccatgcatgtgaaatatt

SEQ ID NO: 750853 - DNA, 612 bp, Homo sapiens
cttctggaaaaattcctcacacagggcctcaggatcccccatccctgaaatttccaggtgatgtctttccctctcaagtgtagagtggaactgtcaggatatgactcctgtcaatcatccctaagcaatgcccatgagccccttcgcagacacgtgctgcctacctgcagtggggaggaaagcagggagaggctgcaaaaccctggttagtgtaaaatcaccctcattttmtcttgtgtttctataatagaatgaagagacacccattccccagtatctcaaatcaagtaagcgagtggcaactgccaccgtggcttccaatttcttccttgaggagtgtaataaaagaatcagatgacaccaaaagcatgaaccataagagaaaaagaatttataaattggacttcactaaaattaaaaactcttgctcttcaaaaaacaccattaagaaaatgaaaagaaaagtaatatcctgggagaaaatatttgcaaaatgtaactgaaatgacttgtattcagaagacattttaaaaaatcttacaagccaataagataaacaactcaatttaaaaataattgagtaaaacatgtaaacagacaattcattaaaga

SEQ ID NO: 750854 - DNA, 624 bp, Homo sapiens
tcttttggttcattctggttaggatttactagtcaacctggcatcactttcaatgaaatttttgacttcagagttttctgtccctatgggtagcataaattccaactccaaattcacatgagtaaaggcttgtgattaagaattctctagacrgtttccccctccccttttgggtcctattctacccagattcaaggccaaaatctctactgtttgtactgtttgctcacactgtagggaaggttaaaaaatatacactgtatacactgacaatagattttttgtcttaattttttttttttttttttttttttttagaaatgggacccattctttctcacaggctggagttgcagcggtgcaatcatggctcactgcagccttgtcctcctgggctcgtgattctcctgcctcatcctttctagcatctgggactacagatgtgcacccccatgctcggctaatttttaaaagtatttttagagacagggtctcgctgtgttgctcagcctggtatgttggttttttggaggtcctctaatccagccttctaccccgttctggctctaggctttatttcttgttcttccatgttcatgtggtccataaaaatcagtccctaaa

SEQ ID NO: 750855 - DNA, 624 bp, Homo sapiens
tcttttggttcattctggttaggatttactagtcaacctggcatcactttcaatgaaatttttgacttcagagttttctgtccctatgggtagcataaattccaactccaaattcacatgagtaaaggcttgtgattaagaattctctagacggtttccccctccccttttgggtcctattctacccagattcaaggccaaaatctctactgtttgtactgtttgctcacactgtagggaaggttaaaaaatatacactgtatacactgacaatagattttttgtcttaattttttttttttttttttttttttttaraaatgggacccattctttctcacaggctggagttgcagcggtgcaatcatggctcactgcagccttgtcctcctgggctcgtgattctcctgcctcatcctttctagcatctgggactacagatgtgcacccccatgctcggctaatttttaaaagtatttttagagacagggtctcgctgtgttgctcagcctggtatgttggttttttggaggtcctctaatccagccttctaccccgttctggctctaggctttatttcttgttcttccatgttcatgtggtccataaaaatcagtccctaaa

SEQ ID NO: 750856 - DNA, 504 bp, Homo sapiens
caaaacaataaattaaaagcaatctccatgtccaacaataggggaatcacttggtggaaaatggtaatactttaatacaaggaaatattatgcaactgttaagaatgatattgtagaaatgtaagtaacaacacagacataaccatgatatgtttttgagtgaggagaaccaggctatagaaatcacatcattccattttttaattaaataggcatagcaaaaggtcaggaaggatatactccaaattattaactaagtgatgaaaatatgcatggtttttattttctttcttttgcaaatctgtaggttctgatygccctatagtgcatatatttttctttggcaataataaaaaaaattaaaaatagtgtaaaaccctcaagatgcttgcctgtagttgtgacatttacaatttgtaaatatatacatttttgtttctggaaaaaaaaaaaaaaaaaagaaagaaaaaggtggagggacaaaggaaagagtggaaggagctg

SEQ ID NO: 750857 - DNA, 569 bp, Homo sapiens
ctttgtggatatgcagtggtatgatattgtggttttgatttacatttccctaatggctaatgatgttgagcatattttcatgagcatattggccatttgtatttattctttgaagaaatgtctattcagattacttgctcatttttaattgggctacttgtctttttattattgagttgttagggttccttgtatattctgtatgagtcccttatcagatgtgtgatttgtaaatagtttctcccattcattttcttgatgatgtccttcgaagtacagcaaattttaatttgatgaagtccaatttatctatttttttccttttgtgggttgtttggtgtcatatctaagaaggttttgtctaaccaaaaatcacaaagatttacttatattttcttctttttgtagttgtagcttttacagttagktctatgatctgttttgagttaatttcgtgtattgtgtgaggaagggtcgaacttccatttggatgtagatatccagttgtcccagaaccacttattgaaaaatcttattctttccccattgaattgtcttggtacccttgt

SEQ ID NO: 750858 - DNA, 629 bp, Homo sapiens
tgtaatcccagcactttgggaggctgagatgggcggatcacttgaagttaggagtttgagaccagcctggccaacatgttgaaaccccatctcgactgggtgcaggggctcacgcctgtaatcccagcactttgggaggctgaggtgggcagatcacgaggtcaggagatcgagaccatcctggctaacacagtgaaaccccatctctactaaaaatacaaaaaattagccgggcrtggtggtgggcacctgtaatcccagctacttgggaggctgaggcaggagaatggtgtgaacccaggaggcggagcttgcagtgagccgagatcgtgccactgcactccagcctgagtgacagagcaagactccgtctcaaaaaaaaaaaaaaagaaaagaaaagaaaccccatctctactgaaaatacaaaataataataataatacttaggcaggtgtggtggcacacccctatagtcccagctactccggaggctgaggcaagagaatagcttgaacccagaaggcggaggctgcagtgagccaagactgcaccactacattccagcctgggagatggagcgagattccatctcaaaaaaaaaaaaaaaaaaaaaaaaaggaaatttataa

SEQ ID NO: 750859 - DNA, 617 bp, Homo sapiens
aaagctagattaaagattttactgtcagccaggcgtggtggctaatgcctgtaatcccagcactttgggaggccgaggtgggtggatcacgaggtcaggagttcaagaccagcctggccaagatggtgaaaccccgtctctactaaaactacaaaaattatccaggcacagtggcaggcacctgtaatcccagctactagagaggctaaggaaggagaatcgcttgaactcaggcgacagagtttgcagtgagctgagatcatgccactgcgctctagcctgggcaacagagtgagactctgtctcaaaaaaaaaaaaaagaaaaagaaaaagaaaaaaagattttactgtcasgtgaacttgaaaagcgtttgggcttatttatgagtactctgtaagtttaagccacatttggtccctgtggccaaaacacataacaaaatatgcatatgtacacataaacacacacatacaccctcacacaaagattctatagcttttacttcagaactctagccaggagatattaatacaaactcattggtttgcaaaaacaattaacaataacaaaaacgaaatggttgaatacaaacagtggattctatctcagcaaaaaa

SEQ ID NO: 750860 - DNA, 621 bp, Homo sapiens
atttaaatctggaatctatctggaattttggtattaccacatggaaaaaggatccaaccttattttccaaaacacaaagcactgatttgtagttttctctgatttacatgttgtcagtactactgccttggctaatttcaagctaccaaggctttaacaactggtttgcaaaattctcaaggatttgacagttgattctcaggagccagtatgagctggttgcctcacactttgcttctaactyttgggggcaatgctttccctccactgttgtttctttccctttggaggggagtaagtgatgtaacacctgcttctttccacccctttattatttgctatcccaggggagctaatagtcatacccaagctcttccttttttcatcataggagttaggccaggtgcagtggctcatgtctgtaatcccagtgctacattgtaggtggtcgaggtggaaggatagattgaggccaggagttggagaccagcctgggtaatatagtgagaccccatctctaccaaaaattttaaaaaattagtgaggtgtggtagtgtgcatgcacctgtagtcctacgtagttgggaggctgaggcaggagaattgcttgagcccaggagt

SEQ ID NO: 750861 - DNA, 513 bp, Homo sapiens
tgaagaaattggagccctagtaccttgctggtgcgaatgtaaaatgatgcatgcactgtggaaaataatttgatgattcctcaaaaagttaaacaattaccatacgaccctgcaactcctctcctcagttcatacccaagagaactaaaaacatgtctgcacaaaaacttgtatgaacattcacggcagcattattcctaatgtctcaaagtggaagcaacccaaatgtccatcgatggatggatggataactgaaatgmgatatattcatacaatagaatattatctgttaaaatgaatgaagtacttgtgtatgctacagtgtggatgaactgtaacattatgctaagtgaaagaagccagacacaaaagaccacatatttgatttatatgatccagaacaggcaaattcacagaaatagacaactatactagtgactgctaatgggtatgggtttgttttttggggtgatgaaaaagttctgggattagatggttgcacaaccttgtgaa

SEQ ID NO: 750862 - DNA, 513 bp, Homo sapiens
tgaagaaattggagccctagtaccttgctggtgcgaatgtaaaatgatgcatgcactgtggaaaataatttgatgattcctcaaaaagttaaacaattaccatacgaccctgcaactcctctcctcagttcatacccaagagaactaaaaacatgtctgcacaaaaacttgtatgaacattcacggcagcattattcctaatgtctcaaagtggaagcaacccaaatgtccatcgatggatggatggataactgaaatgcgatatattcatacaatagaatattatctgttaaaatgaatgaagtacttgtgtatgctacagygtggatgaactgtaacattatgctaagtgaaagaagccagacacaaaagaccacatatttgatttatatgatccagaacaggcaaattcacagaaatagacaactatactagtgactgctaatgggtatgggtttgttttttggggtgatgaaaaagttctgggattagatggttgcacaaccttgtgaa

SEQ ID NO: 750863 - DNA, 605 bp, Homo sapiens
cttactcccttctaactcagggcagcttttctggcagtacctgcttctttccaagatttcagctcctgttgagtggtcctcttccagggatccaaactcacaagccttgagtaacactgttttctcaccttgccccttccaggtatgggcacggaaatcgcttcccactattgttagtctctgaatgccttgacatcctttattggttcccttaatccwgtctgcatctctatgaatagccctttgttaccttctcttcagaatcccttctgaatgaatctgccctgtttcccgtggggatactgactgaattgatgccttagctgcaaagaaagccaggaaaataagaatctggcatttcggctcctaggtaggaggcaggctctgtttctcaacaaggcttatggagtgggaaattttgtaaacataggaaaaggacaaagatgtaccctatcaccacttctgttcaacattgtgctagagatcctcagtatttcaataaggcaagaaaaagagataaaatatgtaagtattggaaatgaaccagtaaagccatcttgattcacagatgtcatgattgtatacatagtcaatcccaatgaatc

SEQ ID NO: 750864 - DNA, 554 bp, Homo sapiens
cacacagacagggatagacacaggggaaggggtgggtgtgcatgtgcacacacagctgagagatatccagaatcatgcagaagaaagaaaagagacagagagaaacgtaacacggctctgaaagagacagttaaatcatgacaaaatgacactgacacttaacagtgcacactcgtacactccaagcagaagtgtacccggaacatggcatttgctgcaagagctcacagagggacccacacgtycatgataagagaaaccatatccaggctacagaactacgtaatttgcaaataatctaatagctaacgtttgctgaatgttctttctgagctaagctcttttacatggaatatctcattgaatcctcactcactccaggagatcaatactgtttactaaatccccatttcacaggtgcacacggaggctggggtgatctgagctggcctctgtcttcagctgtctcactcaccactttcccccttctcccctcctggcagcccgtccggtgtcctcaaaaacacatgtcacatgccgtctctggcctctgt

SEQ ID NO: 750865 - DNA, 527 bp, Homo sapiens
aaatcattttttcccatttcatctgtctctaacagctttaaatttcccctgcacatggaaaagagatataacactgatgactggacctacgtaaggcttcctctgccaacaacacggtttggttgaacaccctctggcrgtgttattttagcacttttcacaaatgctaatgaacactcacttggtcagagcagacaaacacaatctgctggctttgtttgggcattactcacactggctaatgaacagtgactcacttggctctgcagagagcagagctgagcccagtctcaggagtgaaagactagcactgcaggcaagcaacgtccccagaaccaggattagaaatggtgccggaggccagacacggtggctcatgcctgtaatcccaacttctgggaggctgaggcggacggatcatttgaggccaggagtttaagaccagcctggccaacatggtgaaaccccacctctactaaaaatacaaaaaaaaaaaaaaaaaaaaattagccaggcgtggtggtgca

SEQ ID NO: 750866 - DNA, 669 bp, Homo sapiens
tgcttgtaaatgacacacatacacatacacgtgcgtgctcacacacgtgcgtgctcacacacacacacacacagcctccagcactgctcacagctgcctggcctgcttgcttgtaaatgaaacacatacacatacacacacacacgcgcacacagcctccagcactgctcacagttgcctggcctgcttgcttgtaaatggaacacatacacatacatacacacacatgcacacrcacacacagagcctccagcactgcccactgctgcccggcctgcttgcttgtacatgaaacatatacacatacacagatgcgcacgcacacagacacatatacagcctccagcactgctcactgctgcccggcctgcttgcttgtatatgaaacatatatacatacagatgtgcacacacacacatgcacacacacacattcgcacagacacacacaccgccagcctccagcactgcccactgctgcccagcctgcttgtttgtatatgaaacatatgcatacacatacacagatgtgcatgcacacacatatgcacacacgcacacacacatggcctccagcatggggccactcagtaccttccttgcactccagggccacacgggactccaggttgtccatctgcatctgcagccgcttcagcgtgaggtcac

SEQ ID NO: 750867 - DNA, 570 bp, Homo sapiens
cattattatcctcattttataaatgaagaaactgagacaaataaaatgttgagcaacttgcttacattcacccagtaagtaagtggcagagccagggctctagtcccaggaatctccttgtgaagtccaagctcttgcctacctaccatgccacgctgccttgcacccatgtgtaatatccagtgtcaacattttggtgtttctgtggccagtcttgcttttcttttacaaaactgattcaaaactctatattatgctttgtaacctgtgttccaagaacctgtgttctcacttaatataccttgagtatatgtctggtcatgattcttctataatatcagatttaatggctgtgtagttttctttccagtgcttatacaataatttattgaactgakgaattccctatttttacacatgtaaatcacttctgagtttttactattataaataaggctgaaataaacattcttgaaaataaatatttgtgaattctggttatttagggaaagttctagatgtgtgatggccaggctaaaggcttctaacccacatttccaaatttccttc

SEQ ID NO: 750868 - DNA, 451 bp, Homo sapiens
aatctcttgacctcgtgatctgcccgccttggcctcccaaagtgctgggatcacaggcataagccaccacgcccggcctagaccaaccagtgtttcttaagctttaatgtgcactcaaattgctttgggggggtcttattaaaatgcagattctgatttcttaggtctgcaatggagcccaagaatctgcatttctatgaagttccaggtgatgctgctgctgtggtcttcctgtgtagcactctacacagcytgagataaatggatgtctgagccagatagcttctggactgtccagctatttctttgcaaactcaaaatacatgatagtcaagcatgaagtgaaggttctacagagatatgctgctaatgtgtatgcttttagtttgtcaacaaaacatgttatattggtcactttctgatttctctgttaggctataatcaggaaaac

SEQ ID NO: 750869 - DNA, 552 bp, Homo sapiens
ctgccttggcctcccaaagtgctaggattacaggcgtgagccactactcctggcctaaaactaatgtaagaatatatttaaagttattcacagttccatcaacctggacatctgccaattttatttttattgattttcttctagaccatgtctgtttacagagattcttacatagctgtaatccttgtgtggatataattttatatttgttttttactttttttctgagtttttttwatgtggctataaaatctctatgatttttgtttttatcaaatgtacaatgcctcctctaatgaaagtgcctttgtttatgtagccattgcaccatcattgggcatttgattttgattcagagttattctttattatgtatagtactttaatgagtgcagaacctttttcttcctttgaattaaactaggattaattctgaaggatgggtaggaatacttttatagacccttaataaggattatgaaattgatttttttaaagaatgacgccaagttatactgccaccaacctgtggctgccagttccattaccaac

SEQ ID NO: 750870 - DNA, 573 bp, Homo sapiens
tacaaggctcatagatattaaatgaaaaggaagtggagcttctcaagatggcggagcatagtacatgagcctgacttactggaaagatgtgggccatggggtctcagacagtgggttcaatcccagttccgctgcctcccagcaaaggtgaagttagttacctaacctttcatgcttcagtatcaggacaatatcaggacagccccacagctttaytgggaggattaaataatacattgaaaacacctgaggccaggcgcagcagctcacacctgtaatcccagcactttgggaggccaaggcgggcagatcagctgagatcaggagtttcagaccagcctggtcaacatggtgaaaccccgtctctactaaaagtacaaaattagccaggtgtagtggcttatgcctataatcccagctactcgggaggctgaggcaggagaattgcttgaacctgggaggcagaggttgcggtgagccgagatcttgctattgcactccagcctgggcaacaagcatgagactccatcttaaaaaaaaagaaaagaaaagaaaagaaaacatacaccagga

SEQ ID NO: 750871 - DNA, 460 bp, Homo sapiens
taaatatacagaatagaaaaaggtaattgaatcaaaacatcaatcaatgctacttaagtaagtgtaatttgcagaatatttaatttatatattaactggtctttcagtttctccaagttctgtcccagaaaacatttaaattctattatctcacctacctggataaatgccatccctgaattatyctttgataataaaccttcaaccattatacaaggatcattacatgagttttcattttcaatgattcagtatctttgacacaaatggagcttaatactttagccattatccaccggattgcctaacatcccctgctcaaaaaaggatcaatgctatattatggctcagtttttagttctagaaaacattagtctctacagatgtgtttgcatgcgtaattttctcagaaaatgaaaactagctgtcatctcttttatgcagattttatcaggattat

SEQ ID NO: 750872 - DNA, 460 bp, Homo sapiens
taaatatacagaatagaaaaaggtaattgaatcaaaacatcaatcaatgctacttaagtaagtgtaatttgcagaatatttaatttatatattaactggtctttcagtttctccaagttctgtcccagaaaacatttaaattctattatctcacctacctggataaatgccatccctgaattatcytttgataataaaccttcaaccattatacaaggatcattacatgagttttcattttcaatgattcagtatctttgacacaaatggagcttaatactttagccattatccaccggattgcctaacatcccctgctcaaaaaaggatcaatgctatattatggctcagtttttagttctagaaaacattagtctctacagatgtgtttgcatgcgtaattttctcagaaaatgaaaactagctgtcatctcttttatgcagattttatcaggattat

SEQ ID NO: 750873 - DNA, 395 bp, Homo sapiens
gggcaaacaaacttataaaaggaaaatagctcatgtttatatggagcatcgatcatttgacaagcgctttacatggacagttcaaggggaatggggcataaacttcccttgaatgtagatgtagcctcttccaaaacgggtatggtgtagctatttctgcttctcccacatttttgtgagtttctctgtgccccaaacycggtggtctctgatatccttcccgttggatttggggccagtcttcccaacagcatgcaggaaggaaaggtcagagaaagcatccactggcgatgatctctctgcagtcctggctgactggtgaaaaaaaaacatataaccatagggaagtggtactggagaggcccctggcaggctgtcaacttgctccctgcctc

SEQ ID NO: 750874 - DNA, 551 bp, Homo sapiens
cacaaccagcattagtgaaaaccagtgcagcaatcaaaactacaaccagggtcccacctcaatcccctcctacctctactggaacaggtactggtatccatgcctgagagaactgaagacagatcacatcacatgactctttgcagatactcccttataccagcccagaacccsgtagctctgctgggtggctagacccagaagagcaataacaatcagtgcagtccttctctcaggaagccccatccctagtggaaggaggagagcaccacatcaagggatcaccccgtgggacaaaagaatctgaacagcagcccttgagcccaagatctttcctttgacataatctaccccaatgagaaagaacccagaaaaacaattctggtaatttaacaaaacaagtttctttaacacccccaaaagatcaaaaaactcaccagcaatggatccaaaccaagaagaaatctctgaattgccagaaaaagaatttaggaggctgattattaagctactcaaaatacaagaccatgttaatgtagactgagagtgta

SEQ ID NO: 750875 - DNA, 618 bp, Homo sapiens
taggccactcaagtgattgattatatattcaggttttccaacaaggtttcagatgattaagctagatttttgatatagtcaatccagtgaaggtgttagaaaaatacatatcagatgataaggaaagaacagtagattattggaggtccctgctattrgggcacagaaaataattccccacaatatggtgctttggcatgctcagtgctttaaaaattcaaacgtctcagaaccaggtctgatggtctttctggaagcactggaagggatttctgcagaatttccttttctgactaagaaagcttctttctaaaagaaatgcaattgtattaagactcccctccctaggaatctcaacaaatatccaggaaaaataaacactggaaaaaagactgacacagattgactttcatctgttgtcctgaggacagctccaagagattacctgggagacttcatctgcacaataagtcataacctgtaggtcccatcctttgtcctaagagaatcatttacaaattaatgtttgcctgccaggcccacacatctctcgcctctgaagagagtattaaagcctaaactgcttggcccctctccaagtctcatacattgtatatg

SEQ ID NO: 750876 - DNA, 618 bp, Homo sapiens
taggccactcaagtgattgattatatattcaggttttccaacaaggtttcagatgattaagctagatttttgatatagtcaatccagtgaaggtgttagaaaaatacatatcagatgataaggaaagaacagtagattattggaggtccctgctattagggcacagaaaataattccccacaatatggtgctttggcatgctcagtgctttaaaaattcaaaygtctcagaaccaggtctgatggtctttctggaagcactggaagggatttctgcagaatttccttttctgactaagaaagcttctttctaaaagaaatgcaattgtattaagactcccctccctaggaatctcaacaaatatccaggaaaaataaacactggaaaaaagactgacacagattgactttcatctgttgtcctgaggacagctccaagagattacctgggagacttcatctgcacaataagtcataacctgtaggtcccatcctttgtcctaagagaatcatttacaaattaatgtttgcctgccaggcccacacatctctcgcctctgaagagagtattaaagcctaaactgcttggcccctctccaagtctcatacattgtatatg

SEQ ID NO: 750877 - DNA, 576 bp, Homo sapiens
taatcaaatttatcaaaagagtcataatattagaaattcatgcattatgtcataaaataaacagatgaactaaagatatgttgtttatctagattttttttacttatttttgggattttaaaaaagataactatacctcgattttagattatactgattagaatgaaaagtacgtatttatttaccaaatttwtgttttcttggaacacttttcactaaataatacaagtaaaatctttctctctgtctctgtgtgtgtgtgtgtgtgtgtacacacacatatatgttggtctttattaacaaaggaagaaactcctagagagaagaaatgttctgagggctttactatatgacacacttgaagacaggccaattaatcaccaagcgtgctgagtaaagcaattgctttgagtattataatcactttatgtaaggattatcaaatatattggcaattatatgcaagaagcttatttttaagatttactttttctttaaaatacacaataaagttccatttgcttcaattttctaattatgcttgagcgattatatgctagtaataggaaactaacc

SEQ ID NO: 750878 - DNA, 632 bp, Homo sapiens
ctgtcaacacccatatgctgtagcccccatcacctctctgtcctcatttcacactgcctttcatatggctcacatactgcgctccagccacattgccacctcactgtgtctagacctttgcagatgctattccctctgcttaaaaagttatttamctccctcactttgcctcttttatcaaaatctttattgtcatcttaacagtcaggctatgcttgacacccacttaatacttgcagctgagcatggtggctcacgcctataatcccagcactttgggaggccgaggtggtggattgcttgaggtcaggagttcaagaccagcctgaccaacatggtgaaaccccgtctctactagaaacacacacatgcacacaaaattagctgggcatggtggcaggtacctgtaaccgcagctactggagaggctgagtcaggagaattgcttgaacccaggaggcagaagttgcagtgagccgagattgtgccactgccctccggcctgggcatcagaatgagactctgtctcaaaaaacgaaacaaaacaaaaaaatttgcaagtcgcctcccccaacacagcctatccccttcctctgcttttcttcttcttcttatccttagcacttcttaat

SEQ ID NO: 750879 - DNA, 554 bp, Homo sapiens
ttgtaatgggctttgtacattaggctagagtaagtaaggaaataagattatcaaatcattctaacagctttttatcaaggaaaatgaggttggcttccctatcagaatgtcttggggggattttaattttctgccaaccaaccactgctagttttctccactatgatgaaacagtgtacttaagagtggtgtcaaaacagcctcgaagagtgatgggtcggaaaattgagaagaactttggagggggtctaagattatagattatacacagccgagaaaggtgttggacaactgttgtgttttttttttcttttctgtctttttccttccttccttccttctttcttcctttctttcttccttyctttcttccttcctttcttcctttcctcctttctttcttctctctttctttctttttttgcagtcaaaatcttgctgtgtcacccaagctgaagtgcagtggtgcattcatagttcaccaggctcaagcaatcctctcgcctcagcctcccaattagctgggactgcaggcaagcaccaccattcccacc

SEQ ID NO: 750880 - DNA, 629 bp, Homo sapiens
catttatgtattgtatattttattcacacactatgacatctggtcacaaaataattttttttctccaactagttatttgcattattttcataagctcaacataagactcattatatttcaatttgagggtaggtacgggtgagtattatccttttcattgtacagtatactcactaaactctcagtgacttttgactgtttctaaaaatcgaatataaatgggaaagagccaaaagtcattttgattcacaccaagattatggacataccatatcctactagatacacatttgcattattttttaatgcgacattattaggactcttatcattaaattcagaccttaggcaaattcagttgacgaatattactcatagcatataactctgayatgttcgttaagatgttatatactttataattacactttctatatttcaaaatacagagtttatttgttataactactgcaaaaacctttgggaaaaactgctacatatttttgcaatgacaacttttgtcattattccaagaggatgtatttgtgaaatagcttaagatttctcaggaagaatacacaaaataatgaatgatgagaaacacatgagtggcacttcttatccaggta

SEQ ID NO: 750881 - DNA, 595 bp, Homo sapiens
gaacagtttttcattaacagcagtaaaagtgttagtatagtatttatctattttacctatcattatctctagtagtcatctattctctgtatagtaagatgctgtccaattttaaaaagatgtgcaccatagttcacccaagctgggcagtctaaaacakaaagaaacttcccaccacagcgcacttggctttatttttctctgctgcttgctccattacatcaaaagcaaaataaagtataaaacacagtgactacagagccacagcagtcattcccacagctctttcctttactctttgcctgggatgccagtcacctcaggggctccacagttagtgagctggaactcatttcacatctgaggagaataatgttagaaaagctctctgcatgcagagcagggcagacccactctcagcaagcctttcagcaatgcagctccagctttcctgattttattggtcaccagcaagcttgtttttatttttgaactatttaagaggatactagtagtattagcaatacaagcaacccttcattgaatgcctacatgtgatggaaactatcgcaggtgcctctcttataatactgtt

SEQ ID NO: 750882 - DNA, 621 bp, Homo sapiens
gtactgaaagccaaaaaattatgtaagatcacaagagagtgagtataggtagacagaagtggttcaaaaactgagatctggagcatttcatcattaggatattgagcataagagaaactagcaaaagaggttgagaagggagcaaccrttggtgtaggaggaaaaccaggaatttatgtgctagaatctacattgggaaaatgtttcaaggaggaatgagtgatcaagtctatcaaatgctgctgaaaggtcaagaattgaccactgaatttagcaatgaggatgtcatccatgaccttgcatgaaatgtattttgccagagcggttgggtcaaaggtctgattggtttgggttcaaaaggcagagaggagtaacacttaggaaggatcatgagtttaaaacaccagtcagcctggttttgtgcttttctccagcaagatccaagtccccaggtaaagacacagagaagccataattggatttaaccagggctgtggtttagcctaactataaggaagctgaagagagagagagaaacaaggaaattaggaatgtatgcaaaagagtgatttcaataattaccatgtaccatgggattagccttgatacagagggatataa

SEQ ID NO: 750883 - DNA, 596 bp, Homo sapiens
aaaaattatgtaagatcacaagagagtgagtataggtagacagaagtggttcaaaaactgagatctggagcatttcatcattaggatattgagcataagagaaactagcaaaagaggttgagaagggagcaaccgttggtgtaggaggaaaaccaggaatttatgtgctagaatctacattgggaaaatgtttcaaggaggaatgagtgatcaagtctatcaaatgctgctgaaaggtcaagaattgaccactgaatttagcaatgaggatgtcatccatgaccttgcatgaaatgtattttgccagagcrgttgggtcaaaggtctgattggtttgggttcaaaaggcagagaggagtaacacttaggaaggatcatgagtttaaaacaccagtcagcctggttttgtgcttttctccagcaagatccaagtccccaggtaaagacacagagaagccataattggatttaaccagggctgtggtttagcctaactataaggaagctgaagagagagagagaaacaaggaaattaggaatgtatgcaaaagagtgatttcaataattaccatgtaccatgggattagccttgatac

SEQ ID NO: 750884 - DNA, 589 bp, Homo sapiens
gcaccaggtgtaatgtttcctttatcatttctgattttattagggtcttctctcatgttttttggttagtctagctactgctttattaattttgtttatctgtttcttttttttttttttttttttttttttttgagacagggtcttgctctcacccaggctgtcgtgcagttgtgtgatcatagctcattgcaaccttgaactcctgggctcaagtgatcttctcacctcagcctccagaatagctaggactacaggtgtatgcatctatagttgtctaatttttaaattttttgtagagaccaggtctcattatgtttcccaggctggttttgaattcctgggctcaagaatcctctcatctcagcctcccmaaatgctaggattacaggcataagccacggtgcttggacttcatttatcttttccaaaaaccaatttttgttttgttgattctttgtaatttttaagccttaattttgtttatttctactctgatctttattagttttttccttctactaattttgggttagtttgttcttgcttttctgtttccttgaggttaattgtttaattgttcatctga

SEQ ID NO: 750885 - DNA, 581 bp, Homo sapiens
ttctgtagttaacatttgagtccttcctcttctttatttatgtgtttgttctacctgtaggtgttatatacatttgtgtgcttacataacagtagatcgcatccttttgcttccaggtgtaggattcccttaagtagttcttgtgggactggtctagtggtaatgaattccccatcttgtaggactggtctagtgataatgaattcccagttttcttctcagggaaaggctttatttctctttcagttatgaaggataactccggtgtatacatagtatccctgactggcagtgttttatctttcagcacttyggatatatcatcctattctcttctggcttgtaaggtttatgctgttagtccgatggaggtttgcttataagtgtttagttgcttttctctcactgtttttagaattatctcattgtctttaacttttgacaatttgactataatgtgctgtggagaagactttttgaattgtgtctatttggggataactgagcttcttgtatttggatgtttaatcttttgctagacttgcaaagtttttagctattatttagttaagaaggttttc

SEQ ID NO: 750886 - DNA, 607 bp, Homo sapiens
tagaatgatttagggaggattccttctttctctatcttttaaaatagttttattggaattggtagcaattcttctttgaatgtctgatataatttagctgtgactccatctggtcctggattttttttattggaaattgttttwttacttatttaatcttgctgcttgttattggtttgtttagggtttctatttattcctgatctaatctaagaggattgtatatctccaggaatttatccatttcctctagatttcttagtttgtgtgtgtaaaggtgttcatgatagtccggagtggtcttttgtatttctgtggtatcagttgtaatatctctactttcatttctaattgaacttatttggatcatctctcttttcttggttaatctcactaatgatctatcaattttgtttatcttttcaaaggactagctttctgttgcttttacttttttttgtttgtttcatttagttctgctcttatcttttgtatttcttttcttctgttgggtttgggtttagtttgttttgtttctctagttccttgaagtgtgatattagattgtctatttgtgctctttcaaactttttgatgaaggcattaa

SEQ ID NO: 750887 - DNA, 607 bp, Homo sapiens
tagaatgatttagggaggattccttctttctctatcttttaaaatagttttattggaattggtagcaattcttctttgaatgtctgatataatttagctgtgactccatctggtcctggattttttttattggaaattgttttattacttatttaatcttgctgcttgttattggtttgtttagggtttctatttattcctgatctaatctaagaggattgtatatctccaggaatttatccatttcctctagatttcttagtttgtgtgtgtaaaggtgttcatgatagtccggagtggtcttttgtatttctgtggtatcagttgtaatatctctactttcatttctaattgaacttatttggatcatctctcttttcttggttaatctcactaatgatctatcaattttgtttatcttttcaaaggactagctttctgttgcttttacttttttttgtttgtttcayttagttctgctcttatcttttgtatttcttttcttctgttgggtttgggtttagtttgttttgtttctctagttccttgaagtgtgatattagattgtctatttgtgctctttcaaactttttgatgaaggcattaa

SEQ ID NO: 750888 - DNA, 632 bp, Homo sapiens
ttcctggatggtgtcaatgctagtagatgttcttcagggtctaggtactgaagaattaggtattcattttagtctttactgtttgggcttatttgtatccattcttcttgggaaggctttccaaatatctgaaaggacttgggtgttgtgatataagctgtatctggtttaggaagcaccacaagcccagtaacattgtggttcttatagacttgtagatggtctttgaccagatccaggagaattctctggattaccaggcagaaactcttgttctcttcccttacattttcccagacatacagagtgcttctctctgttctgagtcacctaaagcagggggtgaactgacatgagcaccactgtgtccaccactactttggctatactgggtcagaattgaagccagcatagcactgggtcttgcccaaggcctactgtaactactccctgtctactacctatgttcactaaaggccttggggctytacaaatagcaggtggcaaagccagctaggcctgtgcccttcccttcagggcagcaaggtcccctaagccctgggtgggtccagaagtgccatctgggacttagggactagagtcaaaaaaccttaaaagtctacttgaggttc

SEQ ID NO: 750889 - DNA, 590 bp, Homo sapiens
agagtagggagctagtatattcaccaggcttagggttcactatatgagtgaaatggagtgagaagggagcaaaggagttaaagattttttgaagagagtgagtataatgatgagatgtaaactgtaaagggaaaggtaaggacatgtggaagcaaggtcaatgaacttgagatctttattgaaggtgaagaattgctcatataggagtacttatttaggtaagctgagaaaatagaaacagttttccaaaaactaaattcttaaaatagtttttgtggtgacaaggccacagatatggtcatggtggtgtacgactgagctrgaatgaaagaaaagccctttggagatgaggaggtcaaggaacttggagtccagcaattatccttaatctgtcaattctccaataactagggatgaagatatttaaataggatagagaagtacacacgttttcaataaatttataggttacttttcctcttcctgtgaacaactttgagtttccatttccagctttagcatagtctacccacttgaagttctgaaccctaatacatattgtatgtgtgtgttcgggtgggggggcgctg

SEQ ID NO: 750890 - DNA, 514 bp, Homo sapiens
cttcaagtattttaactggtggacttctccatgtacatgaaactggaaatgtcctctccccatctgagcagtgttggagacccccccaaccatagcctctgtcactaggattgtgatcatcatgctaaaggaattatatgattgcactttaaagttagtgtaaaacatgggcctgataatactccctagaataatttgtttctgtttctagattttctaatgtattgttggtagaattggttacaagagtataatattaaatataagagtcatctagaaaggaaataaatatgtagaaacaaaagcatgcaatcctcattttttwaaaaaaagaatattttatattcatgactttaattcatcattaaacttgaatgatggggagtggagtttagctgcaatttagctgctttcctatagaaaaatggcaattcctataggaaatgccaattaaagaagcttttcaatttaggtccagagaacacatttgtaagttatgtcatatttacctaat

SEQ ID NO: 750891 - DNA, 624 bp, Homo sapiens
cagtacaccaagaagcttagagaatatttgtttttattgttgttaactgtgcatctagttcattagaatatatctgtcaaataaatatagccctctcaatgcagtggatttttattggaaacatgtttaagttagattatgtagaaaatttactgccttatttttaataagatctaagcccttttgaaaaggcatatggtaactgaaacatttatttcaatccattataatacaacaaacaagccttcagcatcatctgtgtgtcacctatcaagcagtggattaggtgccagtatggcaaataagaaagatctacaagacttgatcaatcagtccatttcactcctggagttcraatggagtggaagaggtcagaagattaaaagactcacactaaactctaccaaaatattataagacattcagtgctatagatccagatcttaaactgtcatggaatgtacccgtacaggagggatgacttttgcttagagtggatcaatgaaggcacctagggatatgtgctgtttgagttgagctttgagtaattaagtcactgggtgtgggaaataaaagcagaacacacacgtatcaggctgttcttgcattgctatgaaaaacact

SEQ ID NO: 750892 - DNA, 624 bp, Homo sapiens
cagtacaccaagaagcttagagaatatttgtttttattgttgttaactgtgcatctagttcattagaatatatctgtcaaataaatatagccctctcaatgcagtggatttttattggaaacatgtttaagttagattatgtagaaaatttactgccttatttttaataagatctaagcccttttgaaaaggcatatggtaactgaaacatttatttcaatccattataatacaacaaacaagccttcagcatcatctgtgtgtcacctatcaagcagtggattaggtgccagtatggcaaataagaaagatctacaagacttgatcaatcagtccatttcactcctggagttcgaatggagtggaagaggtcagragattaaaagactcacactaaactctaccaaaatattataagacattcagtgctatagatccagatcttaaactgtcatggaatgtacccgtacaggagggatgacttttgcttagagtggatcaatgaaggcacctagggatatgtgctgtttgagttgagctttgagtaattaagtcactgggtgtgggaaataaaagcagaacacacacgtatcaggctgttcttgcattgctatgaaaaacact

SEQ ID NO: 750893 - DNA, 543 bp, Homo sapiens
agtccctggagatttcacagagcttccttcacatctctccctaagaagagaagcctgagaaaacagatgggtcttcctctgtgactctgagatcagcagcccagcctctggcaactaatcaaggggaagaattccagggccaatggcccttctgaaaaaaatattctgcttcctttttcccagaactcaaagtgaaactcgaatttatcgagttggttatcttgtatctcaacaaatcastaaatgtttccccagatttagtacaaaagaagaaaagaaaaagatagacaaagatgggagagtgcacatacacttaggtaatacggtcactctcaggagaagccaaatagctcataagattatgttgcaattatgaactgaagtaaaataagaataaaatgaagcaaattagccttgattgatatcaacaaaagtgaaggtactaaactttataagaatgaatagtcagtaccacagttgggggcttaagtatatgaagtatacaatatgatggaatattatgcaaaatattttctcagctta

SEQ ID NO: 750894 - DNA, 423 bp, Homo sapiens
caggaaggaggaggctgagctttcttgccaccagagaagatcaatcaggatccctttaaggcagggagagccacatatcctagtcttccaaagacacaggatgaatttcaaaggaacagaaatggcaagtcaccaaaaaatagatccatatgttgttgttgttgttttttaaagtgaaaatagcttgtttttttttttagtagaaaaactaccacatgcttattatgaaaaattcagacaacacataaaaagacaaagagtagagccaaaatttgaacccaggcmgccaagctccagagtttaaggtctgtactttgtagtagttagttactactgccccttgggtcttcccagaattaaacaagagctccaagctgctatttgaatcacagtttggtgaaagggagtgaattttttagaacc

SEQ ID NO: 750895 - DNA, 635 bp, Homo sapiens
tggtgaattttagaataagtcccatgtggcactgagaataatgtatattctgtttatttggggtggagggttctgtagacctctactaggtccacttgatccagaggcaagttcaagtcctgaatatccctgttaattttctgtctcattgatctgtctaatactgacagtggggtgttaaagtttcccactattattgtgtggtaatctaagtttctttgtaggtctccagaaacttgttttatgaatctgggtgctcctgtattgggtgcatatatatttagaatacttagctcttcttgtttaattgttccgtttatcattatataatgcccttctttgtctttttttatctttgttggtttaaagtctgttttgtcagagactaggattgcaacccctgcttttttgtttstttgtttgtttgctttcaattgcttggtaaatattcctccacccctttattttgggcctgcgtaagatgggtctctgaatacagcacaccagtgggttttgactccttattcaatttgacagtctgtgtcttttaattggggcatttagcccatttacatttaaggttagtattgttatgtgtgaatttgatcctgtcatcattatgctatttggttatt

SEQ ID NO: 750896 - DNA, 635 bp, Homo sapiens
tggtgaattttagaataagtcccatgtggcactgagaataatgtatattctgtttatttggggtggagggttctgtagacctctactaggtccacttgatccagaggcaagttcaagtcctgaatatccctgttaattttctgtctcattgatctgtctaatactgacagtggggtgttaaagtttcccactattattgtgtggtaatctaagtttctttgtaggtctccagaaacttgttttatgaatctgggtgctcctgtattgggtgcatatatatttagaatacttagctcttcttgtttaattgttccgtttatcattatataatgcccttctttgtctttttttatctttgttggtttaaagtctgttttgtcagagactaggattgcaacccctgcttttttgtttctttgtttgtttgctttcaattgcttggtaaatattcctccacccctttattttgggcctgygtaagatgggtctctgaatacagcacaccagtgggttttgactccttattcaatttgacagtctgtgtcttttaattggggcatttagcccatttacatttaaggttagtattgttatgtgtgaatttgatcctgtcatcattatgctatttggttatt

SEQ ID NO: 750897 - DNA, 583 bp, Homo sapiens
aaggctttggaaactgtggttcaacacattcacagatgtacctgctccatcatactggacaatataactctggaaaagcaaggttaataacgataaatagttgaccagaagatagtttaagtgataataagctgctgagtgaaactaactgaagcaaaagggagtttggaagaaaaacacaaaaagctgtgggacctatttcaaagcaagctaccaccaattgttttcttcactaaaatgagacagatacagaaagaaaaaagcatatmataattaagcaaaatatgtgccaagtgatatattaccttcttgcttttctctccttaataggtatttgcttttgtatagagcttgcaaattaatttctttctgttaggaataaagggtagaaagggtctctttttcccacataaataccaccaattatcacttatgtaggccaataggccagtggctatttttagtattgttttggctaattttctttttgtaaaaatgtaaaaattaacagaagtaacttgggaaggcatgcaaatatttagatatttgacttaaaaagagttccaaggggcaaggcccatct

SEQ ID NO: 750898 - DNA, 622 bp, Homo sapiens
caaatatttagatatttgacttaaaaagagttccaaggggcaaggcccatctcatgagatggcctctgccatctgatttataggggtccaggccgacctcctgactcttcatttgctggttcacaacaccaaactcaccactttgccttctaggaaaaggcttcctagagtccagtgtctctaatattaggggcataaagtcttatctgcagatactttgggcagaattataataggtacccttaaataggayttttcacaggatagaagctcaggagaaaggagagtatctggtaaggaaaacgatgggggcttgaaagggaaagacgttgactgtatcagttacctttcacgggtttctatcaatgccttggatacaagttcagacataaatattaaagtcacacacacacattttttgacactaattccacaattattttctgatcactaagatcatatcaattggctcacttcaacctctaataatagatttgcattagtagtcagctctaggcatgatattcattaaggcacaaagacctgctattctttcctaggctcaggaactgggaccaatgttaaaatgttatcgtagccagaaatgagtcgacttaaactt

SEQ ID NO: 750899 - DNA, 626 bp, Homo sapiens
caagaaagagaaaagccctaacaccaggggctggggagtccagtccgaagccttcttcagcctcctaggcctgccccgcttccaaataacccctagcggggtagcgtcactgtctccatggagacaggggcccgcccccgccttaatccctctccacctctgcataatggggaaaatagcactgcatgatgacaaattccggagaccaaaatagggtccaacgcatcctgagacctcgagctggtaacgtacagggaaggtgaacagtgagtcagcccttccttccgctaagtcaacatagtggccttattcccaycactccaggctgggaaaggacaaacatacaagaaatgcttttaatcacggaataagactaagcctcaagccccctcatctgccaaagagtgtgctctgctgtcaaacctcaaagtcattgagaaacaaaccctgataatctcacccagcttcaagaccaagggagtcctagtgtcatggagaagagcaaggaggggcccagggctgccggtaaatgaccaagggcaataatgccagacgaacagaagtaccatcccagcccagggtgcatgagcggaggcaggcaggcagcaggtggcgccatgggccgg

SEQ ID NO: 750900 - DNA, 620 bp, Homo sapiens
tgaaagacacaaataaaatacaactgttcaatggaaatagaaaataaacaccataaaagagagaagagaggtaatttgttagcatcaagagtcaagttgctatatggtcaaaggttaaatttatctctaaaaaatggcaggattcaaagttgtacatacatgtgattacttctgttttttacacccacatacagtacaaaagattattaaaaatattcccaaaaggcaggtgcaatgatgcacacttatacccccagccactcaggaggctgatgcaagaggatcgcttgagcccaggagttgaagtccagcctaagcaacatagtgaaaccccatckccaaaaatataataataattctctcaaaatactaaacagaggtggttttattgataagattttggctgtttggttttccactattctctattggctaaaatttgtttaatgagcatgaaatgtttttattttattttgcttatttttatgattgcaaaaaatgatatgagtttctccctgccaaggcaaaaaaatatatatatacctatatttatatgtgtatgtctagatctatatctctacatctccatcgctgtctctgtctagagatagagatatcga

SEQ ID NO: 750901 - DNA, 567 bp, Homo sapiens
atggctcactgcagcctccatcttccgagctcaagcaatcctcccaccttggcctcccaaaatgctgggattataggcgtgagctatcgtgcccgtcctaaagaactttctttagcgcttctcatagtggaggtctgctggcgacaagaatctctgttttcttttatctgaaaatagctttatttcatcttcattctggaagaatactttcactagaaaaacaattctgagttgactttttttttccttcagcattttacagatattccactgtcttctggtctatattggttttgatgagaaaagagtgacattgaaaatattggtctgtctagyctttaggatgggattaaaaaaaagaaaagattttctcttgtctttggcttttagcagtttgaccatgatgtgccaaggcatgccctttttttcattgaccactctgccagttagagacgaggtcccagtgtaggggaggtggtgctgaaaacacagcggggcacagctcagccctagcccacaggggcctgcagtgaccagctatgcacagagccatcagctccttctcca

SEQ ID NO: 750902 - DNA, 637 bp, Homo sapiens
tgtgcaaagagcgtgcaaagaggcagggagagaataagaaagtgacagagagggaggtggtgacagggatgagagacagagaagcggagcaggggaatcagagatcaatggctagatggagagaaaatgatagaaacagtggcacatgcgcagccagcgacatacagagaaaacaacggatgggggcagacagaggaagagactcgacaaagagcctctgtcaggcccagggagatggatgggagagaatcagagtggaggaccgagctaggctgaggctgagagatggatggacaggaagagacctggacacggagggagagagaagcggagatgagaaaaacaaagacgtggagggacagagagaaagacggggcraggcagaaaccctgactgtcagaagcaagtgaagaagaggaaggagccaggcagtggaagagacagacatggagacagggtcagagacagaggaacaggagggaatgaagattcagagaaaagagacaggaggtccagagagcaaggcagtaacttcctgcacgtggagagttcagtgcaaatggatctttgtaagacttcatcgccttgacaggaagtgaggtcctaatagacatcgattataaaataaaaagcgtgt

SEQ ID NO: 750903 - DNA, 516 bp, Homo sapiens
gaagtagtaaatgtggtacattggttcccattcttttggaaaggtgtgtgtgcttgttgtgtgttgagattttgagccacccattttgatatccatttgtttcagtaccatttattgaaaagtgactcatccttcacgcgttgcctttgcaaccttgtcaaaaatcagttgtctatatctgtttcatttctttctggactctctagcctgttttattgaacactttgtctttacaccaatattatgctgttttgattactatagttttataatgatattgtcatatttgggkgtgtgtgtgtggatatgtgggtgtgggggagaagaaagttgcagtcatcaggacatttcttccttaaatacttaatatgcaagttttaaaaataagggctttgtcatacttgtcacagcaaagaaaattagtaatccccaaatatcatttaatatacagtccatattcaaatatctctaatgtctccaaaacatctatggctgtttttcttaaaaatgtatgat

SEQ ID NO: 750904 - DNA, 562 bp, Homo sapiens
aactggttcagttttccactttcctttgtcatggacggatcttccttcttaggcttaagcatctgttttctgctagaaatacacaaagaacacttctccttggaatttaaatatttatttattttttgttagaaggtgggattacatgaagaataagatgaagtcttacctcacctctgcaaaatgaagactgcctatagtaattggcagagaacatgaaaatggccaaggaggtaaagakatttttttgtcctttagcctaagaagtcagcttcctcgagcctccacaacctgggatgggggaggggcaggtgaattggagtctccgaattacttatacatattggttcctaaatgttcgtaattatgcttcctaaactgtttttgttctacggcaagagaaccaagagtggaaagacagatatgaatcagttcacaaataagattggttatcagaccaataagatcagttctgatcaactggtcctggctggttggagtgttgcaaagatctgtgaggctgcatccacattctcagcaagagtatacagtgatgcattgg

SEQ ID NO: 750905 - DNA, 655 bp, Homo sapiens
ttctggttctacagaggacccctgccgttggcctatctcttaacagatgtttgctgggtgctggccatgtgtcaggcactatgctaggtgctgggaggattccgaaacaagaaagcatgcaagattcctgccctcctgggccttaaaggaaagtagggaagccaaacattaaataaataattataccaataagtatctaattacaagttttataagtgttaataacaaaaattgcagggtttgctacaaagcatgtaactgaggacctaatcttgtattaggggccagccaaagtagttctttgaggagatacatttaatctgacacctgatggatgagtaatagtcactaaaataaaagccaaataaagaattttatacactcccaaaagagatattttacagctttacaaggctcaaatccaactaattcacccctgtctctgggtagtactggatgttctattttaccacttatgagacaatgctttggaaagccaaaaactaggcartcacacttggtatctacccttcatccttcctgcgacagtttgaagtgagagttgagtgttctggatgatgaatctaattgcaacttattctgtgctaaaacatagttatggtcaaggtaaaattactaacctttggagatattc

SEQ ID NO: 750906 - DNA, 655 bp, Homo sapiens
gttctctgttacagcatggatgaggcagacagaaatcacctctaataaataaaaagtataggcttagggagagctatactttattttaaaacacccgaaaatctttccttatatcgtccagtctaataagtctttctagtttttgctatggattagtctgtgcaaagaagaaaaacttagcaaaaataattaaattagcaaaggaaatatacgataataccaataaaaagttaaaatctacaatttccattgaaaaactgtaatacagacaatatgacgtgaaataaatccaaggcattataaatttgaatacatttcatttactgtttcattaagtctttttcttaaagttgcaatttcataamctactctacatgcacttagtaatatatttttgtgaactatatgtttccaggtcatttataaattggcatttagagcctagctatgtaaaatgtaagcatgtttcagagtatatgtaacaataaaatgttgattttaaaaaaattcatgaaatcttgttgttaaaagagatgctaattaaaatattaaagttagctttaaaaaatctattatttcacacattaaaaagtgtatttgtaccatataaaaaataaatgtaccatgtacctaatatactgatcccttcctgatc

SEQ ID NO: 750907 - DNA, 591 bp, Homo sapiens
ttctaaaatgtatttgtaaccccaaaatcaattcatggtcatttgtagatattttcagagtggcaaaaaatttgagtcacctgatatgcatgttaccagctggggttgaacaaggtgatgctttggcttgttgtttcagctctgaatctataaacaagtgycctttgtagtttatttagtgttatgttttttcacatttttgtttgttttgttgttaatttcagtgtttaaaatggtcactaaatgaagtacaaacatgccagctagtgttcctaaatgcaagaaagctgtgatgtgctttatggagaaaaagtatgtgttagatatgcttcattaagacatgagttatagcactgtttgctgtgagttcaatgttaaggactcaacaatatatattaaacaagttgtttttaaacagaaacacatgcaaaacaaagttatacattgtctggttgacgaaaatgttgtgaacaaaggcttggaggaatcaaaccctatagtttccctaggagtaatggttcagtagttgttatttcagtgtttgtggcagcttcattgaacataactcctgtgaataataaaaattgtata

SEQ ID NO: 750908 - DNA, 568 bp, Homo sapiens
cacaagattttggagtacatggaagccaaactattgaacaaagctcacccttcatgaaagcatcttcaaaattctagtaacacaagtccctaagggggaatgggaattgcgagcttctaaatatacttgaaaaagcaaagcactcgaataagaccagtgactggagctgccgttgtctgaatttctaaacattgctagcaggtggaaagatctcaagaaaccttttctgagaaagaagtcaatatgaggacaaagacttyctcttgcaaacatagtaaatgcagtgtccaaaatcaagctcttgtgagaacatttctgtcaaccgtgttcacattcatggattgtgacttcaggacaaatggcagctactaatcgacatgctgatgaaactaaaacttctctcaaaggccattaagtttctgggtaccatctgtgccaacactaattcagataatgcagaaggcttgctaaattttgggatttcttttctgttcgagttctgaacaatttgagaaaatgtgatatagagaactaaaatacgaggagagactaagttagagtgactagt

SEQ ID NO: 750909 - DNA, 540 bp, Homo sapiens
gattttatgtatctatccacaattgtaaacatagatgaattccttttgcattgccttttaaagcaaggctaagctccagctgccagaccacactgaatggaaatgaaaatgtttctcattcttcagacttgtgatcatttcagagcatttattcattgtttggaacctgctcattataccattttactatataatgaagacaaatgctcacagtttagctacagatttggttaatgacaagatgtataataatacaagataatagggccrggccattgcattctaattaaatatttttgtcagatttttttcctcatgaatcttcttttatttgccatgctttatggctatttttctttctaccttgaatatatatatatacacatattgttaaaatttatatatatacatgtatataatattacatacatacatataattttaagaacaaaaatagtttcaagggatttgggaattgggctttgtcttctctatatgtgtttttctgcagacaagccattgagtttagaagggaatgca

SEQ ID NO: 750910 - DNA, 552 bp, Homo sapiens
gaagaagacaggagtggggcttccatgttcgttgtggcattattcacattagccaagagatggaatcaacttgggtatccattaatggctcaatggaaaaaacgtggtacacatacacaatggaatactattcagcttttttaaaaaaggaaacctgctatttacaacaacacagatgaactggaagacattaagctaagtaaactagccaatcacagaagaaaacctctgtgatctcactcagttgtggaatctagaaaagatgaactcacagaaacagagagtagagtggtggttaccagggactgggggagggggtgttggggagatattgatcaaagatacaacatttcatttaagtaggaggaataagtccragagatctattgtaccacatggtgactattcttaataacaacatattgtatacttgaaaattgctaagacagtagagtttaagtattcttgccacacacacaaaaaagtgaggtaatgcatatgttaattacttcatttaaccattccataaagcatacataaaatcatcatatt

SEQ ID NO: 750911 - DNA, 612 bp, Homo sapiens
gtcactgctatggatcaggtgatactgatgcaattcagtgagcaggcagcttcaatctataggagtcatctgggcctgggagataggccagctccccctccacttgggcagatctcactctcctgcagccacgtgaatgccacaggtctaagacagatcctgtggtgttaacattttgtgttctcaattacgtagaacaaaatgaggccaaagctacttacggttattctaaatgatacttctgtttggcttcacaatgcgtttacatgcttgactcacctgtggtcagcagtctcagcctcagagatgtcacagtagaggaaatggtattgatggagccaagtccgccctccagcccactgcagaaacaaccaagcytgagttggccacctccctccagcctgtcctaacacatgctcaggacaggacctgaccagtgggtaaggagtttgggtttcaaagaagcagaaccataggctgagttcagagactgaatcaatagatagatagatgtcagacagactaataattatcaggccaagttggtgctggtcaagaacttggccatgagattgatctcaaggagtcagtggtggaggatatggttggttc

SEQ ID NO: 750912 - DNA, 628 bp, Homo sapiens
cttggtacgggagcatcctccacaactgttttcaggcaacctacagcctcgcaacccagggctctgaggttggctgaggctcagtaattttctgtactgcctcaggcattgtgcactgcagtaacgcctgtgcacttggggaagacagtatctcttctccatcctcccagaaagtaaaaagggaaaggcttgtatgtgtgtggggtctccctgtcctccccccattgctagtaaatcscctgtgtgaacgctctcctttgggtgccctgagtcatcaaggggaatgtgcatccccctgctgtctttctctagtctccatttcttaattattttgcccccagtgccctcggctcccttatttaagccagccttaccagaagcagcctccagtgcaccttctcccgcctcaccctccccgcaacttcaccatgacctggaggaggctttaggagagggacctggatcttcagctttgcgcctacttggaagcactaggcatccagcttggctgcaggctccaggcgagttaaggacagacacagctaaatcaacccccagggcagtcagaatttcctccgtggtttgaaagctgagttcttaaataatcttccccacacttaccacatgc

SEQ ID NO: 750913 - DNA, 518 bp, Homo sapiens
acccaagagctctgatggagatgtacaaagagattaatgttgttttcatatgtaacacaatatccattctgcagcccatcaatcaaggagtaatttcgactttcaagtcttattaagaaatacatttcaggccaggcatagtggctcatgcctgtaatcccaacactttgggaagctgaggcagtcggattgcttraggtcaggagttcgagaccagtctgggcaacatggcaaaaccctgtttctacaaaaaatacaaaaaaaaaaattagctgggtatggttgcacgctcctatagtcccagctactgggaagactgaggtgggaggatcgcttgagcctgggaggtggaggttgcagtaagcagcaatcgtaccactgcactccagcctgggtgacagaatgagaccctgtctaaaaaaaaaaaaaaaaaaattcataaggctataggctatagctgccatagatagtgactcccctgatggatccgggcaaagtcaatcgaaacccttctggaa

SEQ ID NO: 750914 - DNA, 641 bp, Homo sapiens
cctttctcaagaagccgttcctgtagccaatctttgcaagcacgatgcgtaagacacagtccctgccttctacatggcccattttaaacagcactgccaggtggggatcatgtgtacctgtcctgccccaaatgatatcgatgatactgacatgaggaaaagcacactgggtggtcgtgcagggggctggtgggtggaggggttagttagggtctcacactagctaaggaccagagtcactaatattcrtcttccccatttaaatctcggcagccccatggtctccactcccactctgtggaaaggattccaagtccttgctccttcccctgtccccacctgtacttgaggtacatcccaaattgttttcaggtttgctctgggacatgtcaaaggcgacaagggcacaatggctttctcaccttttctgctaaatgacttcctcctccaaacttctttgcttctgttaaggggccaacatccaaccagacacaacctcagacacaatcatctcgctccctccatcacacacacacacgtgctcacacagtcaggtgctaatttgcactgatccttcctttgcaatgtcctgagccaggccagaggggcacccactgaggagccggctgctgggaagcggg

SEQ ID NO: 750915 - DNA, 632 bp, Homo sapiens
gggctctgaagacgagtgactaaaaacagctgtcaagcccgtctgtccagtgtcagggtaatgtgttcggccatcttgtactatttagggcaggagggggtccctccttcaatggggtgaataacggtgatcagaacaagcccccactctccatcctgcccctcgccgtcccctgcttggtttcctgcccaccactcatcactgcctgaaatctcattagtcacggacatgcctccgtgtccctttctagaatgtctatcaaagcagggtcttggcctgccagtgtgtaagccctagatccgttcctagtacacagggaatgtctaaggaatgaatggagggagcggtgagaactcaacgaggacagagtgcttagccatctcrgacacaccgcaagcgatctacatattttggctcttattatagatgcttggttattcatctttctagctagactataacctccatgaggtaacaggtggtatctacagtctagcagagtggagctgggcatggtggcgcatgcctgtagtcctagccacttgggaggctgagatgggaggatcacctgagcccaggagtttgaggctgtagggcagtatgcccatgcctgtgaacagccctgcactcca

SEQ ID NO: 750916 - DNA, 560 bp, Homo sapiens
atccagatagacctggatatgtatggagaaacagatgaacaagaatgtttcttataatattgtatgtaataattatagtaaatggctgtaacctagatatccatcattaggggaatgattaaataaactgtgatataacagagccctgtgcagtcagcaggaataaaataaatctgtatgtcctgtatatggaagaaggatgcccacgggtgagtggggcaggggaatggtgcgagttaggttagccaaaactgacctgcaagacacagttccaccatacagtcataagtgtgtattgacactgctgattaaagaaagactaagactcacactcctgaaaggggaatctcaaacatctagactgaaatagattaaaacatccaccatactstaacagatgcatgtccaaagtttaactgtgaaactgggggatgatcttgaagccattgccaccagcccgcacacagcatacgtagccagggaacggagccctggtcatcagaggcctcccagcagcgatcaatgcattccaaactctggggtggggcagtttgtcactc

SEQ ID NO: 750917 - DNA, 574 bp, Homo sapiens
aggtggcattgccagagctgatgttggttcaggtaccagcctggggatcccgatgtgtcttaccaaccgcctgctcaaacagaagagccaaaaaggctggcacaagttctgccaggatggcgatgcagggaggaccctccctctgcaggtgtcaccagccgcactgagagaaaaggctcgcgcctgagttttaagacctgggcttggatggcacggtgacacgcaccccgcgggctggtttattttcctccttcccacctcttcacatctccttcaggtgctagacacggagagggccaagagaaccacttgggaaggggactgacaacctcgctggccattgtatggtcrtcaataccatgcgcctgctgtcccgggctctggcaggtggggtgtgttgaggatgctgtgggggcccagagcccacacctaacccaggtggagaccaggactggggactctggaactaagtcctgaagggcgttacccaggtgaagcgggagagcgggagggtgctcattcaaggcagaaggcagggattgggacaggaagagtggaaatagtgattctcagt

SEQ ID NO: 750918 - DNA, 569 bp, Homo sapiens
gtgttaacatgaccctaattcaattagcttgccagtaaattttactgcttggggatgagatctacaaaggcattacacagggacatgaagctccctgctgccaaaacgttggcgctcttcagcggttaaaatgttcttccttctgctgagtgatgatccgcttccatggagtttccatcgctggctcctagagctttcctttggtgattgaaagcatcagtctgcctcctctcctgtctggcatcccttcaaatatttgaaaagggtgactaagttccctctaagcctgttcattctcatccgggtcatcctcctgccctctcttgttagttgtacagagaagtttctagacccttcaccgctgtggctaattccygagaagaggaggtgggctactccggtcttgagagttatgactggacacctgagatgcacaggatataaggcttcatgcaactggaaagaaatttctgcacataacaagtttatactcgtccatgtacaaggccccgagtcaaacacagtcatctgaaattgtcaagtgggagaaaacagctacagatttctat

SEQ ID NO: 750919 - DNA, 473 bp, Homo sapiens
actgaagcacaccttctacacggggaagacagacccgcctccagtgcccactgccctggtggctcagccagagtggcaccaccagtgggcagctgagtgggctgcaggggagagcccagaggtgggcagagcaagtgcacccatggctgcctgggaccaagtgatgattaatggtaatgcctttgatatcatggtgtcatggaattttttggagaaagacataccttcgatatcatggtgtcatggagttttttggatttgaaaacgttttcttataaatgtcatctaaaggctgtttctgtcataatctawcccaggaaataaatgtatcaagtattttaggatgaagtaaaggtcccgagaacattaaataactacactgtcataattgtcggttgcttgactctgaataaagccaaagaatatccaatggatacaatgcaagaaggaaagatgaccatttgcctggatcc

SEQ ID NO: 750920 - DNA, 637 bp, Homo sapiens
aatacttctgtgtagtttttatttgaggatagttccttttccaccacagaccacaaagggctccaaatatccattgcagatgttacaaaaagagagattcaaaactgctcaaccaaaaggtagtttcaaccatgtgatatgaatgcacacagcacagagaaatttctcaaaatgcttctgtctagtktttatttgaagatattgccttttctaccataggccacaaacgtctccaaatatccacatgcagcttctacaaaaagagagattcaaagcttctcaatcaaaagataggttcaactctgtgagttgaatgcacacttcacaaagaagtttctcagagtgcttctgtgtgtttttatgtgaagatgattccttttccacaataggcctcaaagctctccaaatatctgcaagcagagtctacaaaaagagagattcaaaactgctcaatgaaaagataggttcaactctgtgagttgaatgcacacctccaaagaagtttctcagaatgcttccgtgtagtttctatgtgaagatatttacttttccacaattgtcccaaagctctaaaatatccacttgcagaccctctgaaagagtgtttcagaattgctcaatcaaaggagaggttcaa

SEQ ID NO: 750921 - DNA, 541 bp, Homo sapiens
aaaagagagattcaaaactgctcaatgacaagtccaactctgtgggttgaatccatgcctcacaaagaagtttctcagaatgcttctctgtagtttttatgtgaagatatttcctttttcacaataggcctcaagctttccaaatatccacttgcagattccgcaaaaagagagatacaaaagtgctctatcaaaagataggttcgactctgggagttcaatgcaaacatcacaaagaagtttctcagaatgcttctgtgtagattttatgtgaagatgttytgttttctaccatagggcaaaatggggctccaaatatctacttgcattttctacaaaaagagagattctaagctgctcaatcaaaagatacgttcaacactgttagttgaatgcacacatgccaaagaagtttctcagaatgcttctgtgtagtttttatgtgaagatatttgcttttccacaataggcctcaaatcgttctaaatatccacttgcaggctctacaaaaagagtgtttccaaattgctcaatcataagg

SEQ ID NO: 750922 - DNA, 550 bp, Homo sapiens
aaaagagagattcaaaactgctcaatgataagtccaactctgtgggttgaatccatgcctcacaaagaagtttctcagaatgcttctctgtagtttttatgtgaagatatttcctttttcacaataggcctcaagctttccaaatatccacttgcagattccgcaaaaagagagatacaaaagtgctctatcaaaagataggttcgactctgggagttcaatgcaaacatcacaaagaagtttctcagaatgcttctgtgtagwttttatgtgaagatgttttgttttctaccatagggcaaaatggggctccaaatatctacttgcattttctacaaaaagagagattctaagctgctcaatcaaaagatacgttcaacactgttagttgaatgcacacatgccaaagaagtttctcagaatgcttctgtgtagtttttatgtgaagatatttgcttttccacaataggcctcaaatcgttctaaatatccacttgcaggctctacaaaaagagtgtttccaaattgctcaatcataaggtaggttcaa

SEQ ID NO: 750923 - DNA, 550 bp, Homo sapiens
aaaagagagattcaaaactgctcaatgataagtccaactctgtgggttgaatccatgcctcacaaagaagtttctcagaatgcttctctgtagtttttatgtgaagatatttcctttttcacaataggcctcaagctttccaaatatccacttgcagattccgcaaaaagagagatacaaaagtgctctatcaaaagataggttcgactctgggagttcaatgcaaacatcacaaagaagtttctcagaatgcttctgtgtagattttatgtgaagatgttytgttttctaccatagggcaaaatggggctccaaatatctacttgcattttctacaaaaagagagattctaagctgctcaatcaaaagatacgttcaacactgttagttgaatgcacacatgccaaagaagtttctcagaatgcttctgtgtagtttttatgtgaagatatttgcttttccacaataggcctcaaatcgttctaaatatccacttgcaggctctacaaaaagagtgtttccaaattgctcaatcataaggtaggttcaa

SEQ ID NO: 750924 - DNA, 590 bp, Homo sapiens
tagtcaaatggctttttttcatctgttgaggtacttattgatttttttttttttagtctgtgactatggtgaattacattaattgttttctgaagtttgaacctttctaatccctttactatgcagcagttagttatgaagtagcacccactttatacatacacgtgattaatttcctaatattttattaaacacttttggtctgtttatgaagactactggtctgcaattttcttttacttttaatatagcagattgctgttttgctttgttttgtttcttttcttttttcaaaaatgtgatmtcactatgttgtccagcctggcctcaagagattcccccgcctcagcctccccagtagctaggagtagaggcataagccactgtgtgcccagctcagatcttgttagtaaggcaatgctgtcctcataagtataggttgaggtgtatttcttccttagagatctctctctctctctctctatatatatatatatacacacacacacatatatatgtatgaggagttatatatatatgtatgaggagatatatatatgtatgaggagttatatatatatgtatgagga

SEQ ID NO: 750925 - DNA, 590 bp, Homo sapiens
tagtcaaatggctttttttcatctgttgaggtacttattgatttttttttttttagtctgtgactatggtgaattacattaattgttttctgaagtttgaacctttctaatccctttactatgcagcagttagttatgaagtagcacccactttatacatacacgtgattaatttcctaatattttattaaacacttttggtctgtttatgaagactactggtctgcaattttcttttacttttaatatagcagattgctgttttgctttgttttgtttcttttcttttttcaaaaatgtgatatcactatgttgtccagcctggcctcaagagattcccccgcctcagcctccccagtagctaggagtagaggcataagccactgtgtgcccagctcagatcttgttagtaargcaatgctgtcctcataagtataggttgaggtgtatttcttccttagagatctctctctctctctctctatatatatatatatacacacacacacatatatatgtatgaggagttatatatatatgtatgaggagatatatatatgtatgaggagttatatatatatgtatgagga

SEQ ID NO: 750926 - DNA, 590 bp, Homo sapiens
tagtcaaatggctttttttcatctgttgaggtacttattgatttttttttttttagtctgtgactatggtgaattacattaattgttttctgaagtttgaacctttctaatccctttactatgcagcagttagttatgaagtagcacccactttatacatacacgtgattaatttcctaatattttattaaacacttttggtctgtttatgaagactactggtctgcaattttcttttacttttaatatagcagattgctgttttgctttgttttgtttcttttcttttttcaaaaatgtgatatcactatgttgtccagcctggcctcaagagattcccccgcctcagcctccccagtagctaggagtagaggcataagccactgtgtgcccagctcagatcttgttagtaaggcaatgctgtcctcataagtataggttgagrtgtatttcttccttagagatctctctctctctctctctatatatatatatatacacacacacacatatatatgtatgaggagttatatatatatgtatgaggagatatatatatgtatgaggagttatatatatatgtatgagga

SEQ ID NO: 750927 - DNA, 633 bp, Homo sapiens
ctttctgctaaaatctgctattagcaggaaccttgggactatttccagtagctgtagcctggagcagaattttctgcctttaaagaggcctagtgcagcagattagatgtctgcttttagtgtgataaggcaaagatttcctttgtatggaattatctgatactaacactgtgtktgtgtgtgtgagtgtgtgcataacattttcatcacatcattgggtgcctatgtgaagatccaaccagagaaatatggaaattcagttacattgaattttattgaatatccagtttcagctcaaaagttcttcaatcattgcttattttcaagccacataatcttttatttacctcatcttttattttaagaaacttgtggagtgtcatgttagtttggactctcccatgaagatgctattacacctcctagaagaaaaatacataatctgattgttttcattagaattatgtgactttaagaaatgtgagtctttagttactaggatgagtatacatagttctaatcagtatgttgtcagatttattcaggcactattttattttatttattttttattattatactttacgttctagggtacatgtgcacaacgtcgaggtttgttacatatgtata

SEQ ID NO: 750928 - DNA, 618 bp, Homo sapiens
ccaaatgtcccacctctcaacagtgttgcgttagggattaagtttccaacacatgacctttggggggcatattcagaccatagcggtgggtccttgcagttcccccaaatctgccacgtaagtaatcgaagattccactgttacccagtgtgcacacattcgccaagcctacatgtcccccattcatacatatatacacaccctcttgcagagctggtggtgactctttttatcatgttcagatatttcacaaaggtctcagggaatgaccaattggccagtctctgagaaattccatggaaatttgcaaaaaagaaaacacctataaaaactgacatttcatcwcaaaaatcctaataaattttgttgcatacatatgcacaatagaatattatttagccactaaaatgatacgaagtttaggtagcaagatagaaaatattaatgactataattttaggctaacccccctcccgggcatagatatggtataaatattatgccatattgttatgctctgcataatgacggtttggttaacaatggaccacatatatgatggtggtcctgtaagatcagaatatactttttttactgtagcctctctatatttagata

SEQ ID NO: 750929 - DNA, 617 bp, Homo sapiens
gctttcataatttctgtccttaatgttggttagaaaggcttttccaccgccaaattgtataaatctcttgtaccttcttctagtagtgcagtggtttcattttctttttacatttcaatctttgttttattttgacacaaggcagatgtctaactttattttcccttggctttyttttcacttccctagttacatacaattccctccaactatgtgacccacacaacaactccaaaggagtttccattttgctcttaaggaaactagggcagagaggtaactcatcacatttaaaatcacacagccattaatttacatagtcaaggttcaaacccagatcttttgatgcaaagtcctgttctctcatactccaagtatggtccagggatgggtagcattggcaatacccgagagcctgttagaaatgtagagtcatgggccccatcccatacctaccgaatcagaatccgcatttctgttaggttggagaagtactgcagggtgtactgtttccccagacttaggccacatcagagtcacctagggcatctgttgagctccatctctcctcaatattttaactcagtaggtctggactgaagaccaggaatctgcat

SEQ ID NO: 750930 - DNA, 529 bp, Homo sapiens
ggagctcccttcagcatcattttggatattaacttgcttttatgttggatcctcaatttcctggttccaacttcttcctttttgttggtttattctttcattctggtgagacgtatcctctagtacctcactctcaccgtgtggtctacagatcagcagcactgrtgtcacttgagagcttgtcagagtgctcaggcctcactctagacctgctgaaccagaatttgcattgtaacaggttcccaggtgatccatggcactttaatatctagaaagcactgttctggtagctcatgagaaaggctaaaaaaaatttgagtccttgcatttctgtatatgcctatacactactctcacttttgactagcggattgattgggaaaaaaacttctaagttgtaaataattttctgtaagaaatttcaagacatttttccattgtctcctaacttccaatgttgctgttaataagttcaatcccattatgatttttagtccttggtgtgtgacctttttatttccagatttct

SEQ ID NO: 750931 - DNA, 620 bp, Homo sapiens
gatacagaacattttcatcatgtatgaagattcccttgtgattcttaccagaaaatacccctcaaccaaaggtaaccacaattttaagttctgtcaccactgattaactgtgttcgttctagagcttggcatccacggaatcacacratcacactcctctatgcctggcttctttcagggtacattatgtctgtacaggcattttgttttgagttgctagtcttgctttctgattcaccatcctttcttctccaccccttgactctgtggcctcccctgtccctcttcacaactcagcgtctcctctgatcagcttcctgatggctgtgaagggacggacccatcccggcatggcgccagctggtgggtgtgcacagtttccgtgataattatccacagtcagctctttgaacttgggccaggtacacagctgccaccccatgcaaatacattaaatacgttcattgttcctggtagctaaacagtgtctgtgagaaagtgtgtgtggcggggtatgtaaatctgatctgaattcttggctctttcacgatgcatcttttgatctgagcaggtctgtttctctgtccctctgattctcattccttcaagccccttggatc

SEQ ID NO: 750932 - DNA, 514 bp, Homo sapiens
aaaaagatggtctctgagtggtgggattatagaaactttttttttcttcgtatcttgtttctcctgcccccaatcccaatagtatttaaagagagaagaattgaatcctcttaaaaaggtataaagtgattctggcaacacggagtagaacattcagggtcgcatgtcgagggtgccggttcagacgcttctataaatacagacattcggttggtaggcatttaccgtgagctcaggctgggaatggacgacaacaaaaactcttctaagcgtgggtaaaactctcagcgaaggggcttcaagtcatgagttccaacaggaaaggcatgaaccaagaacagaaccaggacacctgaagagaaccggygcgaggctgccccttcccgggtgtgcgggctcagagtagaaacgcgcctcacctctgcagccttgggcccctagggaccagaagaggtttccagagtccaggagcatgactgatggcggggaagcttctggagccagccagaggccc

SEQ ID NO: 750933 - DNA, 663 bp, Homo sapiens
cctacatctcagacaacacttcatgtaaagtacacaaatcaaggaaacagcttcatcactgatgttacctttaatctaacaagatctctataaaacaagaaaacctctacgtacagatcttttaaaattaaagcaggcatctttgctgatccacctctataagttgcaggttgagtatctcttatctgaaatgctagagaccakaagtgtttcaggtttcagatatttagattttggaatatttgcatatacacgagatatccaggggaagagacccaagtctaaacatgaaattcatttatgtttcatatacacctcatatatatatagcctgaaggtaattttatacagtatttataatttgtccaaggaacaaagttttgactgtgttttgactatgactcgtcatgtgaagtcatatgtggaattttccacttgtggcatcacacaggcactcaaaaagcttcagatttgggagcatattggatttcgcatattcagattagggatgctcaacccatactcagtttaccagtaaaaaaacataatgtttgcaattactcctccttttaaatatataattatttttggtatgggggaaaagagtgagaactttatttcactttaaaaatcaattttatagaggtatattttatatacagt

SEQ ID NO: 750934 - DNA, 468 bp, Homo sapiens
ttagcttcatcttgattcaaggattttaatcattcaagtaatctattctacgtattagtatacctgcaagttattaattaatgtcacagcacctggtatttcctctggcatagtacttcctacagttatttcagttcctttttaaatgtctgtttacccagataaactaagcttttgacaggactacagtcaactttgttttgtgtctcttgtaactaacggagtgtggggtacataagagacactcaacaaatatttgtcgattgagtcaataggtgaatgaaggctgtatatatatcattgacttttaaaaawcaaataactagctagtttttggtggtttttctatcttcccagtagattataagttgctctagagacaatcattcaattttggaacataaccatcatatcccatggtacttaaatacagcttagttcactggtataaaaatcctaaaattcaga

SEQ ID NO: 750935 - DNA, 572 bp, Homo sapiens
ccatgagccagaggggaaccttctgccttgaagggaaggatccagttctagcaggattcatcaccagctgactaaagagatgttgggccttgaacatcactggtacccaggcagtacttgctgtgggccttgggtaagacrcagggctgtgctggcttcagatgtgacccaccacattttcagctatggtggccatggagagagactcctgcagaggaaaggagagagacaagtaaagggactttgttttgtaccttggataccacgtcgctacagtggggtagagcactaagtgggttcctggcatccccagctccagactgtggctcctgaacaacatcactggaccttccctgggccaggaggagcccactgccctgaagggagagaccccgggctggcagcattcaccccaagctgactgaagagtctgtaggctttgagtgaacatcagtggtagccaggcagtacttgctgcaggcctgggatggtggtgaccataggggagagactccttctgcatgaggaaaagagaggaaaaagtgggaaagacattgtcttgtggcttgggt

SEQ ID NO: 750936 - DNA, 528 bp, Homo sapiens
aaataggtgttttgagtgaaatttaagataacgcagagaagcctttcaaaatcctatcagataaatttaacagaaagatggaaataattaaaatgaatcaagcagatattttggagctgacaaatggaattcatatcctgaagaattcatcagcatatcttaacagcagaattgatcaagcagaataaagaattagtgagcttgaagacaggctccttgaaaatacagtcacaagggacaaaagaaaaaaaaataaaaaaagaaggaagcatgcctacaagacctagaaaatagcctcagtagggcaaatctaagagttattaaacttaaagtggaggtagagagagagaggcgtagaaagtttattcagatggttaataacagagaacttctcaaacctagaggaakatatcaatattcaagtacaagaaggttatagaacaccaagcagatttaaccgaaataagactacctcaagatatttaataatcagattcccaaaggtcaaggacaaagagaggatcctaa

SEQ ID NO: 750937 - DNA, 662 bp, Homo sapiens
aatctacaaggaacatcaatacatttacaagaaaaaaacaaacagccccatcaaaaagtgggcaaagaatatgaacagatacttttcaaaagaagatatttatgtggccaagaaacatgaaaaaaagctcatcatcactggtcattagtgaaatgcaaatcaaaaccaggagataccatctcacgccagtcagaatggttgattatgaaaaagtcagtaaacaatagatgctggcaaggctgtggagaaataggaatgcttttacactgttggtgggagtgtaaattagttatcttaattctttatttgaaaaacaccaatacctaccacaaatattgcacagctttacygtctttcagtgttctttagcctcttctctctctttttcaaaacattatccttccttttcctctctttcttcctcctcctcttctgttttcttattccccttctcccgctgtctcctctttcttcactacctccccctcttccccttcctctgcctacctctcccatcctcctgcttcccctccgcccccccacttcctcctctgtttttctcttttgcttcttcttcttggagctatcaggaatctcagaatcaatctctcaattttgtctcaaaggcagtcagtggtagagtgatatttagcagaagtttt

SEQ ID NO: 750938 - DNA, 638 bp, Homo sapiens
tttcactctaacactacccattggtccaggatttatttatttctttagagaggagcttcaggagcctgtgggacccttcgggcaaaatcagtagatgtgattttttcatatgaaatagttttaaatatttggcctactcccaggcttccataattattcaaaccgaagggaaattgatcacatctcagcagaaatgtccacgataattagaacatcacacatgctttaacacagtagctttatgtctatgagactctggttgacacgtgaaaggaacaccagtcagccgttatttaattcctcatgttggctacatgcaaatatgragaaaagtcccagactgaatgacatacaaatgttgggccagtctctgaaatttcttttctttttttgctaaaaattttaatgtttttgtgttgaccattaaaaacactttgtttgcctttattttttcttgtagacagatttacttgacaaatctccttgaactaaaacccttggacacatttaccctattacactgcacattctaacacatgactatacaatggctttttaagttttaatttaaataccccagttttccatttatactttaaaatcactaaaattataatgaatataagtactcatttgcc

SEQ ID NO: 750939 - DNA, 613 bp, Homo sapiens
catacagcaaaagaagtataggaggatcctccccagaaatcttttaagagcctcttcattactttacatatattaactcatttaatccttaaaacaaccctatgagaacttagatacctcttttattttttatttatttttttatttttttttgagatggagtgtcgcyctgtcgtccaggctggagtgcagtggcgcaatcccagctcactgcaatctccgcctcccaggttcacaccattctcctgcctcagcctcccgagtagctgggactacaggtgcccgccacctcgcacggctaatttttgttgttgttgttgttgttgtttgtttttttgagacggagtctcgctctgtcgcccaggctggagtgcagtggcgcgatcttggctcaccgcaagctccgcctcccgggttcacgccattctcctgcctcagcctcctaagtaactgggactacaggcgcctgccaccacgcccggctaattttttgtatttttagtagagacgggatttcaccatgttagccaggatggtcttcatctcctgaccttgtgatccgcccgcctcagcctcccaaagtgctgggattacaggcatgagccactgcgcc

SEQ ID NO: 750940 - DNA, 529 bp, Homo sapiens
tactataaaataggcatctgggaatagagacacataggaaagatagaggtaggactgatgttaaaaccagctaaaaagattgagcagagtgaacctcagaagctgaaaagaaattagagattcctccatctttagaaatttctgggcataggcatccaattctaagattctaatttggatccaatgactgaagtagacttacagtaatttcagaatacccaaagtcacaagaagttgtccayctgattgttcaggtctgaaattcctttgaaaagagaaagcatttcgtttcagaaacaggaaaaatatatatatacacattatacaagtatgtaaatacattatatatgtatatatatgtcaaatgttaagaccatcggtttacataaattcattcattctaaagtataagcaatcacagaaatgatttaatgtcattaatgtatttttgttccgatagaggaacagagtttgagaataaattagcatttaaagaagtgttcacattaagaaagggtgagcagaaaca

SEQ ID NO: 750941 - DNA, 634 bp, Homo sapiens
caaaagttcaatagtggagttccatctcccatctatcaagaaaatagtgaagggcagaatttatagggaattcctaacatcctggataacatggatttttttttacaaattgataagaaataaatgatttttttgtcttcctcagatggagagcacaycaaatcacacagttatatcatagtgaaattacacaacaccaagataagacaaattttaaaagctaagagaaaagctattataaagcaacaacattagaataattaagactattaatcagcaagtataagattcagctaacaaaatacagctaaatatagatatttaagaaaatttaaaatgtgggctattatcacccatacggaatgtcatagttgtctctgagcagggaagaaattagacctcacaagagtaaaagcaacacatgtcaactttatctgtagtcctttttgtttattgtggtaagaaaatttaaaatctactctcttaaatttttatttgcacaatacacttttgtgtgcactatgggcacaatactacacagaaaatctctagaaattattcatcttggacaactaaaactttatagctattggatagcaaaccctccatttctaactcttccatcccttttaac

SEQ ID NO: 750942 - DNA, 634 bp, Homo sapiens
caaaagttcaatagtggagttccatctcccatctatcaagaaaatagtgaagggcagaatttatagggaattcctaacatcctggataacatggatttttttttacaaattgataagaaataaatgatttttttgtcttcctcagatggagagcacaccaaatcacacagttatatcatagtgaaattacacaacaccaagataagacaaattttaaaagctaagagaaaarctattataaagcaacaacattagaataattaagactattaatcagcaagtataagattcagctaacaaaatacagctaaatatagatatttaagaaaatttaaaatgtgggctattatcacccatacggaatgtcatagttgtctctgagcagggaagaaattagacctcacaagagtaaaagcaacacatgtcaactttatctgtagtcctttttgtttattgtggtaagaaaatttaaaatctactctcttaaatttttatttgcacaatacacttttgtgtgcactatgggcacaatactacacagaaaatctctagaaattattcatcttggacaactaaaactttatagctattggatagcaaaccctccatttctaactcttccatcccttttaac

SEQ ID NO: 750943 - DNA, 619 bp, Homo sapiens
aatctctagaaattattcatcttggacaactaaaactttatagctattggatagcaaaccctccatttctaactcttccatcccttttaactgctactctaccatttcttcccatgaatttgactattttaatgacctcatataagtgagattatgtagtattcgtctttttgtaaatggttgtttttcacttgacatagtgtgtacaaggtgcatccgtattgctgtatataacaaaatttccttcatttattttaatagagcagttttaggatcacagtaaatttcagtgaaaggcacagagatttttcatatattccttgctcccacacatggatagccttccccattatcaacatcctccaccagagtggtacaactgttacaattgataagcctacrcagacacctcacaatcaatcagagtccacagtttacattagggcttactcttgatattacacattctatgggtttggaaaaatgtgtaatgccatgtagtcatcattatagtatcatacagaatagtgtcactgccctaaatatactctgtaatcaaccttttcattcctctcaccttcgtaaccattatcaaccactgatcttttcattgtctcca

SEQ ID NO: 750944 - DNA, 619 bp, Homo sapiens
aatctctagaaattattcatcttggacaactaaaactttatagctattggatagcaaaccctccatttctaactcttccatcccttttaactgctactctaccatttcttcccatgaatttgactattttaatgacctcatataagtgagattatgtagtattcgtctttttgtaaatggttgtttttcacttgacatagtgtgtacaaggtgcatccgtattgctgtatataacaaaatttccttcatttattttaatagagcagttttaggatcacagtaaatttcagtgaaaggcacagagatttttcatatattccttgctcccacacatggatagccttccccattatcaacatcctccaccagagtggtacaactgttacaattgataagcctacacagacacctcacaatcaakcagagtccacagtttacattagggcttactcttgatattacacattctatgggtttggaaaaatgtgtaatgccatgtagtcatcattatagtatcatacagaatagtgtcactgccctaaatatactctgtaatcaaccttttcattcctctcaccttcgtaaccattatcaaccactgatcttttcattgtctcca

SEQ ID NO: 750945 - DNA, 653 bp, Homo sapiens
ctttcagcccagacacttccagccctaggtatctttatttggggtctccagagacctttttataaaattcgagtaaggaaggggaaaagttgaagatacttttcctcactctaactcagtacttttctactctttgccctttgcttttctctcatcccgtcccaggtccataaaactgcaggattttttttgtgggggagctccctgggcgttgagatgacccccgtgtctgtgctgagccccctgaccttcaactggtgtccttggggagaaaatggaataggggtggggctgggggttcagcataatctctggtattagccttytgcttatactatctcaatcagaaattaaaggtctgtttgttacttttattttgggtttgttgctttgattggctacttgagcatctgagatttcagctctcctcagctcagcggagctcctgacacagttacataagttttcttcagagttttcaaaaaataattcttagtgtgttagtcactcatttagattctgtctcttcacttagcagatatttaaggagcaaacccaccgccctgcagtatgctaaggtgctaagttgtgtgctgcaaaacaggagaaaccaacattgttacccttgaggaagtgtagaaagtggagaaaag

SEQ ID NO: 750946 - DNA, 625 bp, Homo sapiens
ctgacctttattcctgaagtcattcgattgattacacaaatttctattaaaatgtttatactaggaatatacaaagtggcttctgtattcttaaagaaatatgggctgattatatttatatctacatatatcagatattgatatggttttgctgtgtccctacccaaatctcatcttgaattgtaacttycataatcccaccagtcctgggaagtacacagtgggaagtaattgaatcacaggggtaggtttttcccatgctattctcatgatggtgaatatgtcccaaaagatctgatggttttataaagggcagttcccctcatatactcttttgtctgctaccatgtgagatgtgactgtgctcctccttcaccttccaccatgattgtgatgcctccctagccatgtggaactgtaagtccattaaacttcttttcctttttaaattacccagtctcaggtatgttttcataagcagtgtgagaacagactaatatagtaaatttgtactggtagagtaaggtactgctattaagataccccaaaatttggaagagactttggaacttggtaacagggagagattggaacagtttaaagggctcaggagaagacaggaaaa

SEQ ID NO: 750947 - DNA, 625 bp, Homo sapiens
ctgacctttattcctgaagtcattcgattgattacacaaatttctattaaaatgtttatactaggaatatacaaagtggcttctgtattcttaaagaaatatgggctgattatatttatatctacatatatcagatattgatatggttttgctgtgtccctacccaaatctcatcttgaattgtaacttccataatcccaccagtcctgggaagtacacagtgggaagtaattgaatcacaggggtaggtttttcccatgctattctcatgatggtgaatatgtcccaaaagatctgatggttttataaagggcagttcccctcatatactcttttgtctgctaccatgtgagatgtgactgtgctcctccttcaccttccaccatgattgtgakgcctccctagccatgtggaactgtaagtccattaaacttcttttcctttttaaattacccagtctcaggtatgttttcataagcagtgtgagaacagactaatatagtaaatttgtactggtagagtaaggtactgctattaagataccccaaaatttggaagagactttggaacttggtaacagggagagattggaacagtttaaagggctcaggagaagacaggaaaa

SEQ ID NO: 750948 - DNA, 625 bp, Homo sapiens
gaggcaggagaattgcttgaacccgggaggcggaggttgcagtgagccaagatcgcaccactgcactccagtctggagacagagcaagactctatttcaaaaaattaattaattaaaataaaaaaattgaatttctaatgttaagtcacctttttattcttggaataatctaatttgagcatattctattatctgttttatgtatcattgactgctaatatttcatttacaatttccyatctaataaaagaaattttcctctattcttatagaaatgtcaagtttgatcttgctttactgtcctcataagacaagtcatgtgaaagagttttagaaatattgggatttttaaaataattgatcaaatttactgctaatgtcctatgaatctttagtttcatgggaagatattaaattacatattcagtgtttctaatatttatagcaatactaggtttagttttccattgcttaattatggtaaatgtggttttctgaaaatttatttaaattataaaaataatctacataaagtctattattggatgattttaaaattactataatatcttcagtaatgtccccctctgaatattaacatggctatttatgcttacttgcattt

SEQ ID NO: 750949 - DNA, 572 bp, Homo sapiens
ccaactctcttcagacttgcattgtttaagatatttgttcctctgtccataacatgcctttttgttttgactgatttcaagattttgttttaatcattggttttcaatgatttcattatgacgttctttggtgtagctttgtttataattcttgtgcttggagtttgtcgagtttcttggatcttgtgaatggcacttttattcaaacttgtaaacattctggcccatgttagatatttcttgtttactgttcttccttcttttcatctttcatcttctatgaattctatttgcgtatgtattaggcagcttgaatttgtctcaccattcactggtgctctgmgtatgtattctataattctacttattctctgtttatagatagatagattttttttctattgctatattttcaagtttactaatattttcctctgcgaagtgtaatttccattctgcattttttttcagcattatattttacacttctacaactctgacttaaaatatatctttcatatctccacctaaattttgagtatggagaaaacatttatgggggggaaggaatg

SEQ ID NO: 750950 - DNA, 642 bp, Homo sapiens
tcctcctgcctcgacctcccaaagtttcgggattacaggcgtgagccaccgtgcccagcctgaaatgaatcttgaagggacataagaattattcaggcaaagaacaaggaaagcattaaagcaggaagaaggtctagcatatgcaaaggcatggatacctgtgggagcatggtaccttctgggaatgggtagtaatgggcaatgsggagcattagaagatttagacaggtgagtcatatgataagatttagtagagggatcagcctagctgcaatgtggaggatggatttaaaagataagttctgaagccaggagatccattcagaaggttaataacaacagagagggagacgatacagttgaagagcagaggtgaagcattgtggaatggagactggttaggaagaaaagtgaagacatgaggggccagtgtcaaaggaaagaaaggcaagaaactggaagtctcaacagacttaaagaccaggcttcccgggggcaagggaaagaagagctgtaaggctaggatgttgcggtcagaatctagggagtgagatttcagtccagctctcctgcaagggtgtgataaaggtggtggctatgagagtgagtggctacagcaacacagaggtaagtcattggagt

SEQ ID NO: 750951 - DNA, 642 bp, Homo sapiens
tcctcctgcctcgacctcccaaagtttcgggattacaggcgtgagccaccgtgcccagcctgaaatgaatcttgaagggacataagaattattcaggcaaagaacaaggaaagcattaaagcaggaagaaggtctagcatatgcaaaggcatggatacctgtgggagcatggtaccttctgggaatgggtagtaatgggcaatggggagcattagaagatttagacaggtgagtcatatgataagatttagtagagggatcagcctagctgcaatgtggaggatggatttaaaagataagttctgaagccaggagatccattcagaaggttaataacaacagagagggagacgayacagttgaagagcagaggtgaagcattgtggaatggagactggttaggaagaaaagtgaagacatgaggggccagtgtcaaaggaaagaaaggcaagaaactggaagtctcaacagacttaaagaccaggcttcccgggggcaagggaaagaagagctgtaaggctaggatgttgcggtcagaatctagggagtgagatttcagtccagctctcctgcaagggtgtgataaaggtggtggctatgagagtgagtggctacagcaacacagaggtaagtcattggagt

SEQ ID NO: 750952 - DNA, 372 bp, Homo sapiens
gccctcccactctatgattttagctcctgtccctccttcctcacagtgcaagaggttccgggatcagctgtccccgaagcaggtagagatcctgagggaaaagctctgtgccagtgaactgttcaagggcaagaaggcttcatatccccagaggtgagggcctcccagaccctgyacagccagttccatcacgcagcagttctcaaacttgagcgtgccttagaatcacctggcaggattgtcacccccaggtgctgtgtccctcctcagagtctctgatccagcaggtcttggggtgaggaccaaaatttgcctttctaacaactccccaggtggtgctgatgtcttggtcctggactgtgctctgtggac

SEQ ID NO: 750953 - DNA, 558 bp, Homo sapiens
tatccaaaaggccagaaccgttaaaaaaaaaaacacccaggggagtgccaagtatgggctggacaccgtttggagccacaaagttccagcccaggatagttagagtatctgagttcttctgagacaaacttgtttcaagaccttggccaatgagatgtcccctctgcccctcttggtcaatgaatgagarggattgccatcctaccccttctccttgagagtctgtgaggatgagggaaattggggcaggaagagggtagtacataggtgtgcctaggcaactgggttggtatgtgtgggggtgtgttctgtgtaaatgcacttctgtgtgtgcacaacagccgaaggatgcctgggttctggaaagagaggcgctgctgagacttgagatttgagatgaaaatctccagccatgatcattgttattgtctctctgcagctgcaattaactggctgtgtggtgtgtgcccaccaccctgctgtacgcaagttgctaaaaaaaaaaaaaaaatcacagggacaatcaagagcccgtgctgggcaacagctctagaactt

SEQ ID NO: 750954 - DNA, 608 bp, Homo sapiens
ctaccactgggaaagttttggaaggatatgggcagaaaagaaatgatctaatttacattaatggctaaagtttggagaacaggttagatgactccaggttttttgctatgctaggaacacaggagagctgtttggggagccattcaagtagacatgctgagtyggcagatgcatgtacatatttagagagacctgggttaaattagctgtgaattttgagatggtgattgaaatcatgggtggttggaattgccaagggagatataaagagcaggaaaacaagggagactaggaccagtctttgatggattatgacctttaaagtctgaggagagggggatttgtctgcagaggagattgaggaggaacagctaggtaggtggaaaggcagaagagtgtagtatactagaggctgaattaggaatctttcaaatgcatattactgaaatccatcttcaattgatgtaaccaaaaaaagaataatttattggctcctatagcctgaaatcaggactggtcagatatgcctgggttcaagagctcaaacatccagctccttgggaaacagcctctccccccatctctcagttctgtctccttctggatgg

SEQ ID NO: 750955 - DNA, 557 bp, Homo sapiens
ccaggaggctctagctcccttaggctggtgtgagccagaatgggactttctttcaggtttggatggctttgggcaggcggcccccataaaaacgccctggggacttggagccataaacatgcacacactcttcctttggccatggcaaacaaagaacatcctttagtttcactctgtctccaccttgcctgcagcatctttctccaccagcaaggagttccacatgtcaagwctttagtgtctgctgcctgcaaatcctgtaaaacgggaagtgcaggggagagatttccgtactcagaggtcagcctagagctctgccatgacctcacagccatagtaagctacatgaaactccagaagagtctcacattacttgcttctaataatggggccctgacatttctaagttcatcaatttataactatcacttctctccttttcaaagggtaacaattcagataaggttgtaaatatatgagggtcctctgagctcgtcctccagactcaaaattctttcaggcttttcttgcaaagcagtggaggacttggggtttat

SEQ ID NO: 750956 - DNA, 633 bp, Homo sapiens
ttatcatatcagaatgaagagagttccatccaaatgcaccagcaaaccaggtcataaaggagatgacagaaggcacctgtgcactaaggcagtggcacatgacagtaacatttccttctgcagcaaatacatgaacctttagtcagcttgttttgaccacagttagaaaatattaccagtgtagtgaccacaaatggtatttgaaaacatcacgacggtttgragatccacctcccacatatttatacagcctgtcctccacctcctacataaaactacttttcttttgtttgacattcttttttgaaataacgtttgaaatcgttcaaagtcatgaacttggaggtgagtaggtctagctgaaaatctatatttagctttgcagcaggcttgtaaaaacttgtttttattttgattgttgtgggtttgcacccctggagtttcattttgacttttagggttaagtaagtttcaaaatgaaatgcatccagttgtcaaattttcccccaggttttaagttttaaaacggaggtctctcttatttcgtattagtttttttcccctaaattcctctcctctccctctggtaccctgataatctccttcctcctataagtgtaatccttttctctt

SEQ ID NO: 750957 - DNA, 470 bp, Homo sapiens
ctttcaaaattatttgtgttatagccttaaaatgcctaatgttcagcttggcatgagagtggcaaatactaatcctaatgtactatgaaaacatttctcccaaaaaatgtatgataagtgaccattaaatcttttaaattactcacaaagatgatattcatttgaggaagaaaagtattcacaatatgtgttttcaaaattggaagktgccatcctttttgaagtctggctaagcgtgattccatcttgcagaggaaagtaaacttattgtactgtggctcttgactcaaaacataatcttagtaaaaccacttagaatttccatctgtaaactaaaattaaattggttgtttttctgctgccatccatttgagaggaacagtaaatgaagcaagcttcttaattaaaagtaatgatataagtataggtgtaaaagattgcattcttacaacatacaactcactttcaaa

SEQ ID NO: 750958 - DNA, 625 bp, Homo sapiens
cacaatcacagcagctacagggaaggacaatggtgaccaaggctccctggggctgtcaatttagtccatatccctacaggggacacacaaggctccacgacctagtccctccccaggtcccctggctcgtctctccctctgcccacctcacactctctgctgtagccgtagaaagttcaagaggtgagctctttttcttcaggccttggaacaatctgctcckccttgggaatgtttccccatatttgcctggccaagttttctccaatcttcagcattctgctaaggcatcactttcttccagatgttgtcctggctccaggctctaatactgcctgactttgaagcaccttccagcactttgagcctaactctatcacagtgcatatcacagtgggtggccacagcttgctttatccccctgaattttttccattcagtaacgaattccttagggcagaaactcatttgttctggtgtcactagtacatgcgcctgagtaaattaatgaattctttcaagagaaatgaattagaatgcaagtggtgctcctcaattttcccttgagttcttgtttaaccccctctcttttttttcctgaggatgttcgtttccatctcccaga

SEQ ID NO: 750959 - DNA, 625 bp, Homo sapiens
cacaatcacagcagctacagggaaggacaatggtgaccaaggctccctggggctgtcaatttagtccatatccctacaggggacacacaaggctccacgacctagtccctccccaggtcccctggctcgtctctccctctgcccacctcacactctctgctgtagccgtagaaagttcaagaggtgagctctttttcttcaggccttggaacaatctgctcctccttgggaatgtttccccatatttgcctggccaagttttctccaatcttcagcattctgctaaggcatcactttcttccagatgttgtcctggctccaggctctaatactgcctgactttgaagcaccttccagcactttgagcctaactctatcacagtgcatatcacagtgggtggccacagcttgctttatcyccctgaattttttccattcagtaacgaattccttagggcagaaactcatttgttctggtgtcactagtacatgcgcctgagtaaattaatgaattctttcaagagaaatgaattagaatgcaagtggtgctcctcaattttcccttgagttcttgtttaaccccctctcttttttttcctgaggatgttcgtttccatctcccaga

SEQ ID NO: 750960 - DNA, 668 bp, Homo sapiens
tactcattaaaatcgtatttttctatcagtttctaattggtaattgctcatttatagtcaagctattttttgttttttatggaaccagtaagtgggaattttgctgaacttctttattatagtcttaaggtttttaaattattttttcaggattttctatgtaaacaatcataacatagcaaatattgacagttttgttttctttcttctaatattcatgttctgtaaactcatatttattaggttctatagaacaaattggaacaataacactgataggcattattgtcttatccctgactttactgtggattgacttggtacaattgactgttttgtattgttcttttttctttttcataccaatgaattgtagractaatttatttcctttggttactatgattttcaccattaaagcatagtgtatttccaattattattaatactatttaatcttcatcttaaacaaaataaaattttcagcatgctttaatttctcatgttcaccaatccaacatctttatttagaaaaagatttggaactttatttccaaatgtggctagagtatatgctcagtaattcatttaaaattgttttgttggtgatctctgaaatcttatatggttgagcatcttttgcttggcctctattcttacatggtatt

SEQ ID NO: 750961 - DNA, 668 bp, Homo sapiens
tactcattaaaatcgtatttttctatcagtttctaattggtaattgctcatttatagtcaagctattttttgttttttatggaaccagtaagtgggaattttgctgaacttctttattatagtcttaaggtttttaaattattttttcaggattttctatgtaaacaatcataacatagcaaatattgacagttttgttttctttcttctaatattcatgttctgtaaactcatatttattaggttctatagaacaaattggaacaataacactgataggcattattgtcttatccctgactttactgtggattgacttggtacaattgactgttttgtattgttcttttttctttttcataccaatgaattgtagaactaatttatttcctttggttactatgattttcaccattaaagcatagtgtatttccaattaytattaatactatttaatcttcatcttaaacaaaataaaattttcagcatgctttaatttctcatgttcaccaatccaacatctttatttagaaaaagatttggaactttatttccaaatgtggctagagtatatgctcagtaattcatttaaaattgttttgttggtgatctctgaaatcttatatggttgagcatcttttgcttggcctctattcttacatggtatt

SEQ ID NO: 750962 - DNA, 565 bp, Homo sapiens
gacattttttcagctctctgagcctcggtttctttatctagaaaagtagacggctggacttgatgagttttaatttgcctttcaggttctttgactcaagagaggctgtgttgagtactgggaccctgagctcagccctgcctrggctcaaatccaaaagtaccacgtccagctgtgtaaccctgggcaagtcatttcccctccatgtccagtgtctttaatatatggtactactagtactcaccttatggatgtattgtattaaatatgttaatatgtaaataaggtaatcagttcatagcctataataagtatttaatttttgtattattaacttgtaatgtataaagaacattgtaataccttagatttgtttcagccttggatcagatcaggtgtttctttcactacaatgtaaaatgtcaatatattttatccttggtcctgtgtattcaaattgtgaaaagaaaattcaccaaaagtgaaatttttatttatttgtttatttttttgagacagggtctcccttcatcacccaggttggaatgtagtggcataatcagag

SEQ ID NO: 750963 - DNA, 565 bp, Homo sapiens
gacattttttcagctctctgagcctcggtttctttatctagaaaagtagacggctggacttgatgagttttaatttgcctttcaggttctttgactcaagagaggctgtgttgagtactgggaccctgagctcagccctgcctaggctcaaatccaaaagtaccacgtccagctgtgtaaccytgggcaagtcatttcccctccatgtccagtgtctttaatatatggtactactagtactcaccttatggatgtattgtattaaatatgttaatatgtaaataaggtaatcagttcatagcctataataagtatttaatttttgtattattaacttgtaatgtataaagaacattgtaataccttagatttgtttcagccttggatcagatcaggtgtttctttcactacaatgtaaaatgtcaatatattttatccttggtcctgtgtattcaaattgtgaaaagaaaattcaccaaaagtgaaatttttatttatttgtttatttttttgagacagggtctcccttcatcacccaggttggaatgtagtggcataatcagag

SEQ ID NO: 750964 - DNA, 497 bp, Homo sapiens
gttgtttttaatctaactacaaggctagattacagcaaaggcattctgtttattcttagtatattctgtcaatgactgaaccagataatgcaatacagcatagttcattaattaagataatcacacatattccatgttagtaaattttcctgataactgaagcctttctcttaaagatttaaggtttwctaaaatatttaaccactttccttggaaataattttaaaatatacacgtctctttattgttaatcaaggttcagagaacactcaaggttcacagagggatacattaacaaattattctcttcttccttttgtgcaaattgtgtgcaataatgttccctttgtggttaagctacttttttatattgaaagaatataattttataagtcttacttctttgcatgcggacgggacatctgagtgattcattctaaaaatctgaggaggtagacagggttactgaacagaattatccatatattcgtttaaca

SEQ ID NO: 750965 - DNA, 497 bp, Homo sapiens
cctccagtttcttgaaagagtttgtggatttagtaatattccattattaattattctgtataattcactactgaaaccataaagacttggagcgttatttgtgtgcatatttttacttaaaaattcaccttctttaatggatttaggaatattcaggttacctacttcttttctgagtgagctttggttaatatgkgcccttcaagatatgtgtttgcttcttctaagttattaaatgtacgaacataaagtttgcgtggtatttctttatggtcttttgatttctataaggtgtgtagagactaccatgttttcatttttgatcttggcaatttttatctttttttttctttcctgatcattctggctagagggtttatcaatcttattgatcctataaagagtaacttgggatatcattgtttttgtctgtcttctgtttgttttctagtttgttgatttatgctcttttttctaatttccttttttgtgcttac

SEQ ID NO: 750966 - DNA, 509 bp, Homo sapiens
aattttggaggtgttcaatggaaggaaagttacttgtagttcagcttagcaaatttatcccttgggtggtgtgcccccttctcccctatgcactatcccttcccagcacccccaaaacaggatttgaactatagtaagacaaaaacaagaagtccctgggtcaaaaagtagaggggatgtatgagaggtgggggaatgttcagaagcaggattttttactacagtgttttgaaaactgatgtgtaaagttgaaatcctgtacctatctcttcagcagagctcaggatgtgcaaagctgagatgctatacctatctcttcagcaggactcaggacttgcttagagatgcygttaaaagtgattaaaggccatcttcacttccactgctttagaaatttatgcatatttacattattgaaaaggtttgtcctgtgtctttggggtgtagaaatattaggttggtgcaaaagtaattgcggtttttgccattaaaaggaatgtattagctag

SEQ ID NO: 750967 - DNA, 604 bp, Homo sapiens
atataatgattcatttgaaaaaaaaaattagagaattctttatatttcaatattcagttcaccaggcagaatatttagctccagtcattttccagtcactctttctttctgccattcttttttgagatcatcatacctcaaacatgatatacaggacatgaagttttaaagacrtcctatgaagtcttagcagagcccattattcaagttggttcttcaaggaaagccagtgctaaatttttcttcgaaaaaaggtattggccttatttaaaaagcttgatttaaatatcttggtcatatttggactgatgtatgtagtttttgttgatgggggaaggtatttattattattgtctagtcatttaaaatgtcatactttctttacaagagttctcattcagttgaattcttataacatcagaatattgcttgccatcagtctcataaaattcacatcaaataagagatttttttcctagatcctttctcttcttccaagaaattatctctacaatactcaccacaaaaaggggaaaaacaacaaggttcttcctgtcgaacttgaatcatgaattgatcttctctgcattctggtgttgaaata

SEQ ID NO: 750968 - DNA, 604 bp, Homo sapiens
ttcccttgtgttttctgctagtaattttacaatttcaggtcttgggtttaaatctttgatttattttagaatggttattactaaaaagacaaaagataacaagtattggtgaggatatgaagaaaaagaaactcttacatactattcatgggaatgtaaatagttacagccattatcgaaaccaacatgaagtttcttcaaaaaatttacaaaggaaataaaaccaatacgttgaagagatatctgcactctcatatttattgcagcactattcacaatagccaagatrtggaatcaacctcagtgtccatcaacagataaatggataaagaaaatgtgctgtatacacatgatgaaatactattcagccttaggaaaaaaatcctctctttatgacaacttagagaacactatgtgaggtaacacaagtaaggcacacaaacacaaatacagcatcatgtcacctatgaatagaacctaaaaacgttcaactcagaagcagagtgtagaatagtagttaccagagtctggggagtagaaagattggtcaaaaaatacaaaattttatttagatagaagagataagttcaaaaggtgtattgta

SEQ ID NO: 750969 - DNA, 579 bp, Homo sapiens
agcatggtggcggctaactataatcccagctactggggaggctgaggcaggagaatcacttgaacctgggaggtggaggtggcagtgagccaagatcacaccattgcactccagcctgggtgacaagagtgagacttcgtatcaaaaaaaaaaaaaaaraaaagaaaagaaagaaaactggatcaagacaaggatgtactctctcaccactccaattcaacatagtactggaagtcttagccagagcagtcaggcatgagagagaaataaaaggcattcaaacaggaaaagaggaagttaaattatctccctttgctgacaatattagtctatacctagaaaactctaagggatctgccaatagaattctagacctgatcaattactttggtaaagttttgggatacaaaatcaatgtacaaaacttattatcatttctattcattagtaacatgcaagccaagagccaaatccagaatgcaatttcatttacaataattacaaaaaagaaaaagaaacaaaagtaggaatacagctaaccaaggatgtgaaaaaccatgtcctttgcagtaactcgaa

SEQ ID NO: 750970 - DNA, 579 bp, Homo sapiens
agcatggtggcggctaactataatcccagctactggggaggctgaggcaggagaatcacttgaacctgggaggtggaggtggcagtgagccaagatcacaccattgcactccagcctgggtgacaagagtgagacttcgtatcaaaaaaaaaaaaaaaaaaaagaaaagaaagaaaactggatcaagacaaggatgtactctctcaccactccaattcaacatagtactggaagtcttagccagagcagtcaggcatgagagagaaataaaaggcattcaaacaggaaaagaggaagttaaattatctccctttgctgacaatattagtctatacctagaaaactctaagggatctgccaatagaattctagacctgatcaattactttggtaaarttttgggatacaaaatcaatgtacaaaacttattatcatttctattcattagtaacatgcaagccaagagccaaatccagaatgcaatttcatttacaataattacaaaaaagaaaaagaaacaaaagtaggaatacagctaaccaaggatgtgaaaaaccatgtcctttgcagtaactcgaa

SEQ ID NO: 750971 - DNA, 640 bp, Homo sapiens
atcagcactctgtaaaatggaccaatcagcaccctgtaaaatggaccagtcagcatttggtaaaatggaccaataagtgctctgtaaaatggaccaatcagcaggatgtgggcggggccaaataagggaataaaagctagccacccaagctagcagggcaacttgctcaggtgagtcacgygctgtggatgctttggttcttttgctcttcacaataaatcttgctgctgctaactgggtttgcaccacttttaagagctgtaacacttgctgtaaaggtctgcgttcactcctgaagtcagcaagaccacgaacccaccagaaggaacaaactcaggacacatctgacacaccatctttaagagctgtaacacgcaccgcaaaggtccacagattaattcgtgaagtcagtgagaccaagaacccactggaaggaataaattccggacacgagattacctaaagagatttgacaaaatctaacagccattcaggatttttaaaaaatcagcaaactggaaatacagtggaattttgtcaactttagataaaggacgtctgcaataaactaacagatggcatcatacttaatgatgagaaactagaggctttccctctaaatcagaaaaaaggatgcaag

SEQ ID NO: 750972 - DNA, 494 bp, Homo sapiens
ccccttgaatgaagaagaggctagattttcataaaaaaggatcctgatttgctgccaaaaattgtattactgttaatctttctcatagcctttaacaaaaagaattacatctttttacctgagtcactgttcactggggaaaaggaaataataataataccttttgaaaactactggacactgtctctgaactgaccaggaaacccaaaatttcactgtggtccaccagagtrgggacttaagaagatcagatgatcaatggagttttagcttaggttcatattatgaaggactcagtaggtccctaaacctatactactactatcaaagtttaaccagatgatgtctactattacagctctgtaccaaatatcatatcattgcttcattaaattaacacaacctctagcacctggtttgcagttgttgatctggtatgcagctattgatctggaaaatgttttttttttgctccaataaagttatgtgtcaca

SEQ ID NO: 750973 - DNA, 494 bp, Homo sapiens
ccccttgaatgaagaagaggctagattttcataaaaaaggatcctgatttgctgccaaaaattgtattactgttaatctttctcatagcctttaacaaaaagaattacatctttttacctgagtcactgttcactggggaaaaggaaataataataataccttttgaaaactactggacactgtctctgaactgaccaggaaacccaaaatttcactgtggtccaccagagtggggacttaagaagatcagatgatcaatggagttttagcttaggttcatattatgaaggactcagtaggtccctraacctatactactactatcaaagtttaaccagatgatgtctactattacagctctgtaccaaatatcatatcattgcttcattaaattaacacaacctctagcacctggtttgcagttgttgatctggtatgcagctattgatctggaaaatgttttttttttgctccaataaagttatgtgtcaca

SEQ ID NO: 750974 - DNA, 585 bp, Homo sapiens
gggatgggaattgggtgatgtcggcaaatcaagactgtgttttctaacctcgtcagtgtttgtttccttaatgtgatggtaaaagcaggtagtgtgatcactcacctgattttttgttgttatgatggtaattttttttgcatgaagagttgttcattttggtgttcctgctgggaaraaaattgctattctgccatcttactccaccccctgccccatcttagttttgagatatcttatgaagcacaaaagtttctaattttgatgtagtcccattgatttttttttcctttggttatttgtagatttttggtgatatttaacaatcaattgctaaatttcaggtcaaaagattattcatataatcattctaaaaactttctagcttgctctgacatgtacatctttatccattatctattttgtttgtttatttgttttaatatggtgtgaggtaagggtgcaaactcattttttgtcatgtggtcacctgggtgtcttacacccatttgttgaaaaatttatttttccgcatgaatggtctcaatactattattgaaaatcaattgactatagacacattag

SEQ ID NO: 750975 - DNA, 560 bp, Homo sapiens
tcgtgttctagtaacacatgctgtgacccaaactggcttcctgggcctgtgacctgggccggcaccagggccctgccctcagaatgaacttgtacttgttttgatgctcaactgctgccatcttgaaattcttaatgtttgaacawggctcacacaattttattttgctgtgggccctgcaatttgtgtagctggtcccgcttgtgaaccctcactaagcattttctcttgggtgaagcgtgtctaaaatcaaaacaatgtcagtcagcattaatagaaaaaagacattgtggatggcagcttattgctacagaagtgtcggtggactgacgagagggacagcccatctaccttctcccaagtcatggcattctctataggccattatagatgcagatgagtctctgatatgttttacattaactcaaatatcctttgttgcctgatttctgcttgctgctttcttgcctgacaggacccctacataggactcccagggattatccctgtttgcacaagaatgattactcttagggaaagtcttctaactcaaaatgcag

SEQ ID NO: 750976 - DNA, 659 bp, Homo sapiens
tttcttttattaaaatcttttttggaactcatccaattcaactgcataaagaatatcagagatggctggtatgattggctaaatggaatattcagaagggtctagagtagagccctggggagggtattagcatcacaactgtcttcgtaaagtcttcacaagaactacaaggagctggccaaaactcaaagtgaatgctctgaataacatcctattgtctactctgaggttaaagagggaacttcatacagaatttgtttataaaagaatatttattaatttttttgaactgaatgatcatttcaagacactagcaccaactgtaaggtaaatacgcattttargaaattttgtttttttaatccatctgccacaatcattggggatattgcatttctttactgaatttggatttttgagaatacataaattttatttattttttgtcaaagaactcatttaatttacatattaaaagcacaactcatacttaggacctgcaacattttctttctgagtgacgtttgaaagcagagataagcatcactctacacatcaatatcttgttattttcttacccagtttaaactgaaaatggttaatccactcttgagggaaacacacatttcctgctgagatcttccaagtctgatttccaa

SEQ ID NO: 750977 - DNA, 612 bp, Homo sapiens
agtcctcagagcaactgttgagaatttaagttaaaaataaattatcaaataatgaatttgatcactggttgacctgaatatgtataatacaacctgttgaactctgataaagtcagagtgattattgttgaatgtgaacttgcttttgaataacagacacagttaacgatacttgcaaactgtatcatcagtaccaccccagggggttacaaggttgaccccactcgtatctggagattaagttcattatttctgatatttgtcactcagggatgcctatcttagctgattacatgaaagaactttccaatagacctactctaaaggaatggtctggctcagggaagcaagtcccagctggagtccragaacagagtctgagtgattcacatggaaagactggagcagccaggactggaatgtggaatgggtgggccaatatgcagacactgaagttctttctcgaagtgagcttttaggtctggaattcttgaattaaaactattaaagtgaggaaactttccttctgcatttccttagcatatgtgggattatgttactttgttacaatgagcaaatagaagcacacacacacacacaaccttttttaga

SEQ ID NO: 750978 - DNA, 578 bp, Homo sapiens
tgctgaaacatcaatgctaagggaatttagcaattgacgacttgctgggcaatttagccccattttaatcctgtagtaggttgggaggcagtgcaagagccacttatggaaaaagcagacatgagggtacttgctggtaacatagggaaaaggttactatgcttttacatgtgagatatctgtcatcctattatgttttaaaaaaaccaattaggataaaaaggcaattagtacttagctgcctacattgagagttaccatgagcagacaaattattgcctttgaaaatattgattgtcaagaaacatcatcatcttaccaaatatgtatgtgcatatgggagcattactgtatcagcattcatttaattgaaagcaatctcatcattattcattgatatatactcttaawtgtgggtaattactttctcagcaagagttcattatgaggtatatacaaattatcattcctttaaatatagggggatatgtaggattcaaaactgaggtgaagctgcttcttagtgcattctcagtgtaagatgcagctttggagggctttatgaggaattttaaaag

SEQ ID NO: 750979 - DNA, 439 bp, Homo sapiens
tgaatggagaaaaaaacaaggcccaatgttcttttccctacaagaaacacacttgacttacaaagacacacagagactgaaaataaaggaatggaaacagatattcaatgcaaatgtaaaccaaaaaaagagcaggagtggctatacatatatcagacaaaatagatttcaagtcaaaaactataaaaagagacaaagaaggtcactgtataatsatgagggagccaatttagcaggaggatataacaattttaaatatatatgtacctgacactggagcactaagatatataaagcaaacattataaaagcccaagagaaagatagaactcaatatgacaaaagctggagacttcaacatcccactttcagcattggacaaatcatcaagacagaaaatcaacaaagtaactttaaatttaatctgcactatagaaca

SEQ ID NO: 750980 - DNA, 581 bp, Homo sapiens
atagtttgcaaaaattttctcccattccgtaggttgcctgcaaaacaggtttctattgaaagatgactttcatagctgagaagtcaatgcctggcttcgaaccttcaaaagacaagctgacgctcttgttagggcctaatgcagctggtgactytatgttaaagccaatgcttatttgtcatttcaaaaatcctagaacccttaagaattgtgctacatctactttgtctgtgctctatagatggaacaaggcctgcattatagcacatctctttatagcatggcttaacaattttttttttttttttgagacgggctcttgctctgttgcccaggttggagtgcagtggcgtgatcttggctcactgcaagctccacttcccaggttcacaccattctcctgcctcagcctcccaaatagctgggactacaggcccccaccaccaagcccggataatatttttgtatttttagtggagatggggtttcactgtgtgagccaggatatctcgatctcctgacctcatgatctgcccacctcggcctcccaaagtgctgggattacaggtctgagccacccc

SEQ ID NO: 750981 - DNA, 581 bp, Homo sapiens
atagtttgcaaaaattttctcccattccgtaggttgcctgcaaaacaggtttctattgaaagatgactttcatagctgagaagtcaatgcctggcttcgaaccttcaaaagacaagctgacgctcttgttagggcctaatgcagctggtgactctatgttaaagccaatgcttatttgtcatttcaaaaatcctagaacycttaagaattgtgctacatctactttgtctgtgctctatagatggaacaaggcctgcattatagcacatctctttatagcatggcttaacaattttttttttttttttgagacgggctcttgctctgttgcccaggttggagtgcagtggcgtgatcttggctcactgcaagctccacttcccaggttcacaccattctcctgcctcagcctcccaaatagctgggactacaggcccccaccaccaagcccggataatatttttgtatttttagtggagatggggtttcactgtgtgagccaggatatctcgatctcctgacctcatgatctgcccacctcggcctcccaaagtgctgggattacaggtctgagccacccc

SEQ ID NO: 750982 - DNA, 581 bp, Homo sapiens
atagtttgcaaaaattttctcccattccgtaggttgcctgcaaaacaggtttctattgaaagatgactttcatagctgagaagtcaatgcctggcttcgaaccttcaaaagacaagctgacgctcttgttagggcctaatgcagctggtgactctatgttaaagccaatgcttatttgtcatttcaaaaatcctagaacccttaagaattgtgctacatctactttgyctgtgctctatagatggaacaaggcctgcattatagcacatctctttatagcatggcttaacaattttttttttttttttgagacgggctcttgctctgttgcccaggttggagtgcagtggcgtgatcttggctcactgcaagctccacttcccaggttcacaccattctcctgcctcagcctcccaaatagctgggactacaggcccccaccaccaagcccggataatatttttgtatttttagtggagatggggtttcactgtgtgagccaggatatctcgatctcctgacctcatgatctgcccacctcggcctcccaaagtgctgggattacaggtctgagccacccc

SEQ ID NO: 750983 - DNA, 616 bp, Homo sapiens
ttatatatatttcaaaacagctagaagagagaattttatatgttcttactattaagaagtgataaacatttgaagtgatggatatgcagattatcctgatctggtcattgcacaatatacacatgtattgaaacatcatatcatacctgataaattataaaattattacatgtcaatttaaaaaataattgtttcaaaaaacaaaacatctcctttgtcttttcatggtgaatatgaagagactaggttctctgtcttacagaacattctaagtttttctaaatgtttcttcatagtatacttgaattgtttctctatattttatttcctgtaagttagtcttggtagaaatacggcataaataatgttgagtatttcacactgaatcrtgaaatatataccttcatgttgacccactcttcttaaagctgaattggatcattgtcctaaactggtgcccaccagagagattcactgtaaaggtcatcttctttgtgattatgtggaaacttctgctgggaaccttgccaatattctgtttaatagctatcactagtgattttaatacattttattgattcttgcctgaattagtcatttaattgattgttgcaaa

SEQ ID NO: 750984 - DNA, 666 bp, Homo sapiens
acaattctcctgcctcagcctcccgagtagctgggattacaggcgcatgccaccatgccaggccaatttttgtacttttagtagagatgaggttttgccatgttggtcaggctggtcttgaactcctgatctcaggtgatctgcccgccttggcctcccraagtactgggattacaggcatgagccaccatgctcagtttcctaactgatctgttttgagaacaaggattctcccacagtgcatagagtttgcttaagggcagtcatctggagttcttttgaagttggcctgatacctgagagcaggtgagctttctaccaactactgtgcttccagagtcttccaatcattgttttcttggaacccactcaggctagctcaaatattatgggctttatgtatgtgaggctatggagattgctcagaagtgaaagtcagcctgagtgaactgtatagggtttctctcttacccaaccacctccctcttctttcttatacctactcctgtctcagagtggacataccaacctggtcttcagaaaaagagccaggcatagcagattgaagagggaagaccccaggctgccagttacagactgactctcccgtcttaggggacctaggagaggacatggggtgggatccagagggagttaccgaggcct

SEQ ID NO: 750985 - DNA, 601 bp, Homo sapiens
aaaaaagaaagtgcttgtgaaaccctttagacttttcaaaatactttcaatgttctaattcttgagcagaagagagaaatagagagaggactatataccaaagatttccatctcatccagcaaggagaaagattttcaaactgaaaagggggkaaaataaatatggttaggaggagacacaggccaaaggcatagttacaatatcatatctgctttaaatagtttcaggttccactttgtgacagattttatcccaggctactgagaaaagtcacaagtttgcaaatggaacttagaattcaaaaatattaggaagtgtgctaaagtctaagcaataggcaaatgttttctagacttttcaaaaagggtgtgggggcaggggaagattctggaaatccaagttcagtaagcttgactgagttcagtgaaatcatttcatgtttataatgaagcaggtattttgtgaacagaaaaaaagataattgtttaagaagccagcacgtgctcattgagaacaaatgatgcaaaaccaaccttactttcttaaaaaaacagaaacaaaactggaccagtcaattggggaaatgctataggtaatgta

SEQ ID NO: 750986 - DNA, 601 bp, Homo sapiens
aaaaaagaaagtgcttgtgaaaccctttagacttttcaaaatactttcaatgttctaattcttgagcagaagagagaaatagagagaggactatataccaaagatttccatctcatccagcaaggagaaagattttcaaactgaaaagggggtaaaataaatatggttaggaggagacacaggccaaargcatagttacaatatcatatctgctttaaatagtttcaggttccactttgtgacagattttatcccaggctactgagaaaagtcacaagtttgcaaatggaacttagaattcaaaaatattaggaagtgtgctaaagtctaagcaataggcaaatgttttctagacttttcaaaaagggtgtgggggcaggggaagattctggaaatccaagttcagtaagcttgactgagttcagtgaaatcatttcatgtttataatgaagcaggtattttgtgaacagaaaaaaagataattgtttaagaagccagcacgtgctcattgagaacaaatgatgcaaaaccaaccttactttcttaaaaaaacagaaacaaaactggaccagtcaattggggaaatgctataggtaatgta

SEQ ID NO: 750987 - DNA, 678 bp, Homo sapiens
tttgctatctcctgatattaggaacccgtacaagtaactgagaactaaatagaagatattaaatcacttgaggacccagtattctttaatgtttaatagataaaatactttgaacacataacatttcattgtacaaataatgtaaaaactaaggtattattcacagtaagtattcggttaaattcctattttctaaaagaagaaatacctgtggtattcctagcaccatctttccatgtatctggagtgataacagtaccaagtttcttttcacctgttagaacaagatagtaaaaggaaaattaaactttattatttaataagtgcattacattgygcctaaggttcacaatggtatcgactatcaatggtattaccgtaggagcctgttaatgctgggagagcagccaatcaactgagactcatattaactgtggccaatgaatgactgaccctcagtaaaatgcgtaggataataagatgacttataataagctttcactgttggtttatattttaaacaaatctggtaagtctatttgttccataaatatatactaagcatctatcatgtataaactatacaaagtgctgagaaaaatgaagtgatgaatcagacacaattttaaagggattacagtacactaatttctttaacagcaatctgtaacctgggtt

SEQ ID NO: 750988 - DNA, 556 bp, Homo sapiens
tgggatgtccccaggcagtgcacatgatggggactgaagtccaatacactctctctcccattctctctctttgtctgctaatagcagcagaggtcaagtggaaagcagcctgctctagaaggccaaaggtcatctacaacaatcaccctttgactggtagatgccctaatatgtcagtcggacaaatgatgcctatggctttgaacttgactggggttaaggcagggaccatgagtgagcaagtggactagaggttccaaactgagggaggcactgttgctgttattcaaatacaatgagtgcccacatgcatgagtgaacattttggagagaaggcamctgacctgtagtgccatgagctgcctcattccatcttaactctctgaaagtagaaccaactgaagcctacataccctacttgtctgtcaaattctgcatggaactctaagctatttctcttctatcaatggggatacgggctctgcttaagacagaaaaccatctgatacaacagggcatttacggcagggagcactgggcttggaaccatggatcc

SEQ ID NO: 750989 - DNA, 642 bp, Homo sapiens
aattctttcattctcatttgcatcactaaagaaccagattgtctattcaccctcagagatatcacaaggtgacaagcaagaaagaatttctcaaaataggggaaacagagacaaaagaacattgtattatattttcttgttataactgaattaaattgcatcataggaatggaatggcttaagcctggctctaataggctcttcttgtaataatttaccaatttcaaatattcatagatgataaagtattgttacatggaaaaggcctcaaatccctcagtccactagatgcaggcttattcaagtgtccctggatatatctctatttctatctctatctctagttctgtatgcatgtatgtgtatgtacatgtacacacaaattcaaacatrtacataaacacatatatgcacatatgcacataatacatatgcatcatgtttggaatgtgtactaatgagagagcaggtgtactagtcagtgttttccagagaaacaaccattaggatgtgtatgtatgtacagatagatagatacgtaggtagatagatagatagatagatagatagatagatagatagacagatagatagatagatagatatttttaaaaataaattgaagttgacaattctaaaatc

SEQ ID NO: 750990 - DNA, 642 bp, Homo sapiens
aattctttcattctcatttgcatcactaaagaaccagattgtctattcaccctcagagatatcacaaggtgacaagcaagaaagaatttctcaaaataggggaaacagagacaaaagaacattgtattatattttcttgttataactgaattaaattgcatcataggaatggaatggcttaagcctggctctaataggctcttcttgtaataatttaccaatttcaaatattcatagatgataaagtattgttacatggaaaaggcctcaaatccctcagtccactagatgcaggcttattcaagtgtccctggatatatctctatttctatctctatctctagttctgtatgcatgtatgtgtatgtacatgtacacacaaattcaaacatgtacataaacacatatatgcacatatrcacataatacatatgcatcatgtttggaatgtgtactaatgagagagcaggtgtactagtcagtgttttccagagaaacaaccattaggatgtgtatgtatgtacagatagatagatacgtaggtagatagatagatagatagatagatagatagatagatagacagatagatagatagatagatatttttaaaaataaattgaagttgacaattctaaaatc

SEQ ID NO: 750991 - DNA, 652 bp, Homo sapiens
cacgggatataaaaaaatctttaaaatgttaattttgtgtacgtggggatttaaattgatattttccaaagacttatgtgagtactcagcagtggttttcactctcctccaaaaatcttataggtttctacatgtagcatgtactaaataagcagctacacgggtattattttgtctatgttggctctgggctatgaaagccgttctattaatctgtctgatttttatcagtattatacaaatataaatattrtaatattaaaatatttttcaatgtttggtcaggtaaattcctgttggagatcatatatagtcacaattacgaatattttataaaggtacatttttgtgaatataatcacacacatacatttatacacaattcaatgtataaagcaattgtaaccataattaatcactgttatgtatacaatgtattaaatatttcacatttatcaccagcacaatatttaattttaaataattatggcaactattataatatgtgattttaatgctactgatcaatactaataaaaaacagaatgtagttgcatggaatttgaatagtgtgatatgaaaatgtgacatttagcttcctcttaagtcattctagagtatgttcaattatcataatatgtttatcacaaaa

SEQ ID NO: 750992 - DNA, 652 bp, Homo sapiens
cacgggatataaaaaaatctttaaaatgttaattttgtgtacgtggggatttaaattgatattttccaaagacttatgtgagtactcagcagtggttttcactctcctccaaaaatcttataggtttctacatgtagcatgtactaaataagcagctacacgggtattattttgtctatgttggctctgggctatgaaagccgttctattaatctgtctgatttttatcagtattatacaaatataaatattataatattaaaatatttttcaatgtttggtcaggtaaattcctgttggagatcatatatagtcacaattacraatattttataaaggtacatttttgtgaatataatcacacacatacatttatacacaattcaatgtataaagcaattgtaaccataattaatcactgttatgtatacaatgtattaaatatttcacatttatcaccagcacaatatttaattttaaataattatggcaactattataatatgtgattttaatgctactgatcaatactaataaaaaacagaatgtagttgcatggaatttgaatagtgtgatatgaaaatgtgacatttagcttcctcttaagtcattctagagtatgttcaattatcataatatgtttatcacaaaa

SEQ ID NO: 750993 - DNA, 589 bp, Homo sapiens
attgtaaccataattaatcactgttatgtatacaatgtattaaatatttcacatttatcaccagcacaatatttaattttaaataattatggcaactattataatatgtgattttaatgctactgatcaatactaataaaaaacagaatgtagttgcatggaatttgaatagtgtgatatgaaaatgtgacatttagcttcctcttaagtcattctagagtatgttcaattatcataatatgtttatcacaaaatacacacattccttgagttttggtaatttcagtatattgccgcaattacttttattatttgagagagacataattaaatggaaagcttagtckttctgatttttccaccttaaaagtttcatgctgatagatgtgattcaattttagaaaaatactagacagacataatggagggagctaaacaatgtacatatttgacttgtttcttttacttattttcttctttttttgaacccactcatatttttaattgatgttattttttcattaaatgagtatttaaaacagtactttcaaagctgtgtttataaacgttatttatttgagctgacgaa

SEQ ID NO: 750994 - DNA, 617 bp, Homo sapiens
gggtgctggttctgttttgctttatacaggtgattaaagcggtagaggaaggctatcgtctgccaagccccatggattgtcctgctgctctctatcagttaatgctggattgctggcagaaagagcgaaatagcaggcccaagtttgatgaaatagtcaacatgttggacaagctgatacgtaacccaagtagtctgaagacgctggttaatgcatcctgcaggtacaaggccagatccgagtgattttccagaatgtagctaactcagattgatgtcacaaatattttatcaattaaatcattctcgtatagacattaatctgtgaatctatatgacactaatttatttggatatagtttttgcatgctactctcttacaatgaatgaaatatgtgactaaatgatacttaaaatcacctatacctaatctaatagtgtgacatgccaggtttcagaaaaatgaactatagccayattcaggtagcataaaaaaaaattaaatgtgtgtattttcatgcattttggaggataggtgaggaggaggaatgtaagattataacataagaaaaagccaattaagcactgatgcattttaaaccagagatatctagcaat

SEQ ID NO: 750995 - DNA, 610 bp, Homo sapiens
caaacatttgtcttttaattcatttactctgaccagaagagtaaagttacattgggagacttaccagcattttcccattcagaaagtattggtctgtctatagtaactgctccaaattcctgggggtcataatcattaatacatttcttaccagtaattgggccagcagatcataactccaagaaagctggtttttggggcaactccaggccctttaaatttaactacatgccactttgttttctgtgctttcgactacatttttttcaactgtaagaacatttatcaaaacattatgttaagtaactcaagtaatcagttacttkcttggtcaaaaaaatttttttaaaagttcatctgttcattttgcctactcttcttccaaaaaaaaaaaaaaaagtcagtcattgctaaggactaatggcaaaggagacgggattatcagcaaaagaaataggccagctctcaaaataccttgatactgatttttcacgcatagtctttaccccatacctaagtattaattttatgaaggctgtataataaaataataaaatataattcttagagttattgtcagaagatagtagaagctgagaatggaagaata

SEQ ID NO: 750996 - DNA, 607 bp, Homo sapiens
gctttgacatcagaaagactaggttcaagcattgacctcagtctgacatctaacagccaagaagctttgcacatgccactttccttgctaagctttagttttatcttctataaaaatgaaaaaaatcttcatgccttctctatggagatgttgtgagcattaactgaaatgatgtatcaaaagagctgagcaaaggctggcacatgacaatgctgagtaaatgcagtgattgcctctatcttagtccatcygtgctataacaaaatactcaagaataagccatttataaataacagaaatttatttctcacagttctggaggctgggaagtccaatatcaagacactgccaggtttggtgtctggtgaaggctcatctctgtttctaagatggtgccttgttgcatcttccagaggggaggaacactgtcttctcacatgcagaaggcaggagggcaagaaggctgaatgctgtatgaagcttcttttgtaagggttttaaccctattcatgagagagggtcctcatggcctacacacctcttgaagacctcccctcttaatgttatcccattggccattaagttttaacatctgaattttggaggg

SEQ ID NO: 750997 - DNA, 495 bp, Homo sapiens
ttgttttgcattcatatttaatgtaattaattacttgagtaaaagaacaaaaaatgatttagtgtctcagtggatgaagagaggaacagtggtttccaatccatgctaccataatccctggagagccccaaaagtaataattggyatctcagacccagatgaaatatttcaaaaatgtaaatgatattttaccagaagctaaataatataccaaatttctttgcttttgcttgatgcaaaaccacgattacttttgcacgaacctaataatgctaactcatttgtgagttagtatctgtgagttagtatgggttagtttttgctcaattggcagttagttttatatgccttgaaaaattaaaattggaaattatatttactgcttaaaagatgaagttcctttggcagaaacagttctttcataagatgaagcctgcataagaaaaataattgaagtagccctttagtattatttattccctatacctctggtta

SEQ ID NO: 750998 - DNA, 495 bp, Homo sapiens
ttgttttgcattcatatttaatgtaattaattacttgagtaaaagaacaaaaaatgatttagtgtctcagtggatgaagagaggaacagtggtttccaatccatgctaccataatccctggagagccccaaaagtaataattggtatctcagacccagatgaaatatttcaaaaatgtaaatgatattttaccagaagctaaataatataccaaatttctttgcttttgcttgatgcaaaaccacgattacttttgcacgaacctaataatgctaactcatttgtgagttagtatytgtgagttagtatgggttagtttttgctcaattggcagttagttttatatgccttgaaaaattaaaattggaaattatatttactgcttaaaagatgaagttcctttggcagaaacagttctttcataagatgaagcctgcataagaaaaataattgaagtagccctttagtattatttattccctatacctctggtta

SEQ ID NO: 750999 - DNA, 650 bp, Homo sapiens
atttctgtggtgtgtgtgatgtgtttcctgtgtgtccctgcacaacataaaactctactcttagccttgttgtgaactgaatgtaatgagtgatcagacatatgagctcttcaaccgaaattacatggttttgaatccaagctgtattaaatttactttscagagccaaagtctatgagccaatacatatcagttatgaatctaggattagaagaagttggaaagtggagcaagaaattaattaaaataaggctgcaaaaatacagaggggaaaacaaaaagatgtttttaaatgctaagtcttaaatactgcctatagaaacaagctctatggactgcccagcgtaagccctgtataatgtcaataaaaccagacagacaggatggcaccatgcagatcacggatttgtcccatctagctccttggactaggtgagtgcctgaggacctgctactctgtctaaaaatcaaagcccagtagtggtgggggacattatcatggatttgccacaagtcacttatttgggctttagattaaatctttttgtttttgttttgttttaccatgaatgtcttgctcagtactcttactcctgggatccttaatacagacttcagaaggacatggacatcttgggggaagtaaatgt

SEQ ID NO: 751000 - DNA, 563 bp, Homo sapiens
tctgttgatgtgtatttctttggatacatcttatttgagactatttgagtttcctggatttgagtgttcattttgtttcacagatatgggaagttttcagctgtctgggggtttttcatatatgctttctggttctccttctccccgctctctctctcctctctcctccccctggaaaatctcttgatgtgaatataggtctgcttgatggtatcaaataagttccttcagctttcttcatgcctttttttttattatcgttttctctttcgctcctttgactgaataattttacrtggccagtctttgacttcactgattctttcttctgcttgatctagtctgctgttgaagctccctagtaaatgttttagtgcagttaatgtaccgttaagctccaggatctctgtttggtaccctttaatattttctatatctttattgaaattctcattttgttcatgcattcttttgttaaccttggtgaacatactttatggcagttattttacattctccatcaggtatatcatataactcagtttcctctgggtcagcttctg

SEQ ID NO: 751001 - DNA, 562 bp, Homo sapiens
tttcattttttttgtgggtgctattgtaaatgataatgtgtttttaagttcaaattccacttattaatcagtggtatacaggaaaacaataggcttttgtgtaatagctttgtatcctgcaacctttcattaatcactttttagttccagtagttttttttttgtttttttgtttttattcttttgcattttctacacaggcaatcaagcagcctgcaaagacagttttayttcttccttctcattcagtacaccttttacatcattttcttatgttactgcattagctaggagtccagtacaaagtagaaaatgagtggtgaggggacattcctatcttcttcctgatattagtgagaaaacttctagtttctcatcactaagatattaaatgtagtttttttgtagatgtttatcaaagagaggaggttttcctttattcccagttcgatgagagtttttcatttatttcagcttgtatagatattggattttgtccatgctttttctgcatctattgatataatcatgtgatttttcttctttagcccgttcaggtgac

SEQ ID NO: 751002 - DNA, 553 bp, Homo sapiens
aaactaactttacagaaaagaaaaaaacaaatttataggaaagcaattcctgttgcataaaaacatttatcttggtgattagccatacattgtaaaatcgctgggctatagagtcagcctttcttattctgtgttataagaattgtccagtgcagaaattaataggtttwggggtaggtattttttccagcgtctctcttttttgtgtggtgcaaacctaatgatctgtgtgccctttactaaaaagatcaagtgtcaggacaacgtgctgccctgcattttagggctggcaccatcatggtagacagttgcatgggaatggtatcatgtgagggagttgactatcccctgcttcgaagtagttctggagattcctgaaagctccacatagatgaatcttttgattatactgatcttttcagaagatcttacttcttggtacttagtcacactggtggtgcaaggaggacaaaggtgtcagaccgccgaagttaatccttggcttcacccttcacttgttctactaagttgagtgagtactagcccctcctcc

SEQ ID NO: 751003 - DNA, 553 bp, Homo sapiens
aaactaactttacagaaaagaaaaaaacaaatttataggaaagcaattcctgttgcataaaaacatttatcttggtgattagccatacattgtaaaatcgctgggctatagagtcagcctttcttattctgtgttataagaattgtccagtgcagaaattaataggttttgsggtaggtattttttccagcgtctctcttttttgtgtggtgcaaacctaatgatctgtgtgccctttactaaaaagatcaagtgtcaggacaacgtgctgccctgcattttagggctggcaccatcatggtagacagttgcatgggaatggtatcatgtgagggagttgactatcccctgcttcgaagtagttctggagattcctgaaagctccacatagatgaatcttttgattatactgatcttttcagaagatcttacttcttggtacttagtcacactggtggtgcaaggaggacaaaggtgtcagaccgccgaagttaatccttggcttcacccttcacttgttctactaagttgagtgagtactagcccctcctcc

SEQ ID NO: 751004 - DNA, 647 bp, Homo sapiens
ggtgctcacgttgaatggtgcaggatcctctgtccacatctccagcctgactttgagcacccctcgtcccatgcacagggcatgctttcagtcctttcccctggtcctgctccaccatctccttctttctaccctttcacaggacctcaggtccagtgtccctgctacaggaaagccttccttgtcttccctgattaggtactcctgcgatcatatgccgtcttagccgaatgtacttctccatacatttttgcatttgggtgtgattacttaaccaatgtctcacaccaccatttgaaggtaagtgttttgaggtctgagactgccatttttgctgggtcactttatcttcagtgcttatcacagggcctcgtgtacaataaccatcaatagacacttgttaggtgagtgattcctacccacacctttgggaataacccataaaaatattgarttttgtctcactttgatccgctacacctcaatttgtgacatatattatttgctagtgattttatattctctcaagaaaatggggtgaaaaaccactagcaaaaataagcctgtgtagtaaagtgaatggttccaaataaatatacaaaaattaatagctttgtctttacagattgagtttattcttgcccttc

SEQ ID NO: 751005 - DNA, 635 bp, Homo sapiens
ttctttttgtgaggggagaataaaaacccaagtaatttagaaaatggatccctttgtgtggttatgtatttatactactacatcagctctaaaaataataatatagagatgtattggattgacatggatagaggatcatgttatattaactcaaaaagcagatcataaaatatgcttactatgattcatttgtatgaatacatgtttatgtctatatttacatatatacatatatgcattagtttcctattgctactataacraattaacacaaacttattgcctaaaggaatacaaatttaggcccagtgcagtagctcatgcctgtaatcccagctctttgtgaggccaaggcaggaggattgcttgagtccagaagctcatgaccagcctggccagcatagcaagaccccatctctacaaaaaatacaaagtttagcctggcatgtttgtgtatgtctatagtcccaggtgcttggggagctgaggcgggtggatctcttgagccagagaggttgaagctgcagtgagccatggtcatgccactgcagtccagcctgggcaacagagcaagaccctgtctcaaaaaataaaaataaaaaaagaaaaaagaaacacaaatttattacctcaca

SEQ ID NO: 751006 - DNA, 629 bp, Homo sapiens
tttcccctggtaatagttagtctgcggtgcacctctagctccagccatgaatatttaacaagagaatatgtcatcagaacaagcccccacagccaacgaattaatattaatggggcgaaaattgagcctcctactgaacccttggagaagtctgtaaaggcggtgattacggaygaactcggatgatctcagagctgaccttaccctgggcagctctcagcagcaaccacgtgaaaaacaattaaacattcaacgtggctctcccaccagcctggaattggaggcttaggtgctcctgacaatgtgcatttcaaagttgatctgcagagcagctgacaggtcaggcagagtcacgggaagaagccttggaaaagagcagggcatgaacgaggccagcaggggatggatcattggcttaggaccagacagagctggaggctcagcccaaggccccgtgaggcaggtgaggagcccaggacagaggggctgccaacttcctcgagctgacgtctaactgggagcagggaccccattacccaacatcagccccgacccctacatggtgtctaagtagtccctggcacaaagtgaaggttcagtagagatgagcttgctcctcctgggcctca

SEQ ID NO: 751007 - DNA, 629 bp, Homo sapiens
tttcccctggtaatagttagtctgcggtgcacctctagctccagccatgaatatttaacaagagaatatgtcatcagaacaagcccccacagccaacgaattaatattaatggggcgaaaattgagcctcctactgaacccttggagaagtctgtaaaggcggtgattacggacgaactcggatgatctcagagctgaccttaccctgggcagctctcagcagcaaccacgtgaaaaacaattaaacattcaacgtggctctcccaccagcctggaattggaggcttaggtgctcctgacaatgtgcatttcaaagttgatctgcagagcagytgacaggtcaggcagagtcacgggaagaagccttggaaaagagcagggcatgaacgaggccagcaggggatggatcattggcttaggaccagacagagctggaggctcagcccaaggccccgtgaggcaggtgaggagcccaggacagaggggctgccaacttcctcgagctgacgtctaactgggagcagggaccccattacccaacatcagccccgacccctacatggtgtctaagtagtccctggcacaaagtgaaggttcagtagagatgagcttgctcctcctgggcctca

SEQ ID NO: 751008 - DNA, 535 bp, Homo sapiens
acctctaatcaccaaaacattctgagcaaaaagaacaaagctggaagcattatgctacctgatctcaaaacctactccaaggctgtaataattaaaagaatatgatattggcacaaaaacagacacatcaaccaatggaacagaatagagagcccataaataaatctgtgcatttatggtcaaataatatttgacaaaggtgaccagaacccccactggggaaaggacactctcttcaataaatgatgttaggaaaactagacacccataggcagaagaatgaaactggactccgatttcaccttatagacaaaaattaattctaaatggattaaagactaaactytaagaccaaaaactgaaaaactactagaaaaaaaaaatagagaaaagctttctggcattggtctgggtaaagatcttttgagtttgatcccaaaagcagagacaacaaaagcaaaaatagacaaatatgtttatattaaattaaaagcttctgcacagcaaaggaaacaacagagtgaagagacagcct

SEQ ID NO: 751009 - DNA, 582 bp, Homo sapiens
atctattggagtcactgatatctaaaagaagctatttcaacctttagatttcaaacagtacctttagatatgtgcccacaccctttagctagatttatcacatggagaatagtaatcattgattagtagtttaggagaaatacatgtacgttgaaagtttcctagcacatccttataaaattattaaggctactaaggttgtatgtggttactattttgttgttgttgttccatagaaaactccctcttcttaattataaagagtattattgatgttgatgttcttgctgctgttgtttcactccaccaaagcttggaataagacaaggtcttcaccttgaggagttatagtctactaagaaatatggctatatgaataaatatgttataacattccatgacacacatgccatagaattmtaaagcattatggaaccacagagaaagcagtaactaaagttacaaacagtgactaaaataccagcaagacttctacctggatagaaaatacttgtaacaaatcttaaagtgtaagcagagttagcccaaataaggagagagagaaggcagccccagaaagag

SEQ ID NO: 751010 - DNA, 609 bp, Homo sapiens
ccttcatttccaaaaaatgaaagaaaaacaaaattcaagagagattaaatgatttgtccagggtcacacctttgggatggattttgagcccagccgagccctgctctttcctaaggtgcacttcccattgcccccaccttgcatttgtatkgttcttctgacttttccaggatgtgagctccactattaaaatcagggttttgctctaaattaaatgatatgtaaaaggctcgaatagatacatttggtctcctgtgctggtggcaaggagggagggagctgggccatgaacagagttggtgctggaagcagacagagatcaccatgcaactgttgagccttgtcaaatttgagagtgtatgtgagacccaccaacaaatatccctgtgtcttttgcaagacttcagacattccaggccaccaggctgatcaaaccaatttaacggggctaggggtgagggtgggctcagatttgttcaacattaggctgtgtctgggcgtgcaaagtagtgcatttctcactgactggtcaatactgctgcagcgaagaaagaattaaggaaacatgcgaactgaaaagtgctgtcttgtgctacattatcctggcac

SEQ ID NO: 751011 - DNA, 609 bp, Homo sapiens
ccttcatttccaaaaaatgaaagaaaaacaaaattcaagagagattaaatgatttgtccagggtcacacctttgggatggattttgagcccagccgagccctgctctttcctaaggtgcacttcccattgcccccaccttgcatttgtattgttcttytgacttttccaggatgtgagctccactattaaaatcagggttttgctctaaattaaatgatatgtaaaaggctcgaatagatacatttggtctcctgtgctggtggcaaggagggagggagctgggccatgaacagagttggtgctggaagcagacagagatcaccatgcaactgttgagccttgtcaaatttgagagtgtatgtgagacccaccaacaaatatccctgtgtcttttgcaagacttcagacattccaggccaccaggctgatcaaaccaatttaacggggctaggggtgagggtgggctcagatttgttcaacattaggctgtgtctgggcgtgcaaagtagtgcatttctcactgactggtcaatactgctgcagcgaagaaagaattaaggaaacatgcgaactgaaaagtgctgtcttgtgctacattatcctggcac

SEQ ID NO: 751012 - DNA, 609 bp, Homo sapiens
ccttcatttccaaaaaatgaaagaaaaacaaaattcaagagagattaaatgatttgtccagggtcacacctttgggatggattttgagcccagccgagccctgctctttcctaaggtgcacttcccattgcccccaccttgcatttgtattgttcttctgacttttccaggatgtgagctccactattaaaatcagggttttgctctaaattaaatgatatgtaaaaggctcgaatagatacatttggtctcctgtgctggtggcaaggagggagggagctgggccatgaacagagttggtgctggaagcagacagagatcaccatgcaactgttgagccttgtcaaatttgagagtgtatgtgagacccaccaacaaayatccctgtgtcttttgcaagacttcagacattccaggccaccaggctgatcaaaccaatttaacggggctaggggtgagggtgggctcagatttgttcaacattaggctgtgtctgggcgtgcaaagtagtgcatttctcactgactggtcaatactgctgcagcgaagaaagaattaaggaaacatgcgaactgaaaagtgctgtcttgtgctacattatcctggcac

SEQ ID NO: 751013 - DNA, 618 bp, Homo sapiens
tgtgttgaaccaactttttattaggatccctcgataattggtcagttgttttagttagcaaaaccaaactcccgctgggtagcgcaaattctggaggccagttttcaggaagctcagtggcacaagagggatgggtaagaatggagtctcattgttcaaaacgtacacttgccctcaattccctattcttaacatggcaaccccttcatattgctggtgtcctcaggttagaggtccttccactctttgtttcagcgttgacctccactgcactgctggagaagggcagggctggttgcctgctgcatggaatgggagaagaaattacaaggtctacctgatctttataaagacttttgaactgtgttactactttttwaaattatatatatatagtactttaagttctagagtacatgtgcacagcatgcaggtttcttacatatgtatacttgtgccatattggtgtgctgcacccattaactcatcatttagcattaggtatatctcctaatgctatccccccacttccccccacctcacaacaggccccagtgtgtgatgttcctcttcctgtgtccaagtgttctcattgttcaatttccacctatgagtgag

SEQ ID NO: 751014 - DNA, 618 bp, Homo sapiens
tgtgttgaaccaactttttattaggatccctcgataattggtcagttgttttagttagcaaaaccaaactcccgctgggtagcgcaaattctggaggccagttttcaggaagctcagtggcacaagagggatgggtaagaatggagtctcattgttcaaaacgtacacttgccctcaattccctattcttaacatggcaaccccttcatattgctggtgtcctcaggttagaggtccttccactctttgtttcagcgttgacctccactgcactgctggagaagggcagggctggttgcctgctgcatggaatgggagaagaaattacaaggtctacctgatctttataaagacttttgaactgtgttactactttttaaaattatatatatatagtactttaagttctagagtacatgtgcacarcatgcaggtttcttacatatgtatacttgtgccatattggtgtgctgcacccattaactcatcatttagcattaggtatatctcctaatgctatccccccacttccccccacctcacaacaggccccagtgtgtgatgttcctcttcctgtgtccaagtgttctcattgttcaatttccacctatgagtgag

SEQ ID NO: 751015 - DNA, 639 bp, Homo sapiens
caagaagtccagccccagtaaagattatactctgggccaggagagaaggcatacacccttttcaattacctaagtcaaagaaaaaaggactgatccatggctccttcctctatctctaggtcagaaggcattcaagccattctaaaaatgcctccaccctcatcatttttctgagggttaaacacatggccagacaaacatcaagacatgtttgcacacatgcacgcactcacacacaaggctcagcgaycttttttctgtttcttttaagtcttcccatctgaaaactattcccgttgtccaacccattgctaggcattataccattccccttcattttgtctctagcaagaaaaccacgattatgcattatgcaaaaatcttttagctcattggtgagtgtggctgggatatgggatctcagcacaggaaatactgattcccactcagagagataagggctcggggcacacttgggccactctgccctattgagccactagaatcaaccttttccaacttctttgtgaaaatctctatgtctacaaaaatggtcaccttatcctccttcagttttctcttcttcatgagtttctcacagatatttaacaattcaacttacccaatatttatctgaaa

SEQ ID NO: 751016 - DNA, 640 bp, Homo sapiens
aaacattttcttttattaagctttgcattctctcaaggtaggaaactcagcaaacaccttcatatgctaatttccagaatgaaagagcagagataaatgactcctcttacgaaaagaactgtaaacaaacagggtcttcacttatggtttcattacctctatttagtctgttctgtgcagcagccaacgtgcacctgtctacatatctgaggcgtgcattcatgcattcatgygcacttagctgtgggattcatcacatgctcttcctggagtcctcagttggctctaggctgtatttgatgatccaagtgcaggcttccttgaaggcagggagcagtatttttaaaactggttggtacaggttaccatcttgaggccagagcagtactgcagctgggtagccacctggttgtgtgatcctggaaaagtcatttcatttttctgtggtatcgttttcagagaaaagtccagagatgtcctttgtcctccactgaaggacccagccattctcgctctttgttcaggtctctctgctcaaaaccaccttctgtctagcaatatctctctagctcccatctccagcccgacttcattgttcatgacacccatcacttcctgacattatgctacgtaattatgt

SEQ ID NO: 751017 - DNA, 580 bp, Homo sapiens
cccagcagcaaggatggtggagggtgcattgggtgtttgggtggcaggacagctggtttctactcttgggttggaaaatgccaagcgatttggctttggggaaatgactcccctttttggtgtgagggattatttctagtaaactgtaatgaagagatttcatatcagtcaacagaagtggttctgagcatgatcactaagtgggagcgggagtcacagggcctcaaggcttatctcctccagggcagttttatccctgccccaggaaggaagtaygtggtaatatatttcctggtctggctgctggtcggaatttgtgagggtgattgccaaatgaattctctatatgtaatccagatatcaactggcatttcctgctcctgtgatctagataagagaggcctagcaagcaggccacttgccgtaggtgccgagtttatggtccgcatcacttttttatgtaggctgaacctggcccacatgacatctgcccagatataaaattccacctcttccttgatttccacctaaaatgtcactcacctgaggcaaggatccatggagatttgaaggagacatg

SEQ ID NO: 751018 - DNA, 580 bp, Homo sapiens
cccagcagcaaggatggtggagggtgcattgggtgtttgggtggcaggacagctggtttctactcttgggttggaaaatgccaagcgatttggctttggggaaatgactcccctttttggtgtgagggattatttctagtaaactgtaatgaagagatttcatatcagtcaacagaagtggttctgagcatgatcactaagtgggagcgggagtcacagggcctcaaggcttatctcctccagggcagttttatccctgccccaggaaggaagtatgtggtaatatatttcctggtctggctgctggtyggaatttgtgagggtgattgccaaatgaattctctatatgtaatccagatatcaactggcatttcctgctcctgtgatctagataagagaggcctagcaagcaggccacttgccgtaggtgccgagtttatggtccgcatcacttttttatgtaggctgaacctggcccacatgacatctgcccagatataaaattccacctcttccttgatttccacctaaaatgtcactcacctgaggcaaggatccatggagatttgaaggagacatg

SEQ ID NO: 751019 - DNA, 580 bp, Homo sapiens
cccagcagcaaggatggtggagggtgcattgggtgtttgggtggcaggacagctggtttctactcttgggttggaaaatgccaagcgatttggctttggggaaatgactcccctttttggtgtgagggattatttctagtaaactgtaatgaagagatttcatatcagtcaacagaagtggttctgagcatgatcactaagtgggagcgggagtcacagggcctcaaggcttatctcctccagggcagttttatccctgccccaggaaggaagtatgtggtaatatatttcctggtctggctgctggtcggaakttgtgagggtgattgccaaatgaattctctatatgtaatccagatatcaactggcatttcctgctcctgtgatctagataagagaggcctagcaagcaggccacttgccgtaggtgccgagtttatggtccgcatcacttttttatgtaggctgaacctggcccacatgacatctgcccagatataaaattccacctcttccttgatttccacctaaaatgtcactcacctgaggcaaggatccatggagatttgaaggagacatg

SEQ ID NO: 751020 - DNA, 547 bp, Homo sapiens
gccatgagaggaacatgcccctgggcctgctctccaacctgggtctggaaatgaaaggcacatggaagagtcctaagtcaaccacaggcagcccgcacagcaacccgggagaacagaacatttgttattgtaagtcacaagatgcggagccctggcaggctgacaccctggctgttaaattccacccacagrggcatgctggaccacagaacagaacagagacagcgaaggaaaggaaaatgcctttggagggggcgtatttgtccagagacatttactaaaactaggtccactacaatgccccagcccttctttccccataataaaggcatgacaccacagggtgctagccaggacaatatacttgagaatctagagccaaggtggacaggctggtaatggaagtctgccttgtcactgcggttatttctctccaggggtgatttacaaggtgataaaagacctcaagatgccaaaggtacttaggctgttaaaaaccagacttttatgatcccttgttccttatagtacatgttttttcattaat

SEQ ID NO: 751021 - DNA, 547 bp, Homo sapiens
gccatgagaggaacatgcccctgggcctgctctccaacctgggtctggaaatgaaaggcacatggaagagtcctaagtcaaccacaggcagcccgcacagcaacccgggagaacagaacatttgttattgtaagtcacaagatgcggagccctggcaggctgacaccctggctgttaaattccacccacaggggcatgctggaccrcagaacagaacagagacagcgaaggaaaggaaaatgcctttggagggggcgtatttgtccagagacatttactaaaactaggtccactacaatgccccagcccttctttccccataataaaggcatgacaccacagggtgctagccaggacaatatacttgagaatctagagccaaggtggacaggctggtaatggaagtctgccttgtcactgcggttatttctctccaggggtgatttacaaggtgataaaagacctcaagatgccaaaggtacttaggctgttaaaaaccagacttttatgatcccttgttccttatagtacatgttttttcattaat

SEQ ID NO: 751022 - DNA, 613 bp, Homo sapiens
taatatcttatttgtcatgagtataaaacttctaagaatataagcacattattatattgattgtcacacagagcacaatgcagaatttagtggggatgaatgtaattaatctatgaggctatgccatgccacgcctgtgactggtggtggggggtcaggagtctgaacaaactgtgtgctaaaaatggggagagagagaaggaaggaaagagagaaagagagagagaggtgggtacttgtaatgtacagagtacaggtctggccttcccctcacccctcagggccccttaagkgaaggggaatggggaagtgagaatgaatgtcttcaagagcccaccaggtagggaatgggaggaatgaagggccagggccagggcctcccccactgcatgggaaaccacacttgccacgggaggagcttctcctttatggatactttgagactctgcattattttctaattcaggataataaatccagctccctcacgactttccctcatattatctgcctttcgtaatcccttgtgtcatgttacatgtcacttctcttcctaatctccatgctccagaaccccccaggaattgtcatttgtgaatccttggttaattaa

SEQ ID NO: 751023 - DNA, 613 bp, Homo sapiens
taatatcttatttgtcatgagtataaaacttctaagaatataagcacattattatattgattgtcacacagagcacaatgcagaatttagtggggatgaatgtaattaatctatgaggctatgccatgccacgcctgtgactggtggtggggggtcaggagtctgaacaaactgtgtgctaaaaatggggagagagagaaggaaggaaagagagaaagagagagagaggtgggtacttgtaatgtacagagtacaggtctggccttcccctcacccctcagggccccttaagggaaggggaatggggaagtgagaatgaatgtcttcaagagcccaccaggtagggaatgggaggaatgaagggccagggccagggcctcccccactgcatgggaaaccacacttgycacgggaggagcttctcctttatggatactttgagactctgcattattttctaattcaggataataaatccagctccctcacgactttccctcatattatctgcctttcgtaatcccttgtgtcatgttacatgtcacttctcttcctaatctccatgctccagaaccccccaggaattgtcatttgtgaatccttggttaattaa

SEQ ID NO: 751024 - DNA, 613 bp, Homo sapiens
taatatcttatttgtcatgagtataaaacttctaagaatataagcacattattatattgattgtcacacagagcacaatgcagaatttagtggggatgaatgtaattaatctatgaggctatgccatgccacgcctgtgactggtggtggggggtcaggagtctgaacaaactgtgtgctaaaaatggggagagagagaaggaaggaaagagagaaagagagagagaggtgggtacttgtaatgtacagagtacaggtctggccttcccctcacccctcagggccccttaagggaaggggaatggggaagtgagaatgaatgtcttcaagagcccaccaggtagggaatgggaggaatgaagggccagggccagggcctcccccactgcatgggaaaccacacttgccaygggaggagcttctcctttatggatactttgagactctgcattattttctaattcaggataataaatccagctccctcacgactttccctcatattatctgcctttcgtaatcccttgtgtcatgttacatgtcacttctcttcctaatctccatgctccagaaccccccaggaattgtcatttgtgaatccttggttaattaa

SEQ ID NO: 751025 - DNA, 600 bp, Homo sapiens
atcacagatttgaacctttctttccattgagcagtttgggaacaagtcattgtatagaatctgcaaaggtatatttttgagcagtttgaggcctatggtgaaaaactaaatatcttcacataaaaaccaggcagaagtttttgagataactctttgtgatgtttgcattcatctcaaagagttgaacctttctgttcattgaggagtttggaaacattctttttgtgcaatctgcaaaggaatatttctgagtagtttcaggcctgtggtgaaaaagaaatatcctcacataaaaactagacagaagcattctgagaaacttcttttttatatgtgcattcacctcacagagttgaaattttttgtcatttagcagtttggaaacagtctttttgtagaatctgcaaagggatatttgtgatccctttgaggcctrtggtgaaataggaaatatcttcatataaatactagacagcagctttctgagaaactactttgtgatgtgtgctttcatcctacagagttgaaactttcttttgattgatcactttggaaacagtctttttgaagaatctacaaatggatatttggagagctttg

SEQ ID NO: 751026 - DNA, 544 bp, Homo sapiens
atccacttaagcagagatgccttcaagaacatcagtgagctctttgccaatcagtccaggaaggacctggacccaggcatggacctgttagtgctgtctcagggacaccagaccaacatcctggacatcatcctcgtacacaaggaagctcttaccaaagtcacggacaacaggcaacatgtggcagawgggaagacagaggtacagaggctgatggtgtcattatcacaggaacaggatttctttggccactttggctgaaattcaccacttccatccaattcactcaagtgagagacttgaaatcacagatggagcatttcttgcaacaagagatactattttttcaaaaagtcacctaaaatttgatagtgttgaataactagttattcgattgtgaactttttccagttcacaggtactttctacagcagaatgataacagtatcaaagagctagtgccagctatcggtggtagtacaaggatgattttgtgctcaagtgaaacccagctgaatatagaattgtgtaggatagtgttaat

SEQ ID NO: 751027 - DNA, 523 bp, Homo sapiens
ggtttcaccatgttagccaggatggtctcaatctcctgacctcgtgatcctcccgcctcggcctcccaaagtgttgggattacaggcgtgagccactgcgcccggcctcccaattcattctttcaatacacaatcgagatcttcatttttagccttaagcattgtttttctttttatcattaacttattttcatcactttcggcatagaactccaayagtttatccttctgtttcctcaggtcatatatggtgtccattctgacaccatctcttctgaaagacacttcacacaccacttccagtttctccaacagcttgactttctgtgctacaggtaaacataaatgctttctgttatcactgttacccacagaggtgtctgcaggcccttttaacattttcaacaatacttttgcaccacagaccagagaataagcaaaaaacacagtgagtaatgcatgcaggtcttggcaccatgtggggcagtttgggaaacctgcatccggcctgcacatgtgccat

SEQ ID NO: 751028 - DNA, 626 bp, Homo sapiens
ggatgttcaaaagcacttcctttttctcccttaatgaatatgtactgttgaataacattgtattgccctcttggcttttagtaacaatcaacaacttctgatgcctataatctagcatttaactgtctatacttatgattaaattgaggatagatacacattatcataatccctagggattgcatattatttcctaccaatccttagttccttgctcctcagcacaatgcaggatcccagccaggctggcgggcaatgccgtgggagagcccagtgttggggagaagacccagcctcagggggagcctgggaggccaggtgagytggcccagctgccagccaaaaaatggaagcgccagagtgggaagatgcaggggtagaggggtgggagagggccaggataggcatttccatgcctctctctgtcaccttgagaacatggaacattggctattaatagtcagcagctgtggcctgccgtcctggggagcctgggggaaccatgactaggaggacagcctgcacgtggaaggcagctgggctggagggagtgagggttgcagcctggcctggggccttcgtcctcttcctgcagggcctcccatgtgcttttctccatggctctt

SEQ ID NO: 751029 - DNA, 647 bp, Homo sapiens
agcccagtgttggggagaagacccagcctcagggggagcctgggaggccaggtgagctggcccagctgccagccaaaaaatggaagcgccagagtgggaagatgcaggggtagaggggtgggagagggccaggataggcatttccatgcctctctctgtcaccttgagaacatggaacattggctattaatagtcagcagctgtggcctgccgtcctggggagcctgggggaaccatgactaggaggacagcctgcacgtggaaggcagctgggctggagggagtgagggttgcagcctggcctggggccttcgtcctcttcctgcagggcctcccatgtgcttttctccatggctcttgtggtgaacgtgcagaacacatgcatgtgaagcctctgtttacaagaaggaaagagccaggtggttctaagaggtcttttttaaaggaggaggctgtaatcccagcactttcggaggcygaagcgagtggattgcttgagctcagttctccagcagcctgggcaacatggcaaaaccccatctctgcaaaagatacaaaaatttagccaggtgtggtggcatgtgcctgtagtcccagctacttgggagactgaggtgggaggatcgcttaagcccgtgtggtcgagg

SEQ ID NO: 751030 - DNA, 594 bp, Homo sapiens
gggatccctgtaagactgcaagacccttttaggaagtctgcaaggtcaaaactatttttttttttttcgagacggagtttcactcttgttacccaggctggagtgcagtggcgcgatctcggctcactacaacctccaccttccagtttcaagtgattctcctgcctcagcctcccagtagctgggattacaggtgcccaccaccaagcctggctaatttttgtatttttagtggagacgaggttttaccatgttggccaggctggtctcgaactcctgaccttgtgatcctccctcctcagcctccagaggtaataagggctgggattataggcatgagccaccgcgcctcgcggtcaaaactattttatagtaatattaaaacattatttgccttctatactctcatytgcttaggaatattttctggaattttctaagaaggtaggtttaggatataaagatgaacattttcagagatgaactaagactgtcttcactactcctgagctcttgctacttccagttatacttgctatattcccttcaacctcattattgttcaattaattattactttgaaatcctgaagtt

SEQ ID NO: 751031 - DNA, 557 bp, Homo sapiens
gacaacatggtataatgtactcatacattactcattctttctctcccaacagaatataaactccatgaggtagtgaagggatctttgctttgttcattgttatttcccaagaacacagaacactgcctagtctttaagaggtgcacacatatttgttgaataacacgcttgctccaccttctcccataactgcttcctgacactttcctgagtcatcacccctaattcctggcaaacacattaacatgctacttttattaggatgccaaatcctaggctatagtattawcaacatgagcttaaacggtagtgttgtttaagacattatttttcaccctgtcaatcaggaggcaatatattagttacaattttataaaagaaatagaaaggccatgcgcagtggttgtagtcccagcactttgggaggccaaggctggaggactgtttgagtttgagaccagtctcggcaacatggtgaaacccatctctacaaaaaatcagccaggtgtggtggcgcctgcctgtagtcccagctactctggaagctgagatgggag

SEQ ID NO: 751032 - DNA, 651 bp, Homo sapiens
agacctgagagtcgaaagatccattaggggctgctctcgctttaccatgtcttatttttccttcctctggttgatgaaatgccagggtgaaagggatagccaattggactaaagtgcaagtgccactccagttatttggcagagtgtccagtaaaggtccaccacaataccrccatacatccgctcataccaccacacatccactcgggatgaacaagaggtgaccgattgataagctcttgaaaattcttaagttcactgcatcccttcaggtctccaaggaatgctaagtttcctccctgtcatgagagacatgaagtgaactcagggttgggagacagaagctggatggccctcaggggctgaccggcagggtgctggacttcgggatatagcagagagagagcttggcacgacttactactccaggctgtagaatcctggaaaacagctaccatgcagcccacgcctggtcgactggaagaccaccttagtggaaaggggacaatctgggcctctggcctgctgtgtgcacaagcataacaattgcttttgtttaacgtgtggacagaatatttgatccattccaaccaggcatttgcatgttggtatcctgtcttaattgccaaagtttattttaattctttaact

SEQ ID NO: 751033 - DNA, 651 bp, Homo sapiens
agacctgagagtcgaaagatccattaggggctgctctcgctttaccatgtcttatttttccttcctctggttgatgaaatgccagggtgaaagggatagccaattggactaaagtgcaagtgccactccagttatttggcagagtgtccagtaaaggtccaccacaataccgccatacatccgctcatacmaccacacatccactcgggatgaacaagaggtgaccgattgataagctcttgaaaattcttaagttcactgcatcccttcaggtctccaaggaatgctaagtttcctccctgtcatgagagacatgaagtgaactcagggttgggagacagaagctggatggccctcaggggctgaccggcagggtgctggacttcgggatatagcagagagagagcttggcacgacttactactccaggctgtagaatcctggaaaacagctaccatgcagcccacgcctggtcgactggaagaccaccttagtggaaaggggacaatctgggcctctggcctgctgtgtgcacaagcataacaattgcttttgtttaacgtgtggacagaatatttgatccattccaaccaggcatttgcatgttggtatcctgtcttaattgccaaagtttattttaattctttaact

SEQ ID NO: 751034 - DNA, 584 bp, Homo sapiens
tctaataattttactgaccaagttttctgtgttaaagaatatggacaagagacaacagcataatattccacttgtaacgggttttacaggagataggcctggcatgtattagcatgttttctgcattccacattaagggggtgctcttttaaagcagtaaagacttccctctataaaaaacaagtattcaaagaaaacattactaaatcaatgaggtacaaaggtggagtggtagttatagagatcaaattactactcaaaggttaatgactctgctgaacttttagacttaatggtttcaagtagattgcttgatgagaaaagactcaaattgctcttacctgaaagattcatgcccaggagtatcaataattagcattcctggaatccgtacattctctctatcaaactaraaacaatggggaaaagttcaaagtttaagaaagtcagacatgaaagcttctttacagaacaatccttttgccataaaactctgaaagtatcactactcccttttccatataaatggctttagaaacagtgagttaaccagcaaagtacagttgtcagtattttcattaaaa

SEQ ID NO: 751035 - DNA, 558 bp, Homo sapiens
attgctaaatccaggggtccattctcagtctctttcttacttgacctttagtaagttgatctagttggtcacttccttgaattttttttttttttttttgcagaatatacactgctggttatcctcccacctcgctggctgttcctctctcagtcttctttgtgacttctccttgtccttaacctgtcaatgccgaagcacctcgaggtgcagtgctctgatcgcttctctgtctacactcatttcctgggtggtctcctccagtcccatggcttttaatcccctgtgcatgccggccggcgccttcaaaatgtacccctccagccccgcggcctaccctgatctcccgactactgccgtgctacctggatgtctaataggcaccttgaacctgatacatcagatggtaaatctcgatctttcccattcaaagctgctcttccacaaccttcctcctatcaattgattgcaactccaccctttcmcgtcccggcctgaaaacctcagggtcattcctgactcctctcttttctcacatacacacatctgatctctcgg

SEQ ID NO: 751036 - DNA, 596 bp, Homo sapiens
atcaatttgaacaactgtctacacacaaaaataccttcacaagagctaagaaaaccaggtgacagatcacggtacctggttacagcataatatgagggtataaaggatagttttaccttacctgcatcacccctccctgaaccccaggcagcacaatgcagaaaaataccactatctgggcaaaagacagggaagaaagaataggactttaccttggaccctaatacagggcctgacacaggaaaatccagcagcaggcagatccacatggcccttgactgcaggccggtactcgtggactaagcytctagatctatcctggtgccaaacaggaacccatagctgctgtgagatgaatgcaagctctagcccttatcaccactggctgactacagtgaccatgggctaaaaataacccacagtgacaggcaggcctcagcgccatgggctttagttgtgcctctgtgtggcactagcctcagtggccatggactttgggtgtgccccaacactgtatcagccacagcagccataagaatccagcccagtgctgtgccagccttggtggccataagattctaacccagcactgtgcc

SEQ ID NO: 751037 - DNA, 382 bp, Homo sapiens
gacagatagagtaaccttacacatgggaagatccagtgtggccgttagagtaatggtgccaaggttagcctcaattttgattatcaagctcaatgtattttaccccatcaatgaaatcagtgactttccttcaccctctattctctytacccaccgtgatcaacaactgtgtagcaagcaggatagagtaactgataggttgctttgtcaactgtagcccacagaacacattacatttaacattctgcccatagcaatcaggttcttgaaaagagtatccatgactgagctttaggaatgtgtagactctttatgcattactttttttctttttttttgagacggagtcttggtctgtcacccaggatagagtgcagtggcg

SEQ ID NO: 751038 - DNA, 595 bp, Homo sapiens
ctcctaatgtctaatgtactattaataccatgcagtgtattttaaatttcagatattgtatctctctacaagttttatttgggtctatttaaatatcttccatttctctcctcattctgtttatactttacctttttgaccatatgggttatatttgcaatagctgtgtaacatccttttccrctaattctatcatctgtgtcattttgggatctgtttctgttgatcagtttttcttctggtttggatcgtattttcctgcttctttgtatgcctggtaattttttactggatgccaggcattttaactttacattatcaggtactagatttcattgtatttttatatatgttcttgatacagtcaagttacttgaaaccagtttgatctctctaggaattgcttttcagttatgttagaatagatctagggtcgcctttagcccagggctaatttggtcctgctaccgaggcaatactctttcaagaacgctacttgttgccccatatattaaggagattttcctactctggctggtagatgaactactcctagccatgtgtgagccctgaggggttgatcagcctactcctt

SEQ ID NO: 751039 - DNA, 614 bp, Homo sapiens
tactccaggcattaaataaatagaaggattttcaggccagcgtaatgtaaattaacagctaaagtgaattagtgtcaactcgcgtccttccttgtgagatggtttgcatatgcagactgctaggcaaatattctaaaatatcctgtggcaaaaagttcagggcttaaagagagtaagcatctggattttactgcagctttagatttatgrcagaacgggagtgtgtaaagtgaaaatttatttaaaattttttttcctatcaacttactgtgttttctctttggaagcagttcatcgtgtctctcttctgttccatgtgtggtgccagggtctgaggctataaagatgagtaacagctcatccctgcctttgggaagtttgtgctttggggaatgtgctagatgtatacagtttaatacaacacgggaacagggttgcctgtgctatgtctaggggcacagagtgatggattttgctgtacagatggagggaaggtcagggcaggttccagcgaggcggggacatttgagctgtgtctggaaagacaagaaggaatttttggaacagaagacactgttgatgtcctgggcagaagggacacagaggtgtggaaa

SEQ ID NO: 751040 - DNA, 631 bp, Homo sapiens
aggagccctccttggcactgcttgggcatccaggctctgagctccggcctcacctttccacggggtcgaagggaacctctcctgatgacagcagtcgcaaagggccgaccatgatgatgaaaccccaggcggagacgggggaagcagcacggkatcccagcctcaggcctgcaccgacggttttggttggggtgagtctcaccaaaagtcgtgccgccgtccgtgatctcgaggacgggtcggcctgcgtgcccctgggctgctctctcacccgagggtcgttctcctccagagcagaatcccgcagcctcaggggttgccagagggtgtgtgtttcaatgcctctgttgtatgactctgcgtgtgtgtgtgtgtctgtttgtgtgtctcccattctctcttctctctctatctctcagtctctgtgtgtttctttccctctctctatggatttgtgtgtgtatgccggtgtgcatgtgtgtctttggccgaatgtgccctgtgcggcacaaagtggtttgtcgcatggtggcctgtctttggcgagcctctttctgcttctctgcctgggtcatgaagccggctgtcaatcatttttgccgcggcggatccgctttgggtgtgtgaaagc

SEQ ID NO: 751041 - DNA, 492 bp, Homo sapiens
acagcctgaggctctgttttcctgctggagaaatttctaccactgacatagatttgtaaatacttctagttcttgtttcttgtctgttctgcctcaagaagaacttacttgtgagaaagatactcaattctacttcctcacaaacatttaaatgaggtgcattgttctggattttgtaggggtggtggttgtttcagtttagttttaattatttcttgtcattttttgacaagcatactagccacttaataccaaaaccatttttttcytaggccctttgatgtctcccgctgaaagattctttccatttaaaatcaaaaaccattaaaagttgtatgctaggtagcttagtacatgaaagtacgtccctgctgctcctctaagttttctatctgtaggctgttaaggagtggaaggcctgataaagcatgtgcatgcatgcatggatatagatatgcatgggtgtacagctgtcatctatatgtgcatatc

SEQ ID NO: 751042 - DNA, 557 bp, Homo sapiens
ttcactattattatatctgttatggtgatctgtattcagtgatctttgatgttgctactgtaatatggggagaaaccacaaaccatacctttaagagatagcaacttaatcaatacatattgtgtgtcctctgactactccactgarcagaatttccctgtctctctccctctcttagtgactccaatttgtgagacacaacaatagtgaaattaggccagttaataaccttataatgggctctaagtgttcaagtgtaagaaagagtttcatgtgtgttactttaaatcaaaagctggaaatacttaagcctagcaaggaagacatgtcaaaagccaacttagatctaaagctagaactcttgtttttaacagttagccaagttgtgaatgcaaagaaaaaattcttgaaggaaatcaaaacttctactccagtgaacacaggaatagtaagaaagagaaacagccttattgctgagatttggaatgttttagtggttcggccagaaagtcaaatcagccacaacattatcttcagccaaaacgcaatctagacca

SEQ ID NO: 751043 - DNA, 377 bp, Homo sapiens
aaagaggaagagaggggaatcccagggggagaccatgtgaccacgcgtggcactggccaatgccacaacagttggtgttaatgtgtgtcatcggaggcatacggggcgacggcgaaacgaagggtggggtccaggcatgtgccggtggaagggggaaacgggtgacctttccgtcaatgccaaggaaaatcaaacaacacctgggacccsggtggtgggggggccgcctgtgcccgacccaagccacgttttctactgcctacgagaggagtaaagaggtttctgcaaaattcgcaacacccccattcctccaccgacctggtagccctgacgcaacttcggctggcacaaacccacaaagagtgggaaagaaacac

SEQ ID NO: 751044 - DNA, 629 bp, Homo sapiens
acaggagaatccaatggatccttacaggttgcttaaaagggatagtttgttgtagtcctgaaataataaagtaatgtcctattctccacttaccatgtagtattgcttttgttaaataatccattggggcttgggtagtttaggtgggtcctttaggcaggatatgccccactgttatggcttgaattctgagttgtcaaagagtatgtccccttaggcaatggtgatttttgtgytacaagaagtcggggggtcaatgccaataatgcactcacaagtgagaaccatggtcactaacatccaatatggaccaaagccacatcacaggtagataagcactactggtcaatgcattcattctaaaaccttccagtgtcaccagtttttctccctaagaggacctggaaatattatgtggactcatgtatcaaaaaaaaaagtctgaatttctttcttttctcctcttaccttgacagaaatataaggcctttggcctccatttggggaccctgagaccttggtcccatttctgactctgccattcagcccaagacattggatttgcaatgtcctttcatcaaagaaatatacctggcctttctctatatctgtcctttagataatgagtc

SEQ ID NO: 751045 - DNA, 650 bp, Homo sapiens
acaggttgcttaaaagggatagtttgttgtagtcctgaaataataaagtaatgtcctattctccacttaccatgtagtattgcttttgttaaataatccattggggcttgggtagtttaggtgggtcctttaggcaggatatgccccactgttatggcttgaattctgagttgtcaaagagtatgtccccttaggcaatggtgatttttgtgttacargaagtcggggggtcaatgccaataatgcactcacaagtgagaaccatggtcactaacatccaatatggaccaaagccacatcacaggtagataagcactactggtcaatgcattcattctaaaaccttccagtgtcaccagtttttctccctaagaggacctggaaatattatgtggactcatgtatcaaaaaaaaaagtctgaatttctttcttttctcctcttaccttgacagaaatataaggcctttggcctccatttggggaccctgagaccttggtcccatttctgactctgccattcagcccaagacattggatttgcaatgtcctttcatcaaagaaatatacctggcctttctctatatctgtcctttagataatgagtctccctttctgtgaaggcctttatcacatgtattgattccttctc

SEQ ID NO: 751046 - DNA, 528 bp, Homo sapiens
tcaccacaggagaatccaatggatccttacaggttgcttaaaagggatagtttgttgtagtcctgaaataataaagtaatgtcctattctccacttaccatgtagtattgcttttgttaaataatccattggggcttgggtagtttaggtgggtcctttaggcaggatatgccccactgttatggcttgaattctgagttgtcaaagagtatgtccccttaggcaatggtgatttttgtgttacaagaagtcgggggrtcaatgccaataatgcactcacaagtgagaaccatggtcactaacatccaatatggaccaaagccacatcacaggtagataagcactactggtcaatgcattcattctaaaaccttccagtgtcaccagtttttctccctaagaggacctggaaatattatgtggactcatgtatcaaaaaaaaaagtctgaatttctttcttttctcctcttaccttgacagaaatataaggcctttggcctccatttggggaccctgagaccttggtc

SEQ ID NO: 751047 - DNA, 600 bp, Homo sapiens
atatcgccaccgctgcgcacggccgcgagtgctcctgctgccgccccgcgcgctgtgtcctgggtcctgtttcgggcggcgtgggagagggggccacgggtgtctggtcctgtcccaggcccaaacccccagggctcctgtcctcaggacctgcttgagccgacttccaccgagggaggtggagcttcaggacgcctgctgtgttctccggactcccgttgagatcccattctggcccactccgagtgacataggatgggctcaccacatctggtcaggccggcaggctccgctgcagcacaaaatgatcccataggtctcaaggcctagtgtcagagcaaattcactcatccatcagccctctgcctccctcctcctttgaaagagcagtggcctgccccgcttgtaaaagccgaggggttccggaaagccgaccrtgctttacaggacaactgcaaagaggaagagaggcgaaatccagggggagaccatgtgaccacgcgtggcactggccaatcccacagcagttggtgttaacgtgtgacacctgaggtaaacggggcgacggtgaaacgaagggtggggtccatgcatgtgccg

SEQ ID NO: 751048 - DNA, 579 bp, Homo sapiens
tttccaaggtcaaaacaatagaaaaaatgttaaagacagtgtattagtctgttttcacactgctgataaagacatacctgagattgggtaaattataaagaaaaagaggtttaatgaactcacagttccacatgactggggagacctcacaatcatagtggaaggcaaaagtcatgtcttacatggcaaaaggcaagagagagaatgggaaccaagcaaaagcagaaaccccttataaaaccatcaggtcgtgtgagacttactgactaccacaaggacagtataggggaaactacctccatgattcaattatgtcccactaggtccttccataacacatrgcaattatgggagctacaattcaagatgagatttgggtggggacacagagccaaaccatattattttgcctgtgtcccctctaaatgttgtgtcctcaagtttcaaaaccaatcataccttcccaacagttcctcaagtcttaattcatttcagcattaactcagaagtccacagtccaaagtctcatctgagacaagtcccttccacctataagcctgtaaaatcaaaagaaagtta

SEQ ID NO: 751049 - DNA, 577 bp, Homo sapiens
caaccaacaccgtccgtgcaggcctgaggctgggatcccgtgctgcttccaggtctccgcctggggtttcatcatcatggtcggccctttgcgagtgctggcatccggagacgttgccttcgaccctgtggggaggtgaggccggagcctcagagcctcgacacccaagcactgccacggagggctcctgctctgccaagcctcagggactggtttctaagacaaccgtgggaaccactgtgacgggagaatcckctcgtgcccagcgcatgcgcattggctgagccgactcacgctccactcctgacagataggctgcgtcccctttaaatatcgccaccgctgcgcgtcggccgcgatgctcctgctgccgccccgcggcgcctgtgtcctgggtcctgtttcgggcggcgtgggagagggggccacgggtgtctggtcctgtcccaggcccaaacccccagggctcctgtcctcaggacctgcttgagccgacttccaccgagggaggtggagcttcaggacgcctgctgtgttctccggactcccgttgagatcccattctggcccactccga

SEQ ID NO: 751050 - DNA, 577 bp, Homo sapiens
caaccaacaccgtccgtgcaggcctgaggctgggatcccgtgctgcttccaggtctccgcctggggtttcatcatcatggtcggccctttgcgagtgctggcatccggagacgttgccttcgaccctgtggggaggtgaggccggagcctcagagcctcgacacccaagcactgccacggagggctcctgctctgccaagcctcagggactggtttctaagacaaccgtgggaaccactgtgacgggagaatccgctcgtgccyagcgcatgcgcattggctgagccgactcacgctccactcctgacagataggctgcgtcccctttaaatatcgccaccgctgcgcgtcggccgcgatgctcctgctgccgccccgcggcgcctgtgtcctgggtcctgtttcgggcggcgtgggagagggggccacgggtgtctggtcctgtcccaggcccaaacccccagggctcctgtcctcaggacctgcttgagccgacttccaccgagggaggtggagcttcaggacgcctgctgtgttctccggactcccgttgagatcccattctggcccactccga

SEQ ID NO: 751051 - DNA, 652 bp, Homo sapiens
taatggaaaattgaaatattgagtatgctgatgaaaaagattacattttcttaaacaaatgttcactcctaaatgacaaattcaattataggaacaaatttaggtaggcataaaaagagaaaagtgaaaatacaattgaaaaattgaggctgggcatggtggctcacacctgtaatcccagcaytttgggaggccgaggcgggtggatcacgaggtcaggagatcgagaccacggtgaaaccccgtctctactaaaaatacaaaaaattagctgggcacgatggcgggcgcctgtagtcccagctactcgggaggctgaggcaggagaatggcgtgaacccaggaggcggagcttgcagtgagccgagatcccaccactgcactccagcctgggcgacagagcgagactctgtctcaaaaaaacaaacaaaaaagaaaaattgaagcaactccacatgcattccagctttacagagtgaaagtgtacatgaaattttattgagacaataatttataatgtataattaactcaaggattaatattatttgacacaattttgagcatactaaaaggtaactggattttataatctaattaaaaagtcaaataagtaaatacaatgagtattacctttataaatactttaagacg

SEQ ID NO: 751052 - DNA, 652 bp, Homo sapiens
taatggaaaattgaaatattgagtatgctgatgaaaaagattacattttcttaaacaaatgttcactcctaaatgacaaattcaattataggaacaaatttaggtaggcataaaaagagaaaagtgaaaatacaattgaaaaattgaggctgggcatggtggctcacacctgtaatcccagcactttgggaggccgaggcgggtggatcacgaggtcaggagatcgagaccacggtgaaaccccgtctctactaaaaatacaaaaaattagctgggcacgatggcgggcgcctgtagtcccagctactcgggaggytgaggcaggagaatggcgtgaacccaggaggcggagcttgcagtgagccgagatcccaccactgcactccagcctgggcgacagagcgagactctgtctcaaaaaaacaaacaaaaaagaaaaattgaagcaactccacatgcattccagctttacagagtgaaagtgtacatgaaattttattgagacaataatttataatgtataattaactcaaggattaatattatttgacacaattttgagcatactaaaaggtaactggattttataatctaattaaaaagtcaaataagtaaatacaatgagtattacctttataaatactttaagacg

SEQ ID NO: 751053 - DNA, 526 bp, Homo sapiens
gacaagcctgggtaacagggagagcctcatctctatagaaaatttaaaaatttaattagcctatcattgtggctcacacctgtaatcccagatacttgggaggcttttttgaggttatagtgagttatgatccagctactgtactccagcctggtgacagaatggcatcttctctctataaaaataaaaataaaaataaaatctatgacatttaactgattacwtatttaatcaattaattggaataaatgatatcctgattatgacatttcaatagacatattattatttattttaatatttgaatagagtaaataaagacctatttttctttcaatttgtcatttattttatgttgctttgaataaaaaactaatgctgcaattgtgtacaccattaaatcattaggttctaatttccttgatctattacgaaaagtgattttcaatttgaatatcaagggcattatttgcagaatattgttattctgcaaatatattctgcaaatacattctgtaatatttaa

SEQ ID NO: 751054 - DNA, 623 bp, Homo sapiens
tcgccaccgctgcgcagcggccgcgatgctcctgctgccgccccggcggcgcctgtgtcctgggtcctgtttcgggcggcgtgggagagggggccacgggtgtctggtcctgtcccaggcccaaacccccagggctcctgtcctcaggacctgcttgagccgacttccaccgagggaggtggagcttcaggacgcctgctgtgttctccggactcccgttgagatcccattctggcccactccgagtgacataggatgggctcaccacatctggtcaggccggcagggcctcgctgcagcacaaaatgatcccataggtctcaaggcctagtgtcagagcaaattcactcatccatcagccctctgcctccctcctcctttgaaagagcagtggcctgccccgcttgtaaaagccgaggggttccggaaagccgaccrtgctttacaggacaactgcaaagaggaagagaggcgaaatccagggggagaccatgtgaccacgcgtggcactggccaatcccacagcagttggtgttaacgtgtgacacctgaggtaaacggggcgacggtgaaacgaagggtggggtccatgcatgtgctggtggaagggggaaacgggtgac

SEQ ID NO: 751055 - DNA, 592 bp, Homo sapiens
tcttatgttcagatatttccatttacttactctctcatcaaagtgccctagaaatggggtcagtagtggcttctgcacatagcactgaggttatctttctaaattcttcctctgtactatcctccataacagcacattagcttccatttgggtcaaattaacctcaacttatgaactttaatacccaccatcattayatcctcttgtttcattaggcaccatctaaaccaagtactttcgaagtaataaacataaaaagttaaaaaacttggaacacagtttttactatgactatttcgatttagattctattatttatgctcatgtgaatgccttctagtaagtttggccttcttgaatgcagtcatagcttgcacacgtatggaattgctgggtcgtgttttattttgtgtgtgttttccttgcagttatccaatgggtcctgagagagtgtgttggagtctgaactgccattctcagcaagtgtctgacccttaaccctgagccaggcagagtccggggactaaggttccatgcaggaatggagtggggtagcccatctcatggaggaggagatgagacataggcaaca

SEQ ID NO: 751056 - DNA, 529 bp, Homo sapiens
agacggacagggggtcagaaatcaaagaaaaagagaaaatcaagtatcatcatctctcaagggtcggggtaccagaaagaaagccaacttgaagcaatgagtatttattgccagttataactacagatagctgagtggggagagaagcgttggaagcaaaatagaagaagaaacccagaaatgtccaggtgtgcgaaaacaagtgccggcagtcgcattaagagtttactggggccttgaccgtggtcagggagagaaatggcatcaaggcagcttagagacgcgctgctgggaatttcagtttggctttcstggtaatattagtacctggattttaacgaatacgtgtgcacttggcactgggctgatatttattcaagggccttaattgatgctaagaaacataattttaaaaaccactgttttctttatatttaatgattttagtagtagttatgataccagtaaaatattaatgttcattcagctctcctttgtgctggcatatccaggttttcatccactgtgg

SEQ ID NO: 751057 - DNA, 575 bp, Homo sapiens
gatgcagtgggtcacgcctgtaattccagcatgttgggaagccaaggcaggaggatcacttgaggccaggaattgcagaccagcctgggcaacacggtgtgatgtcgtcactccaaaaaataaataaaagattagctggatgtggtggtacgtgcctgtggtcccacctacttgggaggctgaggtgggaggatcatttcagcccaggagtcccaggctgcagtgagccatcatcacgctactgcaccccagcctgggcggcaaaacaagaccccatacctacaaaaagagaaagaaaaaagagaaaagtgaggtcatgcagtgcaggggccttcctgcaatcctagatcttgatgactcctggtgcttctgttgtcaggacactcattaaaactcaccccatgagcctctttttctaccaccgtcaccccctrtgagcttccttttatgctaccatctgccacgataagcctgttttttccaccatcacacccatgagcttcttgagctcagggacatgtctcatttgacttggcacctatgtttgctattacgatactgtgtatttataaggc

SEQ ID NO: 751058 - DNA, 468 bp, Homo sapiens
gaggattgggggtgttgcgaaattggcagaaacctctttgctcctctggtaggcatttgaaaatgtggcttgggtcaggcacaggaggcccccctaccccacggttcccaggtgttgtttgtttttccttggcgttgacggaaatgtcacccgtttcccccttccaccggcatatccctggaccccacccttcgtttcgccgtcgccccgtttgcctccggtgtcacacgttaacaccaactgctgtgggattggccagtgccacgcgtggtcacgtggtctccccstggatttcgcctctcttcctctttgcagttgtcctgttaagcacggtcggctttccggaacccctgggcttttacaagcggggtaggccactgctctttcaaaggaggagggaggcagagggctgatggatgagtgaatttgctctgacactaggccttgagacctatgggatcattttgt

SEQ ID NO: 751059 - DNA, 628 bp, Homo sapiens
aatcctacagcacagacagaaatagccatattagagccagacgcagtggctcacgcctgtaatctcagtactttgagaggctgaggtgggcagattgcttgaggtccagagttggagaccagcctggccaacatggtgaaaccttgtctctactaaaaatacaaaaattaaccgggcatagcggtgtatgcctgtaatcccagctactcgggaggctgaggcaggagaatcgcttgaacctgggaggcggaggttgcagtaagctgagatggygccactgcacacttgcctgggtgacagagcaagactccatctcaaaaagaaaaaaaagaaatagccatatcacttgttaattaatgctgtgcttttctcataggcacactcagatgctgagaaccccaagctgatatcagcaatgctgtgtgctgctttgtatccaatgtagtgcaggtgacaaaacatttttcctagatctgtccattttttgtttgatttgtagccaagtgatgtaagtttagatgtgcatattatcatcttaaagagatatatacgcatggtgtgcacacacgcacacccttttagacttagtatacattttcggcccgggtgcggtggctcacgctgttaa

SEQ ID NO: 751060 - DNA, 592 bp, Homo sapiens
ctcacctcgtgccctgtctccactgggagacatcacagcatgttttttgaagtcttcttcttgttttctctagaagttctgtaaaaaaaaaaaaaaaaaacgccattgataatgatagctaccttgcattttataccatcattttttcctataattttgtaattaaaagttcttattatatatgcaattcactgttgttaaagatttctaataggtaaaaaacatataaagtaaaaaagtaaaagtctttgtttcttttagtcttttaatttttaagtcacttggtattgagcaagtacaatcacctcagtattcatatgtttgggggactaataaaaataaatttctatgtatttaaaaacatagctcgagaactccaacatggcttagggggctttgctgaatcagaagagttcaaagcagttgatatgaccgtaaaawattgaaagccacaaatctagagtcttttctaatattccacattaaatcacctacttcaagtgacaagtgaaatgtgtttgtaataggtttttctttaagcgccaattgaagtgatctatactcaaaattaagaacaaatctatttagaaaa

SEQ ID NO: 751061 - DNA, 494 bp, Homo sapiens
agctaataaaaatttatagagaaatcttaaaaagacttgagacaaggttactgcaacaaccttggagcagactccctgggataaaactctctgactagttctctaacattgtacaagttgattaacctctgtgtgcctcagttttctgatttttaaattggatataataataggacctatcttatggggttcttatgaggcttagataagtaaaaagtacttagaatagcacttggcaaawagaacttaatgagcggtagctatgattactgttgttagtggttaatgtggtttggcactgtgtgcccacccaaatctcatgttgaactttaatccccagtgttgggggagggacctgatgggaggtgattggatcatggggcaaatttcccccttgctggtctcatgatagtgagtaagttctcatgagatctggttgttaaaaagtatgtagcacctcccccttcgcggtctgtcttcctcctactccgaca

SEQ ID NO: 751062 - DNA, 494 bp, Homo sapiens
agctaataaaaatttatagagaaatcttaaaaagacttgagacaaggttactgcaacaaccttggagcagactccctgggataaaactctctgactagttctctaacattgtacaagttgattaacctctgtgtgcctcagttttctgatttttaaattggatataataataggacctatcttatggggttcttatgaggcttagataagtaaaaagtacttagaatagcacttggcaaaaagaacttaatgagyggtagctatgattactgttgttagtggttaatgtggtttggcactgtgtgcccacccaaatctcatgttgaactttaatccccagtgttgggggagggacctgatgggaggtgattggatcatggggcaaatttcccccttgctggtctcatgatagtgagtaagttctcatgagatctggttgttaaaaagtatgtagcacctcccccttcgcggtctgtcttcctcctactccgaca

SEQ ID NO: 751063 - DNA, 590 bp, Homo sapiens
ctaattacttttaaattatacagcatttcttgcataaattctttttttataactttttttctctttcatgactttcgcagacaattctacactatgcctcaattttctattgcaaacatttctttctttaaacaaccagttaatttatttcagaacaagaatttaccatataacattctttttacataaattctgccccccaattttttttccctttttttctcccttttttttgaaggtgataaccatttttttccaaagcgaacttcctttatatckgtgaactagactgtctaaggccacaagattagaagttactataatacatgttacactgttaacttttagcaaactttacttttgttgaaaaccttttaagtttgagattttaattatctgttgctattaatagatgttgtttagtccaaattaacttagaattggtatagatggctttttttttttccttcaattatgtgagaggaaccatctatcgtcctgtcctgaagggagttcctcctaggtctggttggacctttgtatggtaattaagacttagatcccctattaggaaacctgccgggttaagg

SEQ ID NO: 751064 - DNA, 586 bp, Homo sapiens
ttggacaaaggatgctgcaagacacatggtgtgcccaacccctggctggcccatagcgtttatgatggggctggctagtggggaacatgtagtactcccagcccaagtgccacagtgcatagagcaacattggggtaacaccactgtgggatgggtacctgtcacagcctttgcaaacataacacatgtcactaccaaggtcaggccctgattgactttgtgccccctgggagtctatgggtctgtggggacacagagtagatttacctacccgygaactgcactggacattgtacctgggggtggccttatgtgcctgccactgttctccccatgttgccctgatgcccgcataactgggagatgctacactcttagtttgtgtgagtgcaatgagcccccagcagttctaccctttggcagtgactatccctggagtgggtgtcataattgtagaagcacaggttactgctcgagcagagcacaccactcgggctctgaattacacccaagtggcccttctcttgttaacagatgaggctgatcagatcagaaaggtggtgttgcaaaactggatggccataga

SEQ ID NO: 751065 - DNA, 586 bp, Homo sapiens
ttggacaaaggatgctgcaagacacatggtgtgcccaacccctggctggcccatagcgtttatgatggggctggctagtggggaacatgtagtactcccagcccaagtgccacagtgcatagagcaacattggggtaacaccactgtgggatgggtacctgtcacagcctttgcaaacataacacatgtcactaccaaggtcaggccctgattgactttgtgccccctgggagtctatgggtctgtggggacacagagtagatttacctacccgcgaactgcactggacattgtacctgggggtggccttatgtgcctgccactgttctccccatgttgccctgatgcccgcataactgggagatgctacactcttagtytgtgtgagtgcaatgagcccccagcagttctaccctttggcagtgactatccctggagtgggtgtcataattgtagaagcacaggttactgctcgagcagagcacaccactcgggctctgaattacacccaagtggcccttctcttgttaacagatgaggctgatcagatcagaaaggtggtgttgcaaaactggatggccataga

SEQ ID NO: 751066 - DNA, 617 bp, Homo sapiens
caagacaaaaacatttccccaccaagcacatccatatgaggggtatgcttatgcatattagtgttcccaggtacaaagctgcttcatttcagctgccatgacttgactttcattgttttaagggcaatttgaatgcatgggattcactggaacacagatgcactctcctcatctttcaaaacaatcagcagttagattacaacaggctttgattaatgcagggcttgcatgagaatgcaagccaacgtgtgtctaattgtttagcaacaaacataggcccccatttaatgctctggaaattagcactctctttaagagccaaatcaaatattgtattctggctctgcagaccacaggcatctaacagtccgcaggtactactgttgtcctctagaataactgtgctggtttagtatacaaagacttttggttaggggagtctggattttcagcaaggtctttaaaragtgtgcagtgttgctagtcctttacatacgctggaatttaatgtcggtaccacttaacatcagatcttcatctgggtagaacaatttctgtaggaaagacatggtaacagaataccaaaatctgaacttaggttaagagcaaagaaatac

SEQ ID NO: 751067 - DNA, 569 bp, Homo sapiens
gctgacatccttatcttaccctaattaccacccaaaggtcccacttctgaccaacatatgaatttgataattatctttccagcaaatgaaaatttcggggacacatttaaagcctagcaaggtttgaggtggagagggagagtaatttttaagtaagaaaggtaacacaaaaggcattttaagaatgatagccttacctcataaaaaataaaacttttttagccgggcatgttggcacatgcctctaatcccagctactcaggaggctgtggcaggagaatcacttgaacctgggaggcagaggttgcagtgagctgagatcatgccattgcactccagcctgggcaacaagagcgaaaactccgtctcaaaaataaataaataaaaaataaaacttttcatatggcaaaagatactgarcaaagccaaaaccaaaagatagattggggaaaaagcatttggaaaacatcgcaggcaaagggttcatagcatgactacactagaaaacccttcatattagtaaaggtaccaaagaaaatctagtaaaacctgactaaatattataaaag

SEQ ID NO: 751068 - DNA, 597 bp, Homo sapiens
attcatgtaaccttttttcaaggttcttagcttccttgcattgggttagaacatgctcctttatctcagaggagtttgttattacccaccttctgaagcctacttctgtcaatttgttaaactcattctccgtccagttttgtttccttrctggcaaggagttgtgatcctttgtaggagaagcagcattctggtttttggaattttccatctttttgcgctagtttctcctcatttttgtggatttacctacctttggtctttggagttggtgaccttcagatggggtctctgggtagacatcttttttgttcatgttgatactactcatttctgttacttgaagtttttcttcttttctgacgtaagcacttatagctataaattttcctcttattactactttcactatattccataggttttagaatgttgtgtttccgttattatttgttgcaaaaggtttttcaatttccttcttaatttccttattcactcactagtcatttaggagcatatttaatttctgtgtatttgtagtttccaaaatttctcgttattgattcctagttttattccattgtggtcagagaaagt

SEQ ID NO: 751069 - DNA, 597 bp, Homo sapiens
attcatgtaaccttttttcaaggttcttagcttccttgcattgggttagaacatgctcctttatctcagaggagtttgttattacccaccttctgaagcctacttctgtcaatttgttaaactcattctccgtccagttttgtttccttactggcaaggagttgtgatcctttgtaggagaagcagcattctggtttttggaattttccatctttttgcgctagtttctcctcatttttgtggatttacctacctttggtctttggagttggtgaccttcagatggggtctctgggtagacatcttttttgttcatgttgatactactcatttctgttacttgaagtttttcttcttttctgaygtaagcacttatagctataaattttcctcttattactactttcactatattccataggttttagaatgttgtgtttccgttattatttgttgcaaaaggtttttcaatttccttcttaatttccttattcactcactagtcatttaggagcatatttaatttctgtgtatttgtagtttccaaaatttctcgttattgattcctagttttattccattgtggtcagagaaagt

SEQ ID NO: 751070 - DNA, 673 bp, Homo sapiens
cagcagtgttctgtagttttccttctaggggtctttcacctctttggttaggtataatcctaagtattttattattttttttgcaactattgtaaaatgggttggcgtatggcagtgctactgatttgtgtacattgattttatatcctgaaacttattgctgtattcatttatcagttctaggagctttttggataagtctttagggttctctaggtataagataatgtgatcagcaaagagtgacagtttgacttcctctttaccgatttggatgccctctttctcttgtgtgattgctctggctaggacttccagtactatrttgaacagaagtggtaaaagtgggcctccttatattgttccagttctcagggggaatgctttcaacttttccccattcagtataatgtgagtttgtcatagatggcttttattatcttaaggtgtgtcccttctatgttgattttactgagggttttactcataaagagatttggattttgccaattctttttctgcatctattgagatgattgtgtgatttttgttttcaaatctgtttatgtggtgtatcacatttattgacttgcatatgttaaaccatccctgcatgcctggcatgaaacccacttgatcatggtggattatctttttgagatgccgttggatt

SEQ ID NO: 751071 - DNA, 621 bp, Homo sapiens
aatatggtatgtatatgagaaaagaatagggatttcaggatcagaggagagaaggataaaaaactggaatggagaaatggagaaaccacccaagcaggaactatgcattttaaaacagtgaattcacatcccctgcagcaaagtggctgatgaaattttatgaacacaaatatctaatgtttaacttttggttgcttatgttgctgagatgtaaatccttcctctgtcatcagcaccagtccaaatttttagcataatcagctttacataaagcccttgagagaagatcttttttaaagttgaatgtgaagaaaggtstgaagttgatgtttttggctaataaggtataaaacaaagccaggagaagcatgatattaagataaacccatgaacacccctaagtccctggacgctgaggttcagagctatgagtgaccataaggctgtgagtacctcaagacttttcagatttttatagtagtaagcatggaattatattctcaaatggtggtttatggaaaaattatccaaatcttacagatcaggagacacagctaacagtctgtttcccgccactcctattcacatgcagaaggagcccctaatttacacatgaaaggc

SEQ ID NO: 751072 - DNA, 433 bp, Homo sapiens
attgtttcttaatttttacctttacctattttaaacttacataggtttacattgctaagtgttagaatttttactttttgctaatgctttaaatatattttcttagttaaaaaaaaaaatccggcggtaggagggacccttcctatattaacctgtatcaaccacacagcttaataggattaagaattagaaatgtctatagtaacagcactttactattttgggaaattctcacccartgaggttaagttacaaataatgttattggttgacaaagaaacttcctaaaaatacatttatctgaacaacagactgcacaaccagctccctcttcagacaatagattactcatcaggatttatagccctcgtggtacaatataaagtatatttagcctttgccccatgttgatgaaaaaagccaaactctgtaa

SEQ ID NO: 751073 - DNA, 578 bp, Homo sapiens
aatcccagcactttgggaggccgaggcgggtggatcacttgagggcaggagttcgataccagcctggccaacatggtgaaaactcatctctactaaaaatacaaaaagaattagccagccgtggtggtgggcacctgtaatcccagctacttgggaggctgaggcacgagaatcacttgaacccaggaggcagaggttgcagtgaaccaagatcrcgccactgcaccctagcctaggcaataagagcaaaactctgtctccaaagaaaagaaaaaaatgaagcccaggtccagcccttgctccatcacttcccagcagtgtcccctcctccagccttcaatctactcatccctaaaatggaaacaagagcaggacaaccatgagaacaaaaaaaaaagccacgtacttggcaccctgcctggccacggaaacactcgtgtgtgacccagggtcccctagccttggcgctgctaacactttggtcattctctgcggtggggctgtcctgtgtgtcaggcaatgtttagcagtgtccctggcctctagaccctgtagcacccccagcttctatgaccaaa

SEQ ID NO: 751074 - DNA, 541 bp, Homo sapiens
tggtctgaggtgccccagggccatccacacacaggacagaagtctgggctgcctttgctaacacccacaacacccttcagtggttttgtgtccttctagaactttctcccgctggccttctctcctaccacctggacgctggacctcctgtctgggtgataacaggccccgggtgtgtccttgggaaagcaaacagcccagcatatgcctggctccttcgcaaaggcctcctcctccctcactctccacagcctgggattaggcaccctgagggggaaactgaggccccaaggcactgccaccttcccagtcacccactgctagtgaaatrgaaggcctggaggggtgctcagagtcaggacaagcatttttagagcacctgctgtgtacaggactgctttaagggatggtgccctgctccctctgcagggcagagggcttcaactcccctctctcctgccccccaacccagcaccccctctgccatgagagctggtgggggcagagcttcaggccttacctttcaggcaggacatcttaa

SEQ ID NO: 751075 - DNA, 411 bp, Homo sapiens
tgctgaggtcagagatgcttgctctgggccagaaatcggggaggtgaatgtgaagatggcaggccaggaagggtttggaggagaaggagctggaagtccaggtggagctagtaagacatgggtgggagataccaccaagacatagaccggggccttgggaagggagggaaagcgagagatactgatgsgaacaggcttgggccagctgcgtatgaaaggcagccattccaacttacgagtggtctctggagcttccccattgcactagctgggccaggtcccagcttggcaactcccagccatgtgatcacggatagtttatctcaagacttcactttcctcatctttaaaatgggatgagctggccgggcacagtggctcacgcctataatcctgacactttgggaggcc

SEQ ID NO: 751076 - DNA, 636 bp, Homo sapiens
ccagatgcgaattgacggatgggtcaggtgatgcgtctcaaatttctctacagatgagtaatcgaataagaaactagtggccaggggcgtggcttcttccccatcttcccactacaaccctctcccgggccttgcacacaccccatcaccaccatcatcatctccatccctgctctttggccaggaaaccctgttaaggtggtgtggggaaatgaacattgactcagggccaaaaaaccagttctgctgcaagccagctgtgccactgtgggtgcgtcgtttaacctcattaagcctctgttttcccatttgtaaactacagacagactggagacttgtaagagataaatctaattctttcatagacattaatgatccttgaaaaaggatcatttgagggacatggagattggtttctactgtttctgttgttactaacactcctcctttcccaaggcctttagaaaggggtgagctctccatcacygaaagtattcagataggcttccaggaattttttgggaaaatgttcctgctttgagtaagacacaggactagatcagcgtttggcaaactatggctcgtgggctaaattccgcccctctcctgtgtttgaagataaagtggaacacagcc

SEQ ID NO: 751077 - DNA, 584 bp, Homo sapiens
aaactgcagaacatgaaagacaaagaaatgtctgcaagcagccggagagaaaagccctccccagtggaacacagatcagtgtaccatggattcttaccagcacctctagacacaaaagacagtagaagaatatctccaaacagagccgtgaaaataaccgtgaagctagaatctaaacccagctaaggccaggcgcagtggctcacacctgtaatcccagcactttgggaggctgaggcaggtggatcacttgasgtcaagagttcgagaccagcctggccaacgtgggaaaactccgtctctactaaaaatacaaaaattagctgggcgtggtggcgggcacctgtaatcccagctactcaggaagctgaggcaggagaatggcgtgaacacgggaggcggagtttgcagtgagccaaaatggcaccactgtacttcagcctgggcgaaaagagcgaaactccatctcaaaaacaaacaagcaaaatatgaaaaaacaaataaacccagctaaactgtcactcaagggagataatgaaacaatgacatttcaggcaaaaactaacagagggttgccacgagtg

SEQ ID NO: 751078 - DNA, 671 bp, Homo sapiens
gcatttgcagtcactcctcattttctttcaaactccctagccctagctaatcactgatgtactttctgtctattgtatgaggggaaataggtattggggaattgggtgattgttgaggcgtgttttgcccaatagtcagcctcccagtaacctgaaagaaagctcctccacctctctgcgtgtctctttccaatgtagcaaccttgggcaccgggcaaagccttgtcctaaacctcggcccctcccaccaaaccatgaccaacttstggtctctggggacgctggacaatggactgccccctacggggacacctcccccgttcaggtgcagctcataatgaagccccctaactaagacaggaggaaatttcttcactgctggcgctgatcaaggaagactgagggtgcccgggattctttgccccacatctagtgagtccactgaacccagggtaattgggacagcatccggtaaaatttttttctttcttttgaataatggggcatgcctatcggtattaactgaatataaaggcccattagaatgattatcggtttctgttgttggcatgaagggcatacaagaaaccccatacaaaacaccacctgtatactgctcatttcagggagttacccacactcactctttcttggtcattcctcactgtccc

SEQ ID NO: 751079 - DNA, 589 bp, Homo sapiens
aaaccccatacaaaacaccacctgtatactgctcatttcagggagttacccacactcactctttcttggtcattcctcactgtcccactcctttattaggaaggacattctacacaaactaggaggaatcattcatttatcagccctacatcaaagcatcccttacttattgttatgtcaagaacaaaacccttcctcagacactcaacatcaaacagacttaaatcccaaattcctcagccaagtaaaccccataatataaagcactgacttccccgtaatagctatctaccattctccaatacaaatttcactgaagggatcctaagcactatatagtggtcctamaatgtcccctcaatcctcatggattatggggactcaagcccatcatctcctgacttttggctgccaatattttaatcccctcccactctccccacaatactcctattctcccaatcaaaaaacctggtggctcctacggagcagttcaggatttgtgacaaatcaactccactcttgttactgtttgtccccttgtcccaaacccctacaccctcttatcgagaattcctcccaacaccag

SEQ ID NO: 751080 - DNA, 632 bp, Homo sapiens
ggcaatattagcaattcgtaaatcaccatccaaacccaccatgaacagatagagcaaactgactcagtgaaagagaaatgactggaagcaaaatggggtcaaagttcatgtctttagggcagatacattttacccagtaatatttctcttcccaagtcccctgagtcggtcccaacttactgccttttagagatctcacttttattgtaagatagcttcttacacgaaaacatttaccacttgtgcacgtatatatatatatatctatacatatgcacacacatcctttgtattcaactgcctgataaactgtagtcatttgttctgtgttgtggagactgataagtgaatcttttccttatctgccagggtaaactgccaactttcaaatactctttggttttcccaggtgagtcatgcaccttccrgtgtctgtagccccagggctgctcatgcatgtgactgggtcttagttttttgacctagagaaggcataccaaagtctgcttgagccaacatctttgccaggtgccctcattgtgtttatttttgtcatataaaccttaagtggatggcaggattatgtttccacatgtgcacacctgtttacagaccacccacatcaggtaggg

SEQ ID NO: 751081 - DNA, 642 bp, Homo sapiens
gcggtaggcagattaatggcccgcagagaggtccaagtcacagcccatgaaacctgggattgtgttaggctacatggcaaagggaaattcatgttgtagatggaatgaaggttgctaatcagctgaccttacaatagggagatgatccaggtggactcaatataattacacggtccttaaacgtggaaaaggatggtgcacctgcagtcccagctackcaggaggctgtggtgggatgagtgtttgagacaggagttcgaggctgcagtcaggcatgattgcagcactgcactccagcctgggagacagagcaagcccttgtctcttaaaaaaaagagggggcaggagagaagggcagagtgatgtgatgtgagaaagactcactcgccattcacaaagccattgtgggctttgaagatggaagaaaaggccgtgagccaaggcaggcagctggagagaagctggaaagacaaggagtggattctccgctgcagcctccaggaggagccggctctgacgacaccttcattttagcccagtgacaccgtgttgcacttctgacccgaagaactataagattataaacttgcggccgggcacggtggctcttgcctgtaatcccagcactttgggaggccgagg

SEQ ID NO: 751082 - DNA, 642 bp, Homo sapiens
gcggtaggcagattaatggcccgcagagaggtccaagtcacagcccatgaaacctgggattgtgttaggctacatggcaaagggaaattcatgttgtagatggaatgaaggttgctaatcagctgaccttacaatagggagatgatccaggtggactcaatataattacacggtccttaaacgtggaaaaggatggtgcacctgcagtcccagctacgcaggaggctgtggtgggatgaktgtttgagacaggagttcgaggctgcagtcaggcatgattgcagcactgcactccagcctgggagacagagcaagcccttgtctcttaaaaaaaagagggggcaggagagaagggcagagtgatgtgatgtgagaaagactcactcgccattcacaaagccattgtgggctttgaagatggaagaaaaggccgtgagccaaggcaggcagctggagagaagctggaaagacaaggagtggattctccgctgcagcctccaggaggagccggctctgacgacaccttcattttagcccagtgacaccgtgttgcacttctgacccgaagaactataagattataaacttgcggccgggcacggtggctcttgcctgtaatcccagcactttgggaggccgagg

SEQ ID NO: 751083 - DNA, 664 bp, Homo sapiens
aaaaaactgaaatgaatgaattttcatgaagtgagcattggtgtaaactgagccagtacattgggaacccccttcattctccctcccagttactgcaccatccctcctgccacaggtaaatactgccctgaccttcatggtaactacttgctttgcttccattagatattctatttttgtttcagctgtgcttttgaactttatagaaatggattcatacagggtgtattccttcacattgagctggctgtgtgcagcattgtgtgcagttgtttcatattgtagccgggaacagtgactcatcttcattgctctttagcattccattgtttaattgaatcccagttttcttttccactgttgattgtgtttagatttttttcagtttggggttactatgaaggatgctataaagagcattcttgtacatrgctcttgtagcacagtgaacacatttctgttgggtgtagagatgtacgtatatgtgtgtgtgtgtgtgtgtgtgtgtgtgtgtgtgtgtgtgtgtgtgtatatatatacaccccaaggggtaaaattgttggatgtacatacctttgacttcagtaaatcatgccaaactgctttccaaagtggttgttcacctttttttccttttgtttttcagtggatccttatagtttgg

SEQ ID NO: 751084 - DNA, 630 bp, Homo sapiens
gcataaatatatatgtatatgtgtatatatacttatctatgtatatgtgtatatatatacttgtatatatatatatttatacatatatatgtgtttatataaatcaaaatctgttttatttgggcacatgtgtggctgttatagcttcctcatacagtctttgtgttttttgttttttgtttttttttgagacagagtctcgctctgttgcccaggctggagtgcagtggcrcgatcttggctcactgcaagctctgcctcctggattcatgccattctcctgcttcagcctaccaagtagctgggaatacaggtaccccccaccacgcccggctatttttttgtatttttagtagagacggggtttcatcgtgttagccaggacggtctcgatctcctgaccttgtgattcgcccacctcggcctcccaaagtgctgggattacaggcgtgagccaccacaccggacagtctgtcttttattatatgtagtgataaaagaggaaggattctttatcctacttaatacattaactttaaatcccgtatggtctgatattaatattgccattccaactttctttttgtttgcattgcctgattcctctttgtccactactttattttaaac

SEQ ID NO: 751085 - DNA, 630 bp, Homo sapiens
gcataaatatatatgtatatgtgtatatatacttatctatgtatatgtgtatatatatacttgtatatatatatatttatacatatatatgtgtttatataaatcaaaatctgttttatttgggcacatgtgtggctgttatagcttcctcatacagtctttgtgttttttgttttttgtttttttttgagacagagtctcgctctgttgcccaggctggagtgcagtggcacgatcttggctcactgcaagctctgcctcctggattcatgccattctcctgcttcagcctaccaagtagctgggaatacaggtaccccccaccacgcccggctawttttttgtatttttagtagagacggggtttcatcgtgttagccaggacggtctcgatctcctgaccttgtgattcgcccacctcggcctcccaaagtgctgggattacaggcgtgagccaccacaccggacagtctgtcttttattatatgtagtgataaaagaggaaggattctttatcctacttaatacattaactttaaatcccgtatggtctgatattaatattgccattccaactttctttttgtttgcattgcctgattcctctttgtccactactttattttaaac

SEQ ID NO: 751086 - DNA, 630 bp, Homo sapiens
gcataaatatatatgtatatgtgtatatatacttatctatgtatatgtgtatatatatacttgtatatatatatatttatacatatatatgtgtttatataaatcaaaatctgttttatttgggcacatgtgtggctgttatagcttcctcatacagtctttgtgttttttgttttttgtttttttttgagacagagtctcgctctgttgcccaggctggagtgcagtggcacgatcttggctcactgcaagctctgcctcctggattcatgccattctcctgcttcagcctaccaagtagctgggaatacaggtaccccccaccacgcccggctatttttttgtatttttagtagagacggggtttcatcgtgttagccaggayggtctcgatctcctgaccttgtgattcgcccacctcggcctcccaaagtgctgggattacaggcgtgagccaccacaccggacagtctgtcttttattatatgtagtgataaaagaggaaggattctttatcctacttaatacattaactttaaatcccgtatggtctgatattaatattgccattccaactttctttttgtttgcattgcctgattcctctttgtccactactttattttaaac

SEQ ID NO: 751087 - DNA, 637 bp, Homo sapiens
ttttgacgacaaatattgcagactgcaagagacgcttcttgttcgtggaaatagaaataaagcatggtgtctgcgcccggctttccgctgtaagctgaagtacttcacggcagcaggaattgggcaacccaccgtttacactccaccctttgaaactgggctgaatggggtgggggcccgcctttggggagaaaagcaaattttatttaagcccctgaaagaggagagggttggccaggctcggtggctcacgcctgtaatcccagcactttgggaggctgaggtgggtggatcacttgaggtcaggagttcgagaccagcctggccagcacgatgaaacccagtctctactgaaaatacaaaatgaaccaggcgtggtggcacatgcctgtaatcccagctactggggaggctgaggcaggagaaycgcttgaacccgggaggcggagtttgcagtgagccaagatcattccattgcactccagcctgggtgacaagagcgaaactctgtctcaaaaaaaaaaaaaaaaaaaaaatgcgtattccccagccaccggaaaatgagatttctgagcagctggatctgataattaccatgaggtgtcattacatgatatacacgtgcttggaaacagta

SEQ ID NO: 751088 - DNA, 429 bp, Homo sapiens
tgagccaccacacctggccatgtgcatgaacttttaagacaaacacaaggccccacaaaagttaaggttttcccacctaatttccaggagatcttttggtgcaaggatgagaaacccttaaaagtacacagaaaactccaaagattcaagagagttcattcgggctgagccagcccactgggcagactgaccttcaaacaaggcccacccatgacatacaccagatggctctccaagaatctctctagttctcagggtccttaaggtactggacagagctagrgaggcaaacccatttgcttcttcctgcaggaaaccccttgaggtcaagaccccacaatcagacgaggatggagtggctcaccctcagtcaacaggccagactcaaggtgttataatgtcttaaccaagggtgcgggcctccaggtc

SEQ ID NO: 751089 - DNA, 633 bp, Homo sapiens
ttctgagttgtcccgaaataatataaacttgcttttattaaatccccggttgggaggggcatctgagctgtgaggtgcctgggttgctcttccaaacacacatgcctttctctttatctcatcatctctttattggctcttactcacgatcccgtttactttattagtttgagagtgtagcaaactgttggtcttttagccagaaattgttggcctgtgactatggctctatcatctcagatatgttatatttaaaattttttatttacttagtttatggtcttaactgacctctgtgttaattcctctatttacttgtactcaatggcttcttgatgattcatcatcttagcagcttttctcagggctgttggtagcatgcagcaatgaaagcattttgtctgcatttacgttcacttgtttacatcttcttcactacataaacaagggctcttttattaaacccttgcaatarttttagtgccaattatcctatcttggctcactacaccagtcttcacactcatcaaacatttgctttacttaagctataactatgataaattaaaaaaaagaagtacttggtgtctctccctcagcctttgttgttgggtctttcctaaatgatttcat

SEQ ID NO: 751090 - DNA, 620 bp, Homo sapiens
atggacacatgagcaaaatgttgaggatttagaattccaggtgcctctcagtgaaagtggcaatggttaattgaatagaatacataatcaaatagtacaagtaggcccggtgcggtggctcacgcctgtaatcccagcactctgggaggccaaggtgggcgatcatgaggtcaacagatcgagaccatcccggccaacgtggtgaaaccctgtctctactaaaaatacaaaaattacctgggcatggtggcatgtgcctgtagtcccagctactcaggaggctgaggctggagaatcgcctgaacctgggaggcggaggytgcagtgagccgagatcgcgccactgcacttgagcctggcaacagagtgagactccgtgtcaaaaaaaaaaaaaaaagtacttttttttctttagaattcaacatcagctaaaaggcttctactgtttatgttttattacctggtttgttacacatctattgtaaagtgctattaaattataataaattagttttccctccacagaagtgtcacctgaacatacttagctggctcatcagtgccacaaatatgtaattatttatcttattaagcagttttgttaccttttacacattgca

SEQ ID NO: 751091 - DNA, 535 bp, Homo sapiens
ggacacatgagcaaaatgttgaggatttagaattccaggtgcctctcagtgaaagtggcaatggttaattgaatagaatacataatcaaatagtacaagtaggcccggtgcggtggctcacgcctgtaatcccagcactctgggaggccaaggtgggcgatcatgaggtcaacagatcgagaccatcccggccaacgtggtgaaaccctgtctctactaaaaatacaaaaattacctgggcatggtggcatgtgcctgtagtcccagctactcaggaggctgaggctggagaatcgcctgaacctgggaggcggaggttgcagtgagccgagatcgcgccactgcacttsagcctggcaacagagtgagactccgtgtcaaaaaaaaaaaaaaaagtacttttttttctttagaattcaacatcagctaaaaggcttctactgtttatgttttattacctggtttgttacacatctattgtaaagtgctattaaattataataaattagttttccctccacagaagtgtcacctg

SEQ ID NO: 751092 - DNA, 535 bp, Homo sapiens
ggacacatgagcaaaatgttgaggatttagaattccaggtgcctctcagtgaaagtggcaatggttaattgaatagaatacataatcaaatagtacaagtaggcccggtgcggtggctcacgcctgtaatcccagcactctgggaggccaaggtgggcgatcatgaggtcaacagatcgagaccatcccggccaacgtggtgaaaccctgtctctactaaaaatacaaaaattacctgggcatggtggcatgtgcctgtagtcccagctactcaggaggctgaggctggagaatcgcctgaacctgggaggcggaggttgcagtgagccgagatcgcgccactgcacttgagcctggcaacagagtgagactccrtgtcaaaaaaaaaaaaaaaagtacttttttttctttagaattcaacatcagctaaaaggcttctactgtttatgttttattacctggtttgttacacatctattgtaaagtgctattaaattataataaattagttttccctccacagaagtgtcacctg

SEQ ID NO: 751093 - DNA, 534 bp, Homo sapiens
aagttgtggaactgtgatcagttgcttcctaaaagcttcactcaggcccttacactatgctgtctttccactgtcttgatgaggacaaactactrattttcttgggagtttcatgtatgtggagtagaaggcattttttgtggcagacaaccttctgcccatactcaaacatgcactgcgccatgttttaccagtgagtgaagcaacagcactaaaatgtagtgttcgtggctagtgtgtgcccccattctagtccagcttccttttatacttttagttgcaatgactgttaagaggaccctgttcttagaaattttccctctacctaaaatatttggggatctctgaagaacagaaacacctgggggctccgactgaggaacaggaatgcaagaggcaaaaatacatatcatcaagacaccatacaagagaaatagccagggagggacaccactggggctgggttgggagagggctcctggggagctgctacccaaagaatgcactgaagaccatctggagtccggtgctgta

SEQ ID NO: 751094 - DNA, 534 bp, Homo sapiens
aagttgtggaactgtgatcagttgcttcctaaaagcttcactcaggcccttacactatgctgtctttccactgtcttgatgaggacaaactactaattttcttgggagtttcatgtatgtggagtagaaggcattttttgtggcagacaaccttctgcccatactcaaacatgcactgcgccatgttttaccagtgagtgaagcaacagcactaaaatgtagtgttcgtggctagtgtgtgcccccattctagtccagcttccttttatacttttagttgcaatgactgttaagaggaccctgttcttagaaattttccctctacctaaaakatttggggatctctgaagaacagaaacacctgggggctccgactgaggaacaggaatgcaagaggcaaaaatacatatcatcaagacaccatacaagagaaatagccagggagggacaccactggggctgggttgggagagggctcctggggagctgctacccaaagaatgcactgaagaccatctggagtccggtgctgta

SEQ ID NO: 751095 - DNA, 522 bp, Homo sapiens
aataaattaagcatagagataatttgtggcagctctaatcaatcgtatctatatgcactgtgattacatgaaatgaaagggccattcgcatataaggctgataaatggctctaagtccagaaagagtttgatctgcagaccagctgtctttctttttttacccaggcaaaaaaaaaaaaaaaaaaaaagaaagaaagaaagaaaaagaaagatcaactgtttaactagaaarcctttacctaatatttcaaatgaaatttaaaatattacagtactaggtgatgttcaataattaggattaaacacaacaggataacaaatattattcaaaacacagaactaaaaactaaaggcgtgtgacacagttcattgatgggaagatactttcctggctgatgtagagaagaaatgatatggtgcagaggatgataaaattgaaactgaaagctacaactactcgatgaaagggtgagaatggagtatttactctgctggcagtggggagccattgtggatctcgac

SEQ ID NO: 751096 - DNA, 470 bp, Homo sapiens
agaaaatttgaaatataatggagataggggctagtttttgtcatgtaagaaggattataccagatgttagtgaaattccctgggttacttctgggactaaaaagtggaagggagatatgcctaattttattgttaaggctattaatattattaaagatgctacttgattgattgagtttatgattattcattgtctggagcacagtatatcagtaataacacctgttatgaggattatggatgcagttgcttgtgtaaraaaatatttggtagctgcttctgtggagtgagggcttgcttttttatagaattgggacaatggctaatatatttatttccatgcccattcagttgagaagtcagtgtaaacctattattgtgatgacagttcctgtaaagatagtgaaagagatgataagttgggttacagggttgattagtgtgagaaagtgtataaaccaagatttttg

SEQ ID NO: 751097 - DNA, 589 bp, Homo sapiens
ttaaaaatttctgctattcaagatcgctaagagcatgaaaagacaagctacagacagaatttaatgttcagcttctttcagcaatttgtgtgtgattttcatccatgttgttgcataaagctgtagttcactcatttttattggtaaataatggcctattgtgtgacaagaccacaattcatttctccattctattgataggcttttggttgtttacagttttgggtgctaagaacgttattttacatgtctttttgtacataagagaacactttttttgctgttggatatgttaaccaggattgaaattgctgggccatacatagcgatgcgtttgtaaaccagctcactgaayaagaaagccttgattagcatttgctaacatctgtgatgttaatactcctaccatggccaatttccagctaccaataatgtaatgacccactcacagaagcccttttaacaatcgctctcatgagctgctcggaactggctccaacaatgctgactcaacccaccatacaacccacactttacctgttcttgactttagcagacgatgtcaaactgtttgtccaaatgattggat

SEQ ID NO: 751098 - DNA, 627 bp, Homo sapiens
aagagcaatatactatgaaatcagaggaaggtgctgtttagaattcagaccaggtcccttagctagaatgtgaatcccaactccacttttgacttgctgtgtgactttgggcccaagttctctctgtggcttcttttcttcatctatgaaatggaaataatgataactgygtttaagaaccgataggacaatgacactgcttgcattcaagcccttagcttctcttgcatgaactggtaacattcgcttaatccctccaactcacccactatgctagtgctgaagtcatctttctaaactacaaatatgatagttttatttcttttataatagccccgtttactttttgcaaagaacccaaattatttaatagggtgtagtcatccttccgtgatctggcctttgcctacctctgcagttttagtgttcaccatgacccctcacccagcccaatcttaaactcttagcttcgcacacattaactacgtaaagttcctctaacatgaaatgctgtttcctacctctgtgcctttgcatggtcaatgtttctctgtttggaaatttggtctccttggtaaacaccaagactaattttatgatctcttcaaaatttgctggattcttcca

SEQ ID NO: 751099 - DNA, 622 bp, Homo sapiens
tcctgagtacaatagcatctaccaaccggttggctaaagtgtggcacttattttctaaaagaaacaataaattacattttaatgacagatttctgtgtcagtgatttcatcccaggtacgatcctgaaggtagaagtgtttctgcaagaaatgatctgttgccccaaagtaagaactaattgttgccaggaccagagaccatagctctggtcataatgagttctcaggggagagaaatgaataccaactgtaaagaaactaaaaggcaaaaaaccccattgtttcctgatggtcctctaagagttagaaatacatatgaggtagatatcttttaaaataaaaccatgtttactactatgcatttaataaccttctataaatttcactttatttgctttatttagcacgaaagagtcttgtctttactaaggattaaaatgtaaatgatgatagtaataacaacaataacawtagcatcaacagtaatatgtgccagcattgaagacattctatgtaccaggcactatttaagatttttacctgtatcgactcatgtaatccttataaagaccctctgagaaaggcactattattatatgcattttaagatagcaaacttaat

SEQ ID NO: 751100 - DNA, 643 bp, Homo sapiens
cgtaagaatgcctgtctatcttaagtgctcagttctttccagatctaatgcctgtcattattgtttctcctcttgacacaactaggttgaaatattcattgcctttgaattactccaatagataatcttcattaggaaccaacatgtagatttttccagaagaaacatgtacacatctcacagtatgcagtttccaaaattaccagtttaattttatttttattaaggcccaatgtgcttgccaattgtttaaaaatgtgatgttggtgtctttcatgtctgtgtttatatagttctacaagttgagaaatgtctctttttaaaaaatcagtgaaaatataaaaagtgtcatgctttatctttctacatgacatatctttgtgctaaacttttttcacataaatgaataataaatctgttgctcggcaaagaaaaataattggttatatgcgggatattttattccagttcagaagaaatacgtgaatgtaaagaggagaratattttacttgggcttatgaaatttcatatttattattgctttttatactcaagatgtgacagaaattggtgttaggatctgaagaaggaaaatgacaacaggttaatcaaagaatctaaaatggagccaggaggccattt

SEQ ID NO: 751101 - DNA, 546 bp, Homo sapiens
tgcagtggcacgatctttgctcactaccacctccacctcctgggttcaaacgatcctcgtgcctcagcttcccaagtagctgggattacaagcatgtgccaacatgctcagctaattttcttttattttcttttttctttcttttttttsggggggtgggggcggtatttttagtagagagactgggtttcatcatgttggctaggctggtctcaaactcctggcctcaagtgatctacctgcctcggcctcccaaagtgctgggattacaggtgtaagccactgcctggccaggagatttcatattaaagtacttttttctgtcccctctttaaacgtcaagagatacagacacagttggcccatatctctatgttgcaataatcagcctgggatgaatagccacttcctgttctcccagttcattacaatcctcagaagcacctacttctctgtttcactgatttctagtacatggttgacttctgtaggcattagagcttgtgattcatggtggtcagccctcaaataaatgaatgttgaccc

SEQ ID NO: 751102 - DNA, 476 bp, Homo sapiens
ttgtttgggagaaaatttgatggtggtcatctaggaaagtcctgatgagaggagatgaggagtatctgtgggctggtgtttaagcttagtttcccctttggaaacctcctgaaagctatggacttactccatagaaaatttttcatgtgtgcatatattaaaaaattgtcatgcggacatggtggattcagatacttctcaggattctctaacagaccaacccagagattcaaggacctcagcctaagaacttctgctctgacagagaagcacaacttataaggtgayacaactggtgatggactatggatgcctcctttgaaaacctatccctcacattcattcacagctacttttggggcagctactatttccaaggaactttccagatctactgtccacttaggtttctgatttcacaccttccacttttcttggatatttaccataaatcaggtcctttagaatcatgtcac

SEQ ID NO: 751103 - DNA, 618 bp, Homo sapiens
aggagaaattgtaaaatgtctacttaaaatatttaattaaattcaattccttatttaatgtattaaaatccctgtgagaaacaggtgcatattcaaaaaagatttttttttttttttttttttacagattaataagagtagttagtgtgtaagggaaccaacaagaggtagtgcaataacctgggatttgtgtaactgcctggtgggttgtttttgcccactgcacagatagagtcgattcattgagacagcagtattactgtgaagagagtttaataaatgcagagccggccaagtggaaagaagggagtttactgcacaaatcagcctccccacagagctccgaggctagggcttttcaaggatgggcagsgggctggtgaatggggggaatggtgattggttgggttcagcatgaaattgtaggggatcaaagctatcttcttgagctgactccctgcctgggtaggggccaccagaccagataagccagtttcttggtatgtgtaatgggtctgggtggagtcagttgggtttccagaatgaaaaagtctgaaaagtatctcaaatactagtcttaggtcttagaatactgatgttatctaaagggacaattag

SEQ ID NO: 751104 - DNA, 630 bp, Homo sapiens
aaatcaaggtaacagatccttttacattttattgtctccttggggctttgtaatacttttttttttttttaaagataaagaacatgccattttatataactcatcctttcaaacaagtagcttgagaccggttggtcttccaagtttgaattttaggaggacactcttctgtcatgtcatttcttgaagaaatgcagctgtcagtatggatatacccaagaagcatatttattctggtagaactacaaggctygacatagttttagagttattttaaaattattttaaattaattttgaagttgaatttgaatgaaagcaacttaaattctttgctgagacaaaaaaagaaattctgtcaccagaactgccctgcagtggaaaaactttagctgtttttttttcttttagtctctttattgataggcacaacagcttgaagaaaccaaatggactggatgccaaaagcaactttgtgaccccctatcagaggaagtcaagactggtgagaaattggtgcagaccaaaggaggtgacctctagttacttttgaatgattaacatatcattatcatactaaaatcccctctgctaagtgaagatcaccgccaattttgtgtacatgcaatgt

SEQ ID NO: 751105 - DNA, 599 bp, Homo sapiens
aaacctatttagaataacttttgaagtaatgtttaatttaatttagcatacagttcttgttacttcattcattaatttattcattcagtaaatgtttattaatagtctactaagtaccaggagcttgcccaaacactgggaatgcagtagtgttatatgctatatggaggggtgaaatgagggacagaaaatgttagatagaataagagctatagaaaaatacaaatcaggtaaaggggatgggctgttctttcaaatacatattttaataattgaattaaacagtaaatttatcagaagaaacttacagaaaaattttggaaataactatgtttacctttgtgagttttcyaattttctctctaggttttcttttaaatgaaactcagtatttgaaaattttaaattgattcgaagcttgttgaccaaccaacaccacttcttctgcttcccagagaatgtgtaactattgcaggtttatgacccttaatacttaacaaaatcattcgttattttatgtgatactaacaatagccccatgaaacaaacaggtgaattgcatattgagttttccattaagggagagaaactatggctca

SEQ ID NO: 751106 - DNA, 580 bp, Homo sapiens
tttttctagaggttgtgctaatttacattcacactaatagtgtataagcatttccttttctctgcacccttgccaatatctgttattttttgtcttttttttttttttttttttttttgagatgaagtctcgctctgtcatccaggctggagtgcaatggtgtgatcttggctcactgcaacctccacctcccgggttcaagcaattctcctgcctcagccttctgagtagctgggactacaggcacccaccaccatgcccagcaaattttttgtattttaagtagagacaaggtttcaccgtgttagccagtayggtctcaatctcctgacctcgtgatctgcctgcctcggtctcccaaagtgtgcctttttaatagtggccattcagactggtatgagacaatatttgactgtggttttaatttgcatttctctgatgattagtgatgttgaacattttttcacatgcttgttggtcatttgtatgttttcctttgaaaaatgtctgttcaggcttttagcccactttttaatggaattatttggtatttttgttgttgttgagctgtttgagtccc

SEQ ID NO: 751107 - DNA, 542 bp, Homo sapiens
tgtcaaattcaggggtaaagaaactaataaataatattttaacagttggcatattatatttaaaaattaattacgtgtctgattaatttcacttgagataatggcctccagtgtcatccacattgctgcaaatactgcatattctcacttataagtggaaggtaataaggaagccaatgtgtacacatggacatagaatgtagaatgacagacaatggagacctgcaagggtgagggagtgggaracgggtagatgatgagaatacttaatgctacaatgtatgttgttcaggtgatggataccctaaaagccctgacttcaccactatacaatctatgcatgtaacaaaattgtacttgtaagccatacatgtatacaaataaataatgtgtgaaatcaagcagtctccctgtcctcccaccccctactcctggtccccttcactgatcctcagagcatgaaaagaatatggttccgacttcatttctttcctccttttgaatctcatgccaaatgtttcccgcagtccacagtgaaccaa

SEQ ID NO: 751108 - DNA, 626 bp, Homo sapiens
ctgctgtcaggatttctgccatctgtgtctttggccctgaatccgaggacatcagacaatctggaaggcccatccaattgagactgaaatgcaccaaagcctgctagataagccatcacaagttgtagaactgcttgaccacggaaaaatttccaaaagcttccccactctgttgtctgacccagtttctctttctcccttcagatagtgttgcatgtcagaagtgctctgacaaccagtggcccaatgtgcagaagggcgagtgcatccccaaaacccttgacttcttgttctatcacaagccccttgacacagcrttggctgtctgcacagccctgctctttctccttgccctggccatcttaggcatcttcgtctgacaccaccacactcccatcatccgagccaacaactgccagctcagctatctcctgctgtcctccttggccctcagcttcctctgccccttcatgttcattggccacccagaccccatcacttgtgctgtgcacaggcagattttggggtcacttcatggtctgcacatcactgtgctgccaagaccatcgtgtggtagcagcctaccatgctactcaggcagacactcagcttaggggtgggcggga

SEQ ID NO: 751109 - DNA, 624 bp, Homo sapiens
attatgtcattagggtaattctttttaaacatttatgaaatgcctaccatatggcaaatgttaaactaagtacaggatttgaacaaactcatggttgataaaagaaagaatgaatttaatagcctcaaatggctttaatgtagcatctaggaaggtcacattgacatcttctttttggtctcsacttccctggacttttccattgaaggaatttccttgatgtggacacagctttcatctgaagtctactctggctgatggctggccaccctctgaccaagaaccagcctccctccttacctggtgacattgcgatttctcttctgggtcagggaaggcttttgtagcagcattttgacttctcaaatagggttgacttcctggtttccacaggacgtttttcgttgcagacagaggaagggacctacacacaagaggtgggagagtggaggggagagagtgctggggagactgcagggggaattgagcgacatctgtgcagtcaggtcgtggaggaataagcctcatcgttttcacttactaggtccctctctctctttctttctcttactccttcctttattaaacccctctttatcacgttttccttttctactctctttc

SEQ ID NO: 751110 - DNA, 624 bp, Homo sapiens
attatgtcattagggtaattctttttaaacatttatgaaatgcctaccatatggcaaatgttaaactaagtacaggatttgaacaaactcatggttgataaaagaaagaatgaatttaatagcctcaaatggctttaatgtagcatctaggaaggtcacattgacatcttctttttggtctcgacttccctggacttttccattgaaggaatttccttgatgtggacacagctttcatctgaagtctactctggctgatggctggccaccctctgaccaagaaccagcctccctccttacctggtgacattgcgatttctcttctgggtcagggaaggcttttgtagcagcattttgacttctcaaatagggttgacttcctggtttccacaggacrtttttcgttgcagacagaggaagggacctacacacaagaggtgggagagtggaggggagagagtgctggggagactgcagggggaattgagcgacatctgtgcagtcaggtcgtggaggaataagcctcatcgttttcacttactaggtccctctctctctttctttctcttactccttcctttattaaacccctctttatcacgttttccttttctactctctttc

SEQ ID NO: 751111 - DNA, 661 bp, Homo sapiens
aaaacacttctggtcccaagcaattcggataagggatactcaagttgtagtaataatatgtattttttgtttgtttgtttttttgagacaggacctcactctgtcacccaggctggagttcagtggcacaatcttggctcactgcaacctccgcctcccgggttcaagcgattctcctgcctcagcctcccaagtagctgggattacagatgcgtgccactaccgccgggccaatttttgtatttttagtagagacagggtttcaccatattggccaggctggtctcgaactcctgacctcaaatgatccatctgtcttggcctccaaaagtgctgagatcacagacgtgagccaccacgcctggccataatratatgtgctttgaaggtggtgttgggattaaataagacaatgtaagtgaagtccatatcatagtgaccagaatcatgagtgcatgacaagtgctagtgagctgggatcatattccgaagtgttaactgaagagtctgtctttcactctaggctcatcaaatccctttgtttatatttaagggactaattttcccctagccccaacagaactgggtcatccacagtgaatcagaaacaaagactacaaacactacctaagcctcagcaccactctagggttccttgagt

SEQ ID NO: 751112 - DNA, 625 bp, Homo sapiens
caggcaagagagtgtgcacaggggaaactgccacttttaaaatcatcagatctggtgagaactccctcactatcatgagaacagcatgggggaaaccgcctccatgatccaatcacctcccaccagttccctgtcccctgcacatagggattacaattsgagatgagatttgggtggggacacagagccaaaccatatcaaaagcaaggcatttctaatgtattgttaaatccaatgactgtccccagaatatgtaacactttatagttcttctccttatcattgtgtgaaatcaggttaaaaattaggagttccaaaagcaatttcaaagggaaaaagaagtaccccaacccccaccaaaataatcctaatctagaaaaaatataaaaagtggatctgaactatgatgatgggaggtttatatgccaaataaacctacatgaacctcagattccttctagaaattatatttctgattataagaggaacacaatcttattttggaaatcagggaaaattaataaagaggaaaactagaaaattcataattctacgtcacagataacaactgttaactttttggcgtatttctattcctcattatgcatgtacgtatttttataaa

SEQ ID NO: 751113 - DNA, 625 bp, Homo sapiens
caggcaagagagtgtgcacaggggaaactgccacttttaaaatcatcagatctggtgagaactccctcactatcatgagaacagcatgggggaaaccgcctccatgatccaatcacctcccaccagttccctgtcccctgcacatagggattacaattcgagatgagatttgggtggggacacagagccaaaccatatcaaaagcaaggcatttctaatgtattgttaaatccaatgactgtccccagaatatgtaacactttatagttcttctccttatcattgtgtgaaatcaggttaaaaattaggagttccaaaagcaatttcaaagggaaaaagaagtaccccaacccccaccaaaatartcctaatctagaaaaaatataaaaagtggatctgaactatgatgatgggaggtttatatgccaaataaacctacatgaacctcagattccttctagaaattatatttctgattataagaggaacacaatcttattttggaaatcagggaaaattaataaagaggaaaactagaaaattcataattctacgtcacagataacaactgttaactttttggcgtatttctattcctcattatgcatgtacgtatttttataaa

SEQ ID NO: 751114 - DNA, 625 bp, Homo sapiens
caggcaagagagtgtgcacaggggaaactgccacttttaaaatcatcagatctggtgagaactccctcactatcatgagaacagcatgggggaaaccgcctccatgatccaatcacctcccaccagttccctgtcccctgcacatagggattacaattcgagatgagatttgggtggggacacagagccaaaccatatcaaaagcaaggcatttctaatgtattgttaaatccaatgactgtccccagaatatgtaacactttatagttcttctccttatcattgtgtgaaatcaggttaaaaattaggagttccaaaagcaatttcaaagggaaaaagaagtaccccaacccccaccaaaataatcctaatctagaaaaaatataaaaagtggatctgaactatgatgatgggaggtttatatgccaaataaayctacatgaacctcagattccttctagaaattatatttctgattataagaggaacacaatcttattttggaaatcagggaaaattaataaagaggaaaactagaaaattcataattctacgtcacagataacaactgttaactttttggcgtatttctattcctcattatgcatgtacgtatttttataaa

SEQ ID NO: 751115 - DNA, 581 bp, Homo sapiens
gtatgttgtctgaagaaatatactctaaatgtaatgacataaatagactaaatataaagagaaggagaaaggtatgatgctaacactaatcaaaagaaagatgcaataggtatattaatttcagttaaagcagatggcagagcagataagattatcagggataaataagggcattacgtaataataaagggtgtcatttttccagtaagacataacaaatctgtcgaataacagagtatcagtttacatagaggataactgacaggattgcgtggagaaatagacaaattcactattacagttggaaaccacaacacccccatctgcaattgacaaatctaatggaaaatcagtaaggacatagctgaactgatcactatcataaaycaactggacctaactgacatttatagactaattcatcaagcaacaacagaagacacatacttctcaagcttatgtaaaacattcagatagaccacattctgggccataaaacaaacccaaacaaaatttaaaagaacagaaatcatacaaagagaacactcagactttaatagtactaaagcagaaatcagtaa

SEQ ID NO: 751116 - DNA, 589 bp, Homo sapiens
gtcagttggtcatgttgtcctgtctgtgttcaactgtgaggaagtcttcttccgggcaacacaacagagattcctattctgaaatatagttgaatgctttatagctttagataattttggattataaaacctgttagaagtcctttatggaaaaaagaaagctgtacacaatgaaacaatgaaaaattaagaaggaaatagtaaaccactttccaatgaaacatatgagtaataacaatagctaacaattttataacaatgataattggctagggaaagttctaagcactttagatacataaaatcatgtaatcagaaattctagtaatattggtactaatattatcttctttttacagcatatagactgagtcaccaagaattttaaggacttgtccaagatagcacaattactcagtggcaaacacrggaagtttggctttatatgagcctcttttgattattctatagcaatttcagcatagctctgtaaattgctgaactggagtttgatttatattcacatgataatacactgactgaaatacatatgtatggacatgtgcacatacaagtagttccacatatg

SEQ ID NO: 751117 - DNA, 564 bp, Homo sapiens
cagctaatgaatgagccttagcaatgtaattatatggttgtatgtttataaacaatttgaaaacaaaattgtaccttctaagagcgatggggtagaacctaattaacacctctttcttctttaattaattttccctttgtcacccttttgtcattggcactggaatccttatgagcatttttgaaatctaagaacaaatggagttgcagacacatttattttgggtttggtgagatatttatgtagcttttagtcacttctgagtatagatacattattgctagttgtcagtgcgggaatggcttccagtctactactggcccctgtgccaactcactctgttttatgtcaggagagtgcaatgtcagagatctcatggtgttatgaaggctccctrtagtacttggtacaaggaatgtgtgggtagcagagaaaacacaatattttaaaagtgaaagctagaagctaacagggagaatttttcaaacactaggtggtgcaaaattttatgtagaggatttgattctcattgatcctattaaaaatgactctcttttttcagta

SEQ ID NO: 751118 - DNA, 672 bp, Homo sapiens
caaaaatcctcaacaaaatactggcaaaccgaattcagcagcacatcaaaaaacttatccaccactatcaaatatgcttcatccccaggatgcaaggttggttcaacatatgcaaatcaataaatatgattcgtcatgtaagtggatctaaagaaaaaagccacatgattatatctcaatagatgcagaaaatgtttttggtaaaattcaacatttcttcatgttaaaaactctcaataaactaggtattaaaggaatgtgactcaaaataataagagccacgtatgacaaactcacaactaatatcatactgaatgggcaaaagctggaaatattcccctcgaaaaccagcacaagagaaggatgctctctctcaccmctcctgcccaacacagcattggaagtccttgccagagtaattaagcaagagaaagaaataaagggcatccaaataggaagagaggaagtcaaactatctctgtttgcagacaacataatcatatctagaaaaccccatagtcttgactcaaaggctccttcagctgataaagaacttcagccaagtatcaggatacaaaatcagtgtacaaaaatctctagcattcctatacaccaacaacagtcaagctgagagccaaatcaagaatgcaatcccattcacaattgccacaa

SEQ ID NO: 751119 - DNA, 596 bp, Homo sapiens
tttttttttttttgagatggaatctcactttgtcgcccaggctggagtgcagtggcatgatctcagctcactgcagcttccacctccagggttcaagaaattctcctgcctcagcctcccaagtagctggtattacaggcgtgcacaaccatgtctggctaatttttgtatttttagtagagacagggtttcaccatgttggccaggctggtcttgaactcctgacctcaggtgatccacctgcctgggcctcccacagtgctgggattacaggcatgagccaccgcacccagcctgtccagctaaattctgtatagtaagtctgtagttgtgaacaggtttaaaacagcactttatcaractaacttcatattagcttatgaaatattaccatttctattatttccccttattatgacagctaagttttgacaaaaatagaattcccaggaagatgaaaggaattttttttcttccagtaaaaccaaattgcaaataaaacaaggtacttttcagcaatggtattaatattgacttttaaattaaaactatctcaaaatacttaatcctgatttacagtttttcagctaagctac

SEQ ID NO: 751120 - DNA, 610 bp, Homo sapiens
cattacaataaacatatgtgttcatgtgtgcaagtgtctttttgatctagtgatttatttttctttgggtaggtacccagcagtggggttgttggatctaatggtagatctacttttagttctttgagaaatcctcatattgtttttcatggaggttgtactaatttacattcccaccaacagtgtatatgcattcatttttcataacatccacacargtatctatttttttggcattttaataatggtcattctgggtggagtaaagtggtatctcattgtggtattaatttgcatttccctgatgattagatatggagtttttttcatgtttcttggacacttgtatatcttcttttgagaaatgtatgttcatgtcctttgcccactttttaatggagttatttgtctttttttctggctgattttgtttatttgcagattctggatattagtcttgtcaaaagcataatttgcaaatattttctctccttctgtaggttgtttgattagtctgatgattatttcttttgttttgcagagatttttaatttaattaggttccaattatttatttttagttttgttttacttttggagtcttagtgat

SEQ ID NO: 751121 - DNA, 610 bp, Homo sapiens
cattacaataaacatatgtgttcatgtgtgcaagtgtctttttgatctagtgatttatttttctttgggtaggtacccagcagtggggttgttggatctaatggtagatctacttttagttctttgagaaatcctcatattgtttttcatggaggttgtactaatttacattcccaccaacagtgtatatgcattcatttttcataacatccacacaagtatctatttttttggcattttaataatggtcattctgggtggagtaaagtggtatctcattgtggtattaatttgcatttccctgatgattagatatggagtttttttcatgtttcttggacacttgtatatcttcttttgagaaatgtatgttcatgtcctttgcccactttttaatggagttatttgtctttttttctggctgattttgtttatttgcagattctggatattagtcttgtcaaawgcataatttgcaaatattttctctccttctgtaggttgtttgattagtctgatgattatttcttttgttttgcagagatttttaatttaattaggttccaattatttatttttagttttgttttacttttggagtcttagtgat

SEQ ID NO: 751122 - DNA, 630 bp, Homo sapiens
tctggaggctaatcttgaaacaaatcacgcacggagccctgactgctgaatccacttgcttagggagagtcacaattagtccatcaccatggggtagaagtcaagataatgccaaccagacttccagatgggtaattatccaagatagccmacagaactaagtcacacagccccggcaccctgcaccactcctgcatgtctcccaaaccaagtttccctttaaaaaacctatgataaatttttaaatttgaggtggttctttagaacactagctcaccaccttcttggtttgctaactttcctattaaacttgagtttcctcctaccaacccttgtttctcatgtttggcttttgagtggtgagtagctgaaattggttctggttacaactggagttgagttattatcttttgaaagttgtctgtctttgtaggttcttgctttcctggtcctttgattaaaggcagtgcaggctcttttgggctctttttctctgcacttgttagtgtttcttggttgctagctacttcatttctaagtgaaggatataagcagcaaaaaagacgactcagggaagtcactaccgtgctgttccttatgtgctgagggctttagcacattttcttcttc

SEQ ID NO: 751123 - DNA, 630 bp, Homo sapiens
tctggaggctaatcttgaaacaaatcacgcacggagccctgactgctgaatccacttgcttagggagagtcacaattagtccatcaccatggggtagaagtcaagataatgccaaccagacttccagatgggtaattatccaagatagccaacagaactaagtcacacagccccggcaccctgcaccactcctgcatgtctcccaaaccaagtttccctttaaaaaacctatgataaatttttaaatttgagrtggttctttagaacactagctcaccaccttcttggtttgctaactttcctattaaacttgagtttcctcctaccaacccttgtttctcatgtttggcttttgagtggtgagtagctgaaattggttctggttacaactggagttgagttattatcttttgaaagttgtctgtctttgtaggttcttgctttcctggtcctttgattaaaggcagtgcaggctcttttgggctctttttctctgcacttgttagtgtttcttggttgctagctacttcatttctaagtgaaggatataagcagcaaaaaagacgactcagggaagtcactaccgtgctgttccttatgtgctgagggctttagcacattttcttcttc

SEQ ID NO: 751124 - DNA, 630 bp, Homo sapiens
tctggaggctaatcttgaaacaaatcacgcacggagccctgactgctgaatccacttgcttagggagagtcacaattagtccatcaccatggggtagaagtcaagataatgccaaccagacttccagatgggtaattatccaagatagccaacagaactaagtcacacagccccggcaccctgcaccactcctgcatgtctcccaaaccaagtttccctttaaaaaacctatgataaatttttaaatttgaggtggttctttagaacactagctcaccaccttcttggtttgctaactttcctattaaacttgagtttcctcctaccaacccttgtttctcatgtttggcttttgagtggtgagtagctgaaattggttytggttacaactggagttgagttattatcttttgaaagttgtctgtctttgtaggttcttgctttcctggtcctttgattaaaggcagtgcaggctcttttgggctctttttctctgcacttgttagtgtttcttggttgctagctacttcatttctaagtgaaggatataagcagcaaaaaagacgactcagggaagtcactaccgtgctgttccttatgtgctgagggctttagcacattttcttcttc

SEQ ID NO: 751125 - DNA, 585 bp, Homo sapiens
attcccacttttttcaggttaatcttttcctgctttatgagcttcccatattttctctctcttctgctactgctttaattgtcttatatggaaattttaagcaagaaaatttccttatgatttgaaaatattctattaatgctgtttccctctcctcactttaattgaaaattggatttccccagttacattacttttcctgaattatttaccaataaaggcttctatattacctctccttaacaactcttgagatgagttgatgaaatcagactttttaaaaaacctctctcggctggacgyggtgattcatgcctgtaatcccagcactttgggaggctgaggtgggcagatcacgaggtcaggagctcgagaccagcctggccaacatggtgaaagccggtctctattaaaaatacaaaaattagctgggtgtggtggtgtgtgcctgtaatcccagctacccaggaggctgaggcaggagaattgcttgaactcgtgaggcagaggttgcagtgagccaaaattttgccactgcactcctgcctggcaacagagctagactctgtcaaacaaacaaacaaa

SEQ ID NO: 751126 - DNA, 550 bp, Homo sapiens
gaattttatatattacgaactagataattagaattataaaataaagttgccaagggcttactacttcatctgaacttttagaaagtagagataaattgaaaatgttatgcaattgcctgtcaaaaactgaaaaatctgatatttyatcctacttttaagcaagtaagcaattaccttgccacagattcatgaattctgccaaagacacatgacatctgagttagagacaaaggacagtgaattactcacagcactagcagtagctaaataaccagtcttttcttgcactagaagaaccctaatcctcaattctcaccgggtgaaacgaagaaggccaggtgacacctgtacatgtaatggattgcatcacagaagataaaacctggaacacagaaaacctgaatcctttacactaagtactaagaaaatctgctctttggcctggaggaagacattatctctatcttccaaggatgtttgttatagaaatattcttgaaaatatagctcagaacaaaagcagttggtgcctctgttgcaaggcatgcaga

SEQ ID NO: 751127 - DNA, 651 bp, Homo sapiens
tggatccctacaaatgcatatgctgaccctgacacctaccccacggtaccctgacactggtatccaccctgtgaggtgagggtggctcgcgccctctctgtggtccttcacccttcaactcttactctcctgggtgcctagggctgagaggcagcaaccatggaagccacatttatttctcccctactcagtgctggggtcctggcaagcacattgtaaatattcccttgctcatcccttrggcctatgggtactatttcatctccatcttcctgggaggagagtgaggcttggagaagtagatagggccccttggctggggagcaactggaagcaggagttgagcccagatctgtcaaaattgagggagcatgctacatctgtggctctcccagctcctgaatgaggcagcccctgcccacaaggctgctatgcatggttggaaaacagaaccctgttcatgaagaaagcaggggatggtctaagatggtgtaaagtaaagaacttcacctggtggtggggatggagtggggcaggtagaggtcagcgtggactgtgtgcagacctccccttggatgatgtttgggggaggacttgagaatggattagcaaagggaaccaggaagggaattccaggtgggtggaaagggt

SEQ ID NO: 751128 - DNA, 565 bp, Homo sapiens
ctgacaaaggggtgacaaagtctccaactataagagtgagtttatctgtttctccttagagttctatcactaataatatagtaactgtgaaaagtagattctcgcccatcttcaggatttactggtttttgtttgtttgtttgtttgttttggttttgattgttgtagactacctctgtgctgaaaattggccttaggtgtaaactttttttcccccataagttattagggtacaggtggtatttggttacatgagtaaattcctttagtggtgatttgtgagattttggtgcacccataamctgagcagtatacactgcaccacatttgtagtcttttattcctcacccccgctcccactcttccccccaagtccccaaagcccattgtatcattctcatgcctttgtgtcttcatagcttagctcccacatatcagtgagaacctacaatgtttggttttccattcctgagctacttcacttagaatgtgtccaatcttatccaggtcactgcgaatgctgttaattcattactttttatggctgagtagtattccattgtat

SEQ ID NO: 751129 - DNA, 568 bp, Homo sapiens
agaggaagcagcagaaaggcactgggaactcactgggttcccaagcaggtcattcctgctggcaccacagggatccattgggaaggcagccagaggagcagtgggtaaaacttcacagggagaaggaaatctccagctgaacattgtaacagttcgaacggatgagaagcctcctggccagaactcggggacggtgcaaatccggtgtgcaggctccagagggaggggaaaaaccaagcccttttctttcatagctgggaagtaggtagcctggggcaagtttttaagcccctctcgcccaygcccagaaacagacttggggctcttggcaggggcacggtgggagggagacaggcccttcggtttgtgtgggagctgggtgagggctgtgactgctggctttccctacttctctgacaacctgcatgactcagcagaggcagccataatcctcctaggtacacaactccagtgacctaggactctcacccccatcccccacagcagccgcagcaagacccacccaaggaaagcctgagcccagacatgcctagccccacccccgcct

SEQ ID NO: 751130 - DNA, 577 bp, Homo sapiens
aagaaattcagagctcgaagacaaggtctttgaattaacgcaatccaacaaagataaagaaaaaagaataagaaaatatgaacaaagcctccaagaagtctgggattatgttgaacctaagaataatcagtgttcccgaggaagaagagaattctaaaagsttggaaaacatatttgggggagtaattgaggaaaatttccccgacctggctagagacccagccatccaaatacaagaagcacaaacaacccttaggaaattcatggcaaaaagatcttcacctaggcacatcagactatccaaagttaagatgaaagaaagaatcttaaaagctgtgagacagaagcaccaggttacctacaaagaaaacctatcagattaacagcagatttctcagcagaaaccctacaagccagaagggattgggaccctatcttcagcctcctcaaacaaaacaattgtcagccaagaattttgtatccagctgaactaagcatcatatatgaaggaaagatacagtccttttcagacaaacaaatgctgagagaattcaccattaccaagccaccactacaa

SEQ ID NO: 751131 - DNA, 552 bp, Homo sapiens
gtcactgtttgctgccaatatgattgcttgccttgaaaatcctaaagactcctccagaaagctcctaaaactgataaaagaattcagcaaagtttctggatacaagattaatgtacacaagtcagtagctcttctatacaccaacagcaaccaaactgagaatcaaatcaagaacacttttataatagctaaaaaaaaaaaaaaaaaaaaaccttaggaatatacctaaccaaggagttgaagacctctaccaggagaactacaaaacattgctgaaagaaatcatagayggggccgggcctggtggctcacacttgtaatcccagcactttgggaggctgagatgggcggatcacaagttcaggagatcaagaagatgctggcgaacatggtgaaaccccatctctactaaaaaatacaaaaaaattagccaggcgtggtggcaagtgcctgtagtcccagctactcaggaggctgaggcaggagaatggcatgaacctggaaatgtgaaggttgcagtgagccaagatcatgccactgcactccaccctg

SEQ ID NO: 751132 - DNA, 626 bp, Homo sapiens
ttgtattaacaataagatttttcaggttttctatttactcttgagtcagttttggtatcatgttttgttgtagttattgaatatatgtgtttatgggcaattcttggcatgatgttactcataatgctcccttactattttcggaaatctctgaagtatctgtaattgtgccattgtattttctactacaagttaatctgtgttttctttatttttgacctatctttccagagatcgtttatgtaattaggcaggccaactaccaacatctggctttgtcgatcctctctgttgggtcttttttgtgtattttgttacatttcttaattcttattgctttcttccttttactttttggaggtttattttgttgctgctttctagcttaattttgatacttagcttatgattttctggctttcctcttttcaattgatgtctgttttgtaggtgctgctttagctgtgtgtggcaagtttggttgcatstttctttttgttcaattctcagtatttgcagcttcccattatactttattcattggcccatgtttctaatgggcctgtggtagtcgcctcttcaatatttaggtactaaatttgcatttcttgttaagatttaatgga

SEQ ID NO: 751133 - DNA, 498 bp, Homo sapiens
ggattatgcaaactaagctggtaatgaaaagtgttttttttttttttatttttatgttttagagacagggtcttgctctgtcactcaggctggagtgcagctgcatgatcatgactcactgcagcctcaacctcccgggctaacgtcatccttctgcctcagcctcccgaatagctgggattacaggcatgyaccacaaaatctggctaatcttttattttttgtagagacaggatcttattatgttgcccaggctggtcgacaactcctgggctcaagcaatcctcccaccttgatctcccaaagtgctgggataacaggcatgagccactgcacccagccattaacacgcttacggagggtggatttgagtctaattggcatttagatggaggcagtattaactcaagacattttttctattttcactgttgcaactgaatacaaagccttccctcggatcaggccactccgtttctgccgttccaacacaggata

SEQ ID NO: 751134 - DNA, 518 bp, Homo sapiens
atcctcctgcttcagcctcccaagtagctggaactacaggcatgccccaccacacccagctgattttttactttttgtagagacgggatttcgccatgttgctcatgccactcttgaactcctggtctcaagcagtctgcctacctygggctcccagagtactgggattacaggcatgagccaccatgactagcctgcctttatttttgaatgatagttttgatgaaaaaaattctgggttgacaggttttttttcccagcacgtttaaaacctcattccatttggtatgtttttattggttccatttctgtcatgatattcatgttttcctttaagtccttgagcatacttaagttttatgagtgtttttgagtttttatctgctaattctgtcattttgcatttctaagtctattatgaactggctttcctcctctgatggctcacagttttctgcttctttgcatatctggttatttttcattggatcccagacattgtgaatgtaattgagtgt

SEQ ID NO: 751135 - DNA, 628 bp, Homo sapiens
aaaattatcaattcatatatttgtactcaacagcctggtctctgtatgcktagtaagcaaagctgtttgtggaaaagtatactatattttgctatacaccagaaacagcgtgccaaaagacaaaaattcccttaccaccaaccataactctaattccaaacctgctcaagaacacttttaattccaatttcctacacaattctctattctgttccattcctacttatgtaattgtataaggggtgagagagagaaaaaactaggttacatttctaaaacagtaaaggaaatagctggttctccaatctaattaccctgacaggtaaataactgcaaatcacatgacttgtggaacttaaatgaaaagtcaaatgtcaactgtaactagggcaagaaaaagtaaactgtgctccttagaagcctttatatttaaaaatacatttactaagtcagagccatagttgttaagctgtggttctcagcctttttcactgcagtgcctcagaggtgtcaccaatgttctttcattttaaaactttcattttcaaatttacaaattttaattttaaaaacctggaagcacaaatgtgtaacaagttttaatactggtgtttatctataacaattt

SEQ ID NO: 751136 - DNA, 632 bp, Homo sapiens
tcttgacatcttgctcttcttcccttcatctattgtgttagtcaggtgcatgctggtcttccctctatcaaactgtaagctacttggagacttgggatgcctcactcatctctattcccaaacctcagggtctatcattctaccttctgtatagacaggactttcatagttttgaacaagtcagaacctgaaagaatttgyttccagaacaggacattgacaggaaaattaagcatgatcatgccgaggtataaaacaatattaaaattgcagcattttcttctgtcttgctttgcatgaaatagatgtttggtaaatgctttttaaattacaagttgttttatgttttggggggattttcttctgtaacaagaagcaaaccactgaaacccaactcctaagcaaacgttttagaggagcttcatgaaacattacccccagctagttctttctccacctctatatatgataacccattttctcctccacatttttgagtatgtaaagccagttgttcctgactaggtgcatttaatttggggttctggcatttgtattcacttgaacaagatggatgataatagtaaaaagtgtacaagatttgggttatgtagatggagtcaaaatcctgg

SEQ ID NO: 751137 - DNA, 558 bp, Homo sapiens
actcagctcttagtacaagtaagtacctagtacataataggtactcaataaatatcaattgaattgaataagaaaactgagtttaggttaaaaaaaaatctcagatggaatgtcagagagtaagtacatacctattgctggggtgaccaggggcaaattacttaacatttctgagttggaaataatgccaactacaattacaagaccattgtgaagataaataagatgacacaggtaaagaarctgtacaaagtaggggtctagcttgggtgacagggtgaaactgtccattcttctcataataaatgcccattctcttcacaataaattgaaaattagtttgcaacaaacttattcctgcccttttttgtattcagggtttggcaagaccttctgagttaatttaggacaacttagtgtttagcataactctttcacagatttgctgtattatcagtgtctgatgatgttgacaatgttgaagaagaagaaagaagaggagttggaggaggaggaagaaaacatccagagcattcaatttattctagttaaattact

SEQ ID NO: 751138 - DNA, 558 bp, Homo sapiens
actcagctcttagtacaagtaagtacctagtacataataggtactcaataaatatcaattgaattgaataagaaaactgagtttaggttaaaaaaaaatctcagatggaatgtcagagagtaagtacatacctattgctggggtgaccaggggcaaattacttaacatttctgagttggaaataatgccaactacaattacaagaccattgtgaagataaataagatgacacaggtaaagaagctgtacaaagtaggggtctagcttgggtgacagrgtgaaactgtccattcttctcataataaatgcccattctcttcacaataaattgaaaattagtttgcaacaaacttattcctgcccttttttgtattcagggtttggcaagaccttctgagttaatttaggacaacttagtgtttagcataactctttcacagatttgctgtattatcagtgtctgatgatgttgacaatgttgaagaagaagaaagaagaggagttggaggaggaggaagaaaacatccagagcattcaatttattctagttaaattact

SEQ ID NO: 751139 - DNA, 597 bp, Homo sapiens
tgtctaaatctttgttagatatcaagctattaagtaaaacatcttctatcctcccattaataaatatgtcttcatttttatctagaaggcttgctgcccatcccacttttctttccatctgcaggaacctccagcacggtgaaggaatttccatgcatgcactctagcccacttactcaaactctgcctgctgtgtagaccctacacaactatgaacagctccccttttaatggccctctaaaatagtgttgggtctgcagggatgatctgacttctagaggactgactggcaaagaacctggcacaggccctggatcaactgtcaggcttattttgggcrgagagtatctggagtatgtctccaatggggagagtggttgcaccctggattggacactcttcagcagctagaatgagcccctcaaatatgctaggcccctgtcagaaactctcagctctccttgctagtgtcaaagggtggtgctgtaagttataatgctttaaaaccaaattggctcctaagaaatatgtcattagattatcaagttgttgataaaatactggtggtaacatttattaagctcggaacataaact

SEQ ID NO: 751140 - DNA, 549 bp, Homo sapiens
gggtggtggtaccagaaagggatcctgatccagacctcaagagagggttcttgaatcttgtgaaaaaaaaattctgggtggccgggcgcggtggctcacgcctgtaatcccagcactttgggaggccgaggcgggcggatcacgaggtcaggagatcgagaccatcccggctaaaacggtgaaaccccgtctctactaaaaatacaaaaaattagccgggcgtagtggcgggcgcctgtagttccagctacttgggaggctgaggcaggagaatggcrtgaacccgggaggcggagctttcagtgagccgagatcgcaccgttgcactccagcctgggcgacagacagagcgagactccccctcaaaaaaaaaaaaaaaaaaaaaaaaaaaaaaaaaattctgggtaagcccataaagggaaagcaagtttattagagaagtactgaaacaaaagaatggctactccatagacagagaagtggtatgggctgcttgattgagtttacctacaggtatttcttgctaaacgaagagtggattattcttga

SEQ ID NO: 751141 - DNA, 537 bp, Homo sapiens
agggatcctgatccagacctcaagagagggttcttgaatcttgtgaaaaaaaaattctgggtggccgggcgcggtggctcacgcctgtaatcccagcactttgggaggccgaggcgggcggatcacgaggtcaggagatcgagaccatcccggctaaaacggtgaaaccccgtctctactaaaaatacaaaaaattagccgggcgtagtggcgggcgcctgtagttccagctacttgggaggctgaggcaggagaatggcatgaacccgggaggcggagcttkcagtgagccgagatcgcaccgttgcactccagcctgggcgacagacagagcgagactccccctcaaaaaaaaaaaaaaaaaaaaaaaaaaaaaaaaaattctgggtaagcccataaagggaaagcaagtttattagagaagtactgaaacaaaagaatggctactccatagacagagaagtggtatgggctgcttgattgagtttacctacaggtatttcttgctaaacgaagagtggattattcttgaatttt

SEQ ID NO: 751142 - DNA, 537 bp, Homo sapiens
agggatcctgatccagacctcaagagagggttcttgaatcttgtgaaaaaaaaattctgggtggccgggcgcggtggctcacgcctgtaatcccagcactttgggaggccgaggcgggcggatcacgaggtcaggagatcgagaccatcccggctaaaacggtgaaaccccgtctctactaaaaatacaaaaaattagccgggcgtagtggcgggcgcctgtagttccagctacttgggaggctgaggcaggagaatggcatgaacccgggaggcggagctttcagtgagccgagatcgcaccgttgcactccagcctgggcgacagacagagcgagactccscctcaaaaaaaaaaaaaaaaaaaaaaaaaaaaaaaaaattctgggtaagcccataaagggaaagcaagtttattagagaagtactgaaacaaaagaatggctactccatagacagagaagtggtatgggctgcttgattgagtttacctacaggtatttcttgctaaacgaagagtggattattcttgaatttt

SEQ ID NO: 751143 - DNA, 613 bp, Homo sapiens
attccaaaatgtgtactgcagaaatgaaatatgtcaggagtattactgttaatgctgggcaaataaaataagagtggcagtgatattcataacagacatatagaagtgttgtgaaaaattttactgccagctgagatgagcaaaatataagcataaggtgtaactcactattccttattgagaagatgagagatatgggtttaagggattccagstcagtttaattcaaaagttcaggatcactttgcattaaattcaggatcctgctatgaaaggtatactggggcttccttaactatcactattttaactttatttttaccttttccaaactttcgtttttctcactttctgttgctttcttgttcttctaatttctatcaatattctttgcatgtgcatcattttatttgtatcttattcattactcatatagaactttttaaatatctcattatcattgttttttttttttttttttttttttttttttttttttttttagagagagagagagattcttcctctgtctcccaggctggttcactgcaacctcctcctcctgggttcaagagattctcctgcctcagcctctcgagtagctgggattata

SEQ ID NO: 751144 - DNA, 613 bp, Homo sapiens
attccaaaatgtgtactgcagaaatgaaatatgtcaggagtattactgttaatgctgggcaaataaaataagagtggcagtgatattcataacagacatatagaagtgttgtgaaaaattttactgccagctgagatgagcaaaatataagcataaggtgtaactcactattccttattgagaagatgagagatatgggtttaagggattccagctcagtttaattcaaaagttcaggatcactttgcattaaattcaggatcctgctatgaaaggtatactggggcttcmttaactatcactattttaactttatttttaccttttccaaactttcgtttttctcactttctgttgctttcttgttcttctaatttctatcaatattctttgcatgtgcatcattttatttgtatcttattcattactcatatagaactttttaaatatctcattatcattgttttttttttttttttttttttttttttttttttttttttagagagagagagagattcttcctctgtctcccaggctggttcactgcaacctcctcctcctgggttcaagagattctcctgcctcagcctctcgagtagctgggattata

SEQ ID NO: 751145 - DNA, 613 bp, Homo sapiens
attccaaaatgtgtactgcagaaatgaaatatgtcaggagtattactgttaatgctgggcaaataaaataagagtggcagtgatattcataacagacatatagaagtgttgtgaaaaattttactgccagctgagatgagcaaaatataagcataaggtgtaactcactattccttattgagaagatgagagatatgggtttaagggattccagctcagtttaattcaaaagttcaggatcactttgcattaaattcaggatcctgctatgaaaggtatactggggcttccttaactatcactattttaactttatttttaccttttccaaactttcgtttttctcactttctgttgctttcttgttcttctaatttctatcaatattctttgcatgtgcwtcattttatttgtatcttattcattactcatatagaactttttaaatatctcattatcattgttttttttttttttttttttttttttttttttttttttttagagagagagagagattcttcctctgtctcccaggctggttcactgcaacctcctcctcctgggttcaagagattctcctgcctcagcctctcgagtagctgggattata

SEQ ID NO: 751146 - DNA, 543 bp, Homo sapiens
taattgaaggcacaacctcaaagacaactaagtggatctagcaggaataaccaacagccaaattaccatcaccaaggctgagctgcttccctggaccgtgagcccctatctgtcccccgtcacaccctgctccctttggggcttgaggtctcctactttcttggggtggggctggggtgagcctctccaggacagctgaggaaatttagctgcctccagggtgtttcggtaactcaaccccgccagggctggactcaaccctgccagggctgctctggtccgaaagccagctggtgagttctaaacaatggcagggggtgtgggrgagtgggggaggcttatgaattaaaaatagatgctagtaaccgccagggatcttgcagagagcatgtggggctgtgtttactagggagagaagaatacctcctattcatgcccagagatcagggcagaaccactactgcttctcacaccagcccagggcctctgggtctgggggagtcagctgacagagcagggtttaccgatggctggaagaccttt

SEQ ID NO: 751147 - DNA, 642 bp, Homo sapiens
aataggggaacgacacagcagtaggggctacctgcgtcagggataagaaccccttcccctcccttgttcaggtgtgctctcgccattgctccatccacaagatacacccttctacagaagtaaaattgccttgctgagaaaattaaatttatgtttgagtgctatttatttgtggcactgaaaatttatttccaacawctgtatagactactggagaaagatacctacaggaatgtcttctctgtactcctctattgatgtaaatcttgagccttttaacgtacaactgagacataaggaatagcatgtgtagtaggttagtgggaccctagtcaagttgagctgtggaaatgataatcttgtcaatgcaaaggaggaaatgcctcagtaaatcaaagtattgatcgtatatacagccctcaacagagacctaaaacatcaggccttaattaataaagaagtttatatttcttatattaccagaaatctgggaagaggaaatccagagctgacccagctcctcaaatatgcaggctcctactatttttctgttccatcatccttaccttttggctttcatgcttatggccacaaaataactgctgcttctccaggtgttatgtctgagtgatccaggaagaa

SEQ ID NO: 751148 - DNA, 612 bp, Homo sapiens
tcccacgttgcatgcagttttcatttcttcttagtcttcttcaatccatgacagtttctaaatttttctttgtcattcatgactttgaaacttctgaaggttactgttcagtacctcaatttaggtttgcctggcattttctcatgattagatcaaaataaaacatttctggcacgaatattacaaagtggtgtgaccttccttatgtcttattattggtgatattcagcttgattcttggtaaaggtagtgtctgctgcgtttctttgttgtgaagttacagtaccttcccttagaaacwaacaaatatcttgtggtaaagactttgaaactctgcaactattctgtttctcatcaaatttttacctactaattttagcatccatcaatggatcttgcctgcaacaattattacggtagagcttgcttcatagtgagtttccattttctgcattccttttacatttattaattggaattccttaaggatgaattgtctcttttccttcctttattttttactcattcattcaattatttatttatgtaagtttggactcatggatacttaacttttttctgagggctataatgaaatgctatcattgttta

SEQ ID NO: 751149 - DNA, 551 bp, Homo sapiens
tgtgccacctgaaaggtttttagattttataggagctaatttgtccaccagcattaatgtaacacagtgtagttatgaaaatatattgaaggacaggaagtggacacgaagtgatttttgtaacctgagcagttaatgaatgtgccaacattttctaggaagggacagcaagaatattctgctctgtagttaaaatactggctggcttttgatgtcttcatgcttaattgtgatcactttcttgcactgtgatgtttttacgtgaatatgttgaagtagaagtctaccatattattttataaaatgttttctgtatggcaataaactgaaaacatggatcaacccttcttttgaaaataaactgagtcaatttagccttttaaaaawatagtcatctcttttaaatagaatcctcttccaccatcaaggctcaacattttgtaagcatccaaaaaattggtaattagggggcttgcactaaatttcactatcttcagtagagaggaactgtttggaacttagatttccaatgtgtatattctaatggagaa

SEQ ID NO: 751150 - DNA, 642 bp, Homo sapiens
acttgtattatacatacagctccaataaatttagttacctggattcgaaatccaaaggattaaaagcaatatattatgtttgtgcaagggaagaagataggatggaaacctaaagggcaagcaaggagtgacagcttctcagtagtagggaagagacaaataaaacaaaagcaaacagaactttaaaaacagcactgggggcatctggtattaaaacagataatccacatacttcaaaatcataaatcacagargtacacaggatgctaatttatgttcaatatactgagccttaatcatcaaataaaagaaaaatgatactcagtatgctttagaaaagcagtcacattaaatattctaccagagttactaaataatggcaagtttagaggattaattgggataaacttgtatgaaattaacttctctatgatgctggattactgaagactcactgaaaatagctacactgtttggctttcagccatttgtttattgctgcaaatccacaaattaatcttgtgttccaaaacagagcacattccaatcaactccaagatctcagcaggttttcagaactctgggtaaattgaggttcttacaatttcaaaaccatgtatagaaaattctcagttggccaaa

SEQ ID NO: 751151 - DNA, 433 bp, Homo sapiens
ctttggggctctgtggttcctggtatctccaagcttcaggtgccactgcattcccgggtgtccacagtggaagccgcttgcagtacacctggtccaaccacagcctagcaggaagccagcactcatgccggcacctggaactgcccaccccaccgcagctagcatgcctggctgtgtgcagtggctggacccygtgctcgctcacacacccctcaccgccctgtgcctagcttgcccttggcagccatgggatcggagccagtagcgaaagccaagtgaagcctgcgaggccaagagagcagaaagagcccagcggcccaagcaaaactcgggcaaaggtgccgacagccacagaggttcctggctggtgaagtgacaacctaaggatcccatgacaacaataatagtaaaagccacattatatgttaaatta

SEQ ID NO: 751152 - DNA, 516 bp, Homo sapiens
cctgaaggaagcactgaatatggaaagacaaaactgggaccagccactgcaaaacacacgaaaatgtgaacaccaatgacactatgaagaaacggcatcaactactatgcaaagtaaccagctagcatcattatgacaggatcaaattcacacataacaatattaaccttaaatgtaaatgggctaaattccccagttaaaagacacagactggcaaattgaataaagagtcaagacacatcrgtgtgctgtattcaagtgacctatcttccgtgcaaagacacacataggttcaaaataaagggatggaggaaaatttgccaagcaaatggaaagcagaagaaagcaggggttgcaatcctagtctctgataaaacagaccttaaactaacaaagatcaaaaaagacaaagaaggatattacataatggcaggtaaagggatcagtgcaacaagaagagcaaactaccctaaatatatatgcacctaatacaagagcacccagattcacaaaaca

SEQ ID NO: 751153 - DNA, 568 bp, Homo sapiens
aattaatagcctcccaagaaaaaaaacccaggacctgatagacttacagccgaattctactagaggtacaaagaggagctagtaccattccttctgaaattattctgaacaatagaaaaggagagactccttcctaactsattttatgagcccagcatcatcctgataccaaaacctggcagagacgcaacaaaaaaaggaaacttcaggccagtatccctaatgaacatcgatgcacaaatcctcaataaaatactggcaaatcaaatccagcagcacgttgaaaagctcacccaacatgatggagttggtttcatccctgggatgcaaggctggttcaacatatgcaaatcaataaacgtaatccatcacataaacagaaccagtgacaaaaaccacatgatgatctcaatagatgcagaaaaggccttcactaaaattcaacatcccttcatgctaaaaactctcagtaaactgggtactgatgaaacatatcctaaaaggtatttatgacaaaccaacagccaatattgtactgaatgggcaaaagctggaagcattccctttg

SEQ ID NO: 751154 - DNA, 568 bp, Homo sapiens
aattaatagcctcccaagaaaaaaaacccaggacctgatagacttacagccgaattctactagaggtacaaagaggagctagtaccattccttctgaaattattctgaacaatagaaaaggagagactccttcctaactcattttatgagcccagcatcatcctgataccaaaacctggcagagacgcaacaaaaaaaggaaacttcaggccagtatccctwatgaacatcgatgcacaaatcctcaataaaatactggcaaatcaaatccagcagcacgttgaaaagctcacccaacatgatggagttggtttcatccctgggatgcaaggctggttcaacatatgcaaatcaataaacgtaatccatcacataaacagaaccagtgacaaaaaccacatgatgatctcaatagatgcagaaaaggccttcactaaaattcaacatcccttcatgctaaaaactctcagtaaactgggtactgatgaaacatatcctaaaaggtatttatgacaaaccaacagccaatattgtactgaatgggcaaaagctggaagcattccctttg

SEQ ID NO: 751155 - DNA, 698 bp, Homo sapiens
taagcaaaaagaacaaagctggcaggatcatgttactcaacgtgaaactatgctacagggctacagtaaccaaaactgtatggtactggtacaaaaacagatgcatagaccaatagaccagaatagacagccaagaagtaatcccmcatacctacaacaaactgatctttgacaaagctgacaaaagcaagcaatggtgaaaggactacctattcaataaatcatgctgggataactgactagccatatgcagaagactgaaactggaccccttccttataccatacacaaaaataaactcaagatgaattaatgatttaaatgtaaaacctaaaactaccaaaactttggaagataacctagggaataccattctgtacataggacctgacgaagatgtcatgatgaagaagccaaaagcaattgcaacaaaagcaaaaattgacaaacgagatccaattaaactaaacagcttttgcactgcaacagaaactatcaacagagtaaataaacaacctacagaatgggcaaaaaatatttgcaaactatgcacccaacaaaggtctagtatccagagtttataaggaatttaagcaaatttacaagaaaaaataaaacaacctcattaaaaagtggtcaaaggacatgaagaggtacttttctaaagaagacatacatgcagccaacagcatataaaa

SEQ ID NO: 751156 - DNA, 541 bp, Homo sapiens
atgttcttactgccaacataacaaaactggaaggtaatgggcatgtccattaccttaattgtactgatggtttttgcgtatatccaaactcatcaaattgcaataaatatcactcattaaatatgtgcaggtctttgtatatcaattatacttcaataaagcttttatttatttattctttttttttaaagccgttctaaaatccctgaaatgagcttggtgctatgctaggtgatggacatttcattctagtcctatatatgttgtttaaaaaatttagacaaaattaatttaacaaagtttatttgagcrtgaatcaggcagaactccacttggaaaaggttcagagaactctgcttcagcagcatgagcagcgggcttctgtagagtgcacatgaaagcaaagtaaagaaattgcttgattggttacagataggccttttgccttgtttaggtacaatctagtgggaagtctctagttggaggttagttggtgatttcagattggctaaacttaagttctgttttttcagttgtaatc

SEQ ID NO: 751157 - DNA, 574 bp, Homo sapiens
tacaaatgagctccaagcccataacgtataatctacccacccacacatattgaaatgagattattgttcccacagaaaagagccctgcagttgcacaagtcccaactttgctcccgagggcgataaaagggacaaggaaaaggcatggagttgtttgataggcttctaaggaaggctcagaaaggatgaaagattaccctcccaggtacacagtgtggagcagcgttccagcaaacatccagagggttcccacactccacccaggcacgctcccgaactctttgatctagaaaccaccacgaattactgatcgttacagaggtggccggagtggatgaacctatcktttcttataaagtaagagcttccagggaggaaaaataccctcaaaaagaacattgtggcaggtgagaatccaggctgaggagcagcttgccacagcagaaaaagaagagttttggggattgtgtacacctagattccagtctcaaacctgccacttagaatcagtgagaatcaaaaatacaactactgagtcccctctatgcgccaagaatgaaattaggcactctag

SEQ ID NO: 751158 - DNA, 651 bp, Homo sapiens
ttcaattttgcttccaagtatttcaaaacacaaatcttctattacctcatgtgttatcatctcttaatggggaaataaaatggagaccagaatttattttccctatacaggtgagaaaactgaagaactaggattaagtaactccctaaagtctggaaaaataagagatttttttaaaagataagaaaaggaaaagaaaaacctactcatttagggccctggaataacagtaacatctaacgttgccataatgttgtcaccaatgcaaggatccttctagtatatccttaggggacagccatccaaatcctgcttctgcacatccaacaaagggaagatgtttttcctctcagtgggaacccatatttcaaagaaaatactccacatgagaaatgcagatgtgtggcaggcactgaacaggcctgggaatgctggaatctatctgcaaggcagtgttaatcccaggtggttagtgatcagtgccatggctcaactgtggcatatkgaagtattcaggaatttgtttcttcaggaacagttatgtatgtgtctggttcaaatgctgagtcaagacctcacccttgctcatgttacaaacttatttcattttaaccttcttatagggatagaatttgcatgtgtgagatagtt

SEQ ID NO: 751159 - DNA, 650 bp, Homo sapiens
atcctaatttaatataactgatatctaatttgttcaagcctctgttttagaagttgcagagaagaatgagatacttaatgagtttgtattaggagggaaaagcaatgtatacaatgtgtcagatgctttacatgctatattacttgtaacttactctaatatatattagtaatacatgcatataaatgcattatattagccttaatttaaaccctgagggtgatacatttcttcatttactaatttgttcattcacttgyctaatatttattgagcaccaattatgtgactggcattgctttttgtattttgaatgcagtggtatataaaacacattttaaaagccttcctggagctcatattttggggcagaaacagagatcaggaaatcacagcatagtatgattagttcatatttgtaggggtgcatccaggagtccacactctagatataacagtgcaagtgcttagtagcactatccatgtctacatcagagggtttgctgattagcataaggatgccagaaataattccttggtgaaataaatgatattcaagatgtgtagttgacaagaaacattataagacaagtctactctttcatgaataaagcagatgacattgacaagcccagtagcctaacatcttt

SEQ ID NO: 751160 - DNA, 516 bp, Homo sapiens
tccatagtattccccattgaactcttctactttctgataccaaacgttttgtaactattggtggcttgtccttatgacttgtatcttaaggtttatgggaataacttgtagctagatttgccataagtgtcaatggctttttgactttgccatctagctcctttttttctgtatttatgcaggagttcaagaaattcaaaaatgatgccctatcactgctgccatcttcccacaatctgcacagatggtrttttcaaaccccatctgctatatctccttgtgaccaagcatatactgaaagaggtaagtgaggggtagggcaaaatggaaggaaggtaagtttgttacagtgagaaaatatatctttttcttatttctgtaaaatgtagtatatataactaataacaattagctataaaatgcctcttctcttagcccctctgcttatattctccatggccttcttactgctctgtaaacaggctctatctttcaaatgagtctattgagaataaa

SEQ ID NO: 751161 - DNA, 633 bp, Homo sapiens
aagttcattatgccttgtgctcttctaattaaacaacttcaaacttaaaaaataaacaaacaaaataaatgtcattaggagctatgctttctaaacaatttgaccaaggtaaagtctagaattataaacaatccagtccaagcagcatgcccatagtggtttagaaaattaaacgatagtcttaagaataagaagaagattaaataacctctaacatcccatttagctttaatattataaagcattgtttaaattaaaatttcggaaaaaggctgggcttggtggcttatgcctgtaatcccagcattttgggaggccaaggcagatgaatcactttatttcatgagtttgagaccagcctgggcaacatggtaaaacgccatctctatttaaaaaaaaaatagctaggcatggtggcaggcacctgtagtctcagctactaagaaggctgaagtgggaggactggttgagctcaggaagcggagaytgtggtgagctgagatcacaccactgcactccaacctgggtgacagaatgaggccctgtctccaaaaaaaaaattttaattgaattttattatttaattatttaaattagaaataataattaatttaaatacttgtattagttatt

SEQ ID NO: 751162 - DNA, 637 bp, Homo sapiens
ttactcatattgatgagacaaatgccaaagtcatagtgcaaagaggcttgtataatagaaatggaagaatatggctgtgttttgcaatttaccacaattgacttgtaaactttgtaaatttctagctctttgggccccaaattattcacatttctcttacgtacaaaatatactcaaatccatcataggaccagcatcaagcttgaagggcccatattgtcaggttcttcaactctagaaaaacatgttcttatattaggaccaacttctgcttcctgaaagtaattcttttatcctgttttcttctgctcttggctctgagctgtgggcttatgtctgtgcccactaagatataattagttttccatgtgtgtagctaggtagctttgtcatcatgcttttttcttgttgaaatctggagaactagtggcctcttcattttgaattctatttttttggtccaagctggtacatctcccataaaaattttatgggcttttyatgaatctgattgaggttaactctgcctaaaagccatatccataattctttgcacaatagacacaaagtaaaaatcactaccttgaattttccatgtgaagattaatgaagaatatatacataaagaacataatgt

SEQ ID NO: 751163 - DNA, 580 bp, Homo sapiens
atcttcttatttattgcactaataaagaagcacatatactatgattatcactattttaaaaatatattttggttcaacacaaatgcctttgaaatcataatagtcttgtttaacgttactcaaaaattttctgagaagcggctttactatattaccaaaaaagtgcacggcacatacaaaactgaagaaattctgttccataggacagtggtccccaacctttttggcaccagggactagttccgtggaagacaatttttctacagagggggtgaaggagggtatgattttgggatgaaactgttccacctcagattttcaggtattagattctcataargaatgcccaacctagattcctcacatgcacagtttacaatagggtttgcactctatgagaatccaatgccaccactgatctgataggaggtggagctcaggcagtaatgcttgctcgccagccactcacctcctgctgtgtggcccagttcctaacaggccatggaccagtactagtccacagactgtgggttgggaacacctgccatagaatataatccaaactctattataggaaatc

SEQ ID NO: 751164 - DNA, 580 bp, Homo sapiens
atcttcttatttattgcactaataaagaagcacatatactatgattatcactattttaaaaatatattttggttcaacacaaatgcctttgaaatcataatagtcttgtttaacgttactcaaaaattttctgagaagcggctttactatattaccaaaaaagtgcacggcacatacaaaactgaagaaattctgttccataggacagtggtccccaacctttttggcaccagggactagttccgtggaagacaatttttctacagagggggtgaaggagggtatgattttgggatgaaactgttccacctcagattttcaggtattagattctcataaggaatgcccaacctagattcctcacatgcacagtttacaatagggtttgcactctatgagaatccaatgccaccactgatctgataggaggtggagytcaggcagtaatgcttgctcgccagccactcacctcctgctgtgtggcccagttcctaacaggccatggaccagtactagtccacagactgtgggttgggaacacctgccatagaatataatccaaactctattataggaaatc

SEQ ID NO: 751165 - DNA, 611 bp, Homo sapiens
tctcagacagcacatctcttagtatttagctagtccagagcttaccacccacaaaatagatataaaataggggagaaaattatcctttcatttaaaaaaaaaaagctcttttataatatcaagtattttctaaggaacatgasttctgacaattcaaagtttctttgttctgctgcactttgacgagtttgggattgcaagttgtcctcaggagctagtagctaaatttctatgcaaaattgagggaaaaacttagagctgaagaggacaatgtgtgaaggaggagcagaggaggagaaggaatgagagacataagcaagccggcaaattgggaattacatgagaaagtgcctcccgtcacccatcccttagccctgtcatcttaagattattagttcatagaatttgtggcatgagtatatttctggtggaaactgaagaaaaggataaaaaataagcttatgcgtacataggagtgagaagtagggaagaacatgagagtcaaagtccactgagatgagtagcaatcctcagaaatttggatttcttaggcatggaatgaactggcattgaaaccaatcacctctaaatctctgagaagcagagaaacc

SEQ ID NO: 751166 - DNA, 641 bp, Homo sapiens
aggttgtatgagggcctggttatacttacgggaccactctgacattcttcaagacttacctctctccaagagacaaggatttcacagggccaagtggaatttccacaccaaatccatgttaccccttctcgaccatgctctgagtatattgcactctgaaatatcatgctcaaataaacgtaaacccatttccagagaccctagggscccccatcgcaggctagtactcctaaggactaactgcccatggaatgacaataggcagctctttgtggagacagtgacatgagaagacaatggtcatgtggtctcagatgtatacacacatctactgtggctacccactggaagaagaaaaagcaaatcaaatgagttggttgtgattgccattctccatgccattatgatccagaacaaaacagtgaggaatatgagaattctaaactcaaacttggccttacagacccatgtgaagatgtatgtatcaaagtagaaagacaaaacacattattcacagtttattgcttagtttataactctgaaatatttagagacattatatagatctccatttgtgttcttgccctgggccctaccgatcacagaggcctgactgcttttatagattaaatagatgatat

SEQ ID NO: 751167 - DNA, 579 bp, Homo sapiens
gcccagcaatttctctggattcaagaatgccaggagagattctgtccagcatgtgggatgcattactcattaactgctcgtcactgagcatttgtgcagctccttcaaaatacaccagtgaggctgccagctccccagggtttctgagaagcccagatgctggagcaatattccccagctcctctgatctatggggaacccttgttagagtagggaacctgtragcctcctcaactttggaaactctccactttctaaagctgaaaacttaggaaatccttgacctttgggatcggaggtgagtgttcccaatcttaagccataaggacagggaccaactctgtcttattcactgctcctcttgtccatggtggcatttaaataactgtgaaccaaatggatgaatgactgagtgaacaaattacgtaaaagtcaccgcatcacctccttgcaggaaggctgagtcacttgtgaagtgtgccctctgtcctctctctgaggaggtaggggacaaacatgatgctctagaaaggatatcacctctggggtcagactaactgggtcccagtcctggctctg

SEQ ID NO: 751168 - DNA, 598 bp, Homo sapiens
tggctcccttctcttgccctttcaagcctgtgatggtgatagcaccctatttttttctatgggactgtctctgggtctggagctgaaagagggcaatttggcagcaggtgccagcttatgccacagctatctacagtcacgagggtggatgagcttgcccagggaacatggtgaggatggtacacaggggctgggcttggggaatgtctgacatataggaaccaccagcaggtggggaggcaacgaggggctgaggctggatgggactgaagcctccatttctcatatccccacctggaaattgttacccactgacttctctgtctttgtcaaaaggtgagtggagaacagtaagaggaggtttgccggtctccraagacagcgctcagctctctcgggaggtgaactcaccagcagttctgtgttatccctcctgcctcctgggggttctactgctgtgaatgcagcagccctggctttgtgctctcagggacataggaaggcacgtggaactctctcaagggttatcaggagagcctcatctggaaactgagtgactttctttttgaaaagcctcttccatccccagagccctggt

SEQ ID NO: 751169 - DNA, 629 bp, Homo sapiens
ctatgttataaatctcttcattttttcagagtattctataatcttagccataggaatattttaattaagattcaattgtttcagaaaactatgaagctaaatcatttggaggtaacatgaaagattcacactttcttcattttagaagcattttgctgttaatatcattgataacttcaatacagttcgccttgaaattgtaagaaattgtgtcttaaaaccttacagtagtaattcaaaagatgtggctattttgtgcatatttttgttttaaaccagaaatgcttaacatgacaaattgccactttttataatgtatttaatattcttgaaaaatsactaaaaaatttcaggatatgaccaaactaaaatttctgattggaaaatgtactcatatcctatggctactataacaaacttccacaaacttgatggcttaaaacaacataaatttattttttccctgttctagaagctagaagtcctaaatcaatattactgggacaaagtcaaggtatcacagggctgtacttcctgcagcagctctaagagagaatctactccagtttctggtggctgttggcatttcttgacttgctgccacatcactcgaatctctgtctccatgg

SEQ ID NO: 751170 - DNA, 629 bp, Homo sapiens
ctatgttataaatctcttcattttttcagagtattctataatcttagccataggaatattttaattaagattcaattgtttcagaaaactatgaagctaaatcatttggaggtaacatgaaagattcacactttcttcattttagaagcattttgctgttaatatcattgataacttcaatacagttcgccttgaaattgtaagaaattgtgtcttaaaaccttacagtagtaattcaaaagatgtggctattttgtgcatatttttgttttaaaccagaaatgcttaacatgacaaattgccactttttataatgtatttaatattcttgaaaaatcactaaaaaatttcaggatatgaccaaactaaaatttctgattggaaaatgtactcatatcctatggctactataacaaacttccacaaacttgatggcttaaaacaacataaatttattttttccctgttctagaagcyagaagtcctaaatcaatattactgggacaaagtcaaggtatcacagggctgtacttcctgcagcagctctaagagagaatctactccagtttctggtggctgttggcatttcttgacttgctgccacatcactcgaatctctgtctccatgg

SEQ ID NO: 751171 - DNA, 592 bp, Homo sapiens
ttctttctctggtttcctaaagtggaagcttagatttatatctttattcttttctaaaatattcagtcacgtgctataaatttccctttaagcagtacgtccactgcattccacacattttgataagttgtgttttcattttcatttagttcaatgttttaaaatttattttgagacttcttctgattcatttgttakttagaaatgtattgtttaatttcaaaatatcgtgggagtttccagctatctttctgttgttgatttttgtttaatttcattgtgttttgagaacatactttgtatgatttctattctttaagttgttaagatgtgttttatggcccagaatgtggtctattttggggaatgttccatgtgagcatgagaagaatgtgtattctgccgttgttggattaagtctataaatgttcattatatccagttgacttatagtattgttgagttcaattatgtccttactgattttctacctagtggatctattatttactgatagaacggtattgaaatcttcagctgtgacattagatctgtctattgatccttgctattctatcagtttttggtctca

SEQ ID NO: 751172 - DNA, 625 bp, Homo sapiens
aagtaatattattcttctaccaacttttccataaaatacaagagctgagaatactttccaactcatcctatgaggtttgcatagtttcagaaaggaaatatgctgtaattattatcttcattcttcctcatgtaatacgtgtttttttctgactgccttcaagattttcactttatctttgtttttcagtggtttgaatatgatgtgtccaagtgaagggtttttaagtggyggtaggatggtgattcgtagtgttctctgagtttcttgaatctgtagtctgattttttttattatttttggaaaatgttggccattatttcttcaaatatttctcattccctattctttcttgtgtacactgggattccaattacacatgtgttagacctcttgatattgtttcatagctcttagatgttctgctctgtatttttaattattttttcctttaatatttcagatagggtgacttgtatttactcatctttaagttcattaattgtttttcctccatgggcttggcaatgttgaatctactgaggaacctgtcaaagaaattcttcatcacttatgatttttcactgttgcatttctatttgggtctttctattagttttcatca

SEQ ID NO: 751173 - DNA, 629 bp, Homo sapiens
agttttaaaattttgtatgtagaagcaaaaacatctttatgaaagaaatcttacttggaaccctaacacataaataagaaaaagcagatcattctagttacagcttgcagagagggttctggggacagggttagcacacrggtggggagtggtgggcacacaggaagcttgagtctcagaagcctgctgaatccttggttaagctccaaggtttctcctttccctggaccccaagacagcttggaagaatcagggagctccctagaatgcagctggaacacctctgcttcaggcaattattctgaaaaaaatagaggtgggagattgtgtgtgtgtgtgtgtgtgtgtgtgtgtgtgtgtgagatacatccctgttgacccaatagtgaattcaggaagctttaatcaaactgagggcagtcaccattctcaggcatatttctatgttggctcttaaatacataaattgcttatctagtcaatagagaagatcctttcccttttgccagctcttgttttatacctccttggtcagaagtacttaaagagcaaatgcataaatgattattgagagtaatgtgctattctgcatgcaaaacaaagcaaataccttgtgaaatggcattgtt

SEQ ID NO: 751174 - DNA, 629 bp, Homo sapiens
agttttaaaattttgtatgtagaagcaaaaacatctttatgaaagaaatcttacttggaaccctaacacataaataagaaaaagcagatcattctagttacagcttgcagagagggttctggggacagggttagcacacgggtggggagtggtgggcacacaggaagcttgagtctcagaagcctgctgaatccttggttaagctccaaggtttctcctttccctggaccccaagacagcttggaagaatcagggagctccctagaatgcagctggaacacctctgcttcaggcaattattctgaaaaaaatagaggtgggagattgtgtgtgtgtgtgtgtgtgtgtgtgtgtgtgtgtgwgatacatccctgttgacccaatagtgaattcaggaagctttaatcaaactgagggcagtcaccattctcaggcatatttctatgttggctcttaaatacataaattgcttatctagtcaatagagaagatcctttcccttttgccagctcttgttttatacctccttggtcagaagtacttaaagagcaaatgcataaatgattattgagagtaatgtgctattctgcatgcaaaacaaagcaaataccttgtgaaatggcattgtt

SEQ ID NO: 751175 - DNA, 655 bp, Homo sapiens
gtcccagtgctggcctcccctcctgcagttcagcaggcttaagaagattccagctgagaggctgtaagagtctgcacattccagggttaggatgctatgccctggtagtgtgggtttgcgagtggtctcttccaatctgtgtgtttcacacttccatggaaaaagtacaatttctccagctgggtagcatgctcactcactgcctcccttggttgcggggaggaggttccacttcctcatgtggctgttgcagcacactgttcttccttctctcaatgggtcatgccagccttctagtcaattttgatgasagaacctggataccttggttgccggtgaaggattcatgcttatgttttttttccaatgggagcctctgaacgccccttcttctagtcggccatcttggccctgcccccttcttttcttaatagattccaaattaacccaagtgttccttgttcctttctgcccacacaagctagtggtctaattattttccaaatatgtacactggggctgaaatagtaacaacatgagctatctatgttacttatgtatccatcactttaaacagcactttctatgtacctggcactgttttaaatacaaagataaactcatgtagacctcagcacaactttataagacaggg

SEQ ID NO: 751176 - DNA, 454 bp, Homo sapiens
ctgtgtataggggcccacacagaatttggaatccaaatacatctctggatccccaggcctgtgtttgactcgccaggtagtaatgagatgtctccattttctgcaggctgaatgattccctcagagcagaagtataagcatatttattgtttttccttctatmataaacagttattagttgtggccctttctcccttccaaataggtgcccaaatttctggaagtggaaagggcccaactttcccatatcagggggtgggccccactgggcgtgagccaatcagtgtcttctgtcctgtgagctcccgatttatgctggtctataacctgagatggccttctcaggatggacctccagggattgctggaacttggactcttgtcagcctggtaaatggtatgtcttagatctgctgcagccgtcgtggaaaacttgaagctgccaggagagagg

SEQ ID NO: 751177 - DNA, 624 bp, Homo sapiens
tggttaagtcaccaactcagtatctagttaggttcatttgtttcattgtgcttttgtttctgaacttaaaaaaaggcatttgtatggtctcaaagtcaaatttgcaaagtaagttactttcagagagctctagcttttatctctgtctcttcaatcttattctctccctctctccataataacttaaaraaaaaactttatttagtttgaggttatcctctttctcttcctccttctcttctttcttttttttttaatttttaaaacagcaaattgttaaatttattcacatgttccccttttattcaatacttggtagcataatctacacagtcttttgaaccttccttttttcattttaacagtatatcttggagatcacttggtagtggtatatagggctcttcctcatttctttttatagttacatagtactccattttgtagacttacaatagtttattcaaccatccccttttggtgtacagttacattatttccagtcttttgttatccaataatgttgcaataaatagccaaactgtgcttcaaaagacactatcagaaaagtgaaaaagcagctgacagtgtgggaggaaatatttataaagcatattatctgat

SEQ ID NO: 751178 - DNA, 624 bp, Homo sapiens
tggttaagtcaccaactcagtatctagttaggttcatttgtttcattgtgcttttgtttctgaacttaaaaaaaggcatttgtatggtctcaaagtcaaatttgcaaagtaagttactttcagagagctctagcttttatctctgtctcttcaatcttattctctccctctctccataataacttaaagaaaaaactttatttagtttgrggttatcctctttctcttcctccttctcttctttcttttttttttaatttttaaaacagcaaattgttaaatttattcacatgttccccttttattcaatacttggtagcataatctacacagtcttttgaaccttccttttttcattttaacagtatatcttggagatcacttggtagtggtatatagggctcttcctcatttctttttatagttacatagtactccattttgtagacttacaatagtttattcaaccatccccttttggtgtacagttacattatttccagtcttttgttatccaataatgttgcaataaatagccaaactgtgcttcaaaagacactatcagaaaagtgaaaaagcagctgacagtgtgggaggaaatatttataaagcatattatctgat

SEQ ID NO: 751179 - DNA, 495 bp, Homo sapiens
tcattaacttcgccatgggctgcattactagtaagtggcaaaacctcaattggaatcaagtttgtaactgcagttacagaattccttctcttcttgcccaaattctagcctcaaacagtgaggggacaggctccttatattagctgggagttggtccctcatgtcatgtcccagactccttgattctcacaactctgcctgctcttctaactctactatcttcatcaggcacaaatcatgtgaacccatcaacatttgaaatttgacattttaatccttaaaccaatgcacagaggactttcataattatgatttgttttattaagttgtcatattgtctttcagatayggcgcttctgggataacaggaactaggtaaaaaatgaaacaggctaaaaggcaaacagaaaggtcagtattaaaagtattgaaatgaagtcaagccattagcctattccaacatcctgtttcagtttgtgtttttttttttctccc

SEQ ID NO: 751180 - DNA, 553 bp, Homo sapiens
gagagaaatggaagtgtcctattgtaagcttctcttattctaggaaaaatggatattacttaagaataaactatgacaattaaagttgcatactataaattctaactcactaaaataacaaaacagtgtgatagctaaaaacycaacaaaagacataaagtagaatcataaaaaattctcaactaatcaaaaggaaggaagacaaacagagacattttaaaaagaaacaaagaagatgagactaaaagaaagcaaagacaacggactataacctaactcgttttatcaataatcacattacatgtaaacggtttatacatccccaattatgagacagaaatagactgatgaaaacaagcaagatccaaattttgctgcctgtaagaaataatactttagatataaagatgcaaataggttaaaagtaaaaggatggaataagatataccatgcatgtattactcaaaagaatgctacataaataacaaagtacatttcacagcctggaatattagcagggataaggaaggccattttacaaagtggttaatta

SEQ ID NO: 751181 - DNA, 553 bp, Homo sapiens
gagagaaatggaagtgtcctattgtaagcttctcttattctaggaaaaatggatattacttaagaataaactatgacaattaaagttgcatactataaattctaactcactaaaataacaaaacagtgtgatagctaaaaacccaacaaaagayataaagtagaatcataaaaaattctcaactaatcaaaaggaaggaagacaaacagagacattttaaaaagaaacaaagaagatgagactaaaagaaagcaaagacaacggactataacctaactcgttttatcaataatcacattacatgtaaacggtttatacatccccaattatgagacagaaatagactgatgaaaacaagcaagatccaaattttgctgcctgtaagaaataatactttagatataaagatgcaaataggttaaaagtaaaaggatggaataagatataccatgcatgtattactcaaaagaatgctacataaataacaaagtacatttcacagcctggaatattagcagggataaggaaggccattttacaaagtggttaatta

SEQ ID NO: 751182 - DNA, 651 bp, Homo sapiens
gaccggctggagccatggcagaggaacataaattatgaagatttcatggacatttaccagttcccaaataatactttcataatttcttacgcctgtcttactttaatctcttaatcctgttatcttcgtaagctgaggatgtacgtcatctcaggaccactgtgataattgtgttaactgtacaaattgattataaaacatgtgtgtttgaacaatacgaaatcagtgcaccttgaaaaagaacagaaaatcagcgattttcagggaacaagggaagacaaccataaggtctgactgcctgcagggtcgggcaaaatacagccatatttttcttcttgcagagagcctataaacggacgtgcaagtagggaagatatcrctaaattcttttcctagcaaggaatattaataattaataccctggggaaggaatgcattccttgggggaggtctataaacagctgctctgggagtgtctgtcttatgcagttgagataagggctgaaatgtgccctggtctcctgcagtaccctcagacttactacggtggggaaaaaacccgccccagtaaatttgaggtcagaccagttctctgctctcgaaccctgttttctgttgtttaagatgtttatcaagacaatacttgcactg

SEQ ID NO: 751183 - DNA, 583 bp, Homo sapiens
ggcttgtctgatattttctcatgattaaattcaggttataggctgggcacagtggctcgcacctgtaatcccggtacatcagcaggctgaggcaggaggatcccatgaggccaggaattcgaacaagactctacttttaaaaattaattaattcaggttatataaaacaatttttaaacatcactttcatattctatcttactttcaatgttttacttaaattttttttttttaaagagacagggtattgctgtcacccaggcaggagtgcaatgacgtgatcatagccactgcagtgactacagcctcgctcaatctcctagcctcaaggtgatcctcccacagcagtctcctgagtagctgggactacaggtatgtactaccataccaggctaattaaaaaawttttttttttcttttttggaaactcccagctacatttcccagggtgatttcaaactcttggcctcagaagatcctcggctttagcctcacgagagctactccacccagaaatgctttacttaatttaattcaggtcatcagtgcttatcacactccaccccacagagaaggcatagaa

SEQ ID NO: 751184 - DNA, 583 bp, Homo sapiens
ggcttgtctgatattttctcatgattaaattcaggttataggctgggcacagtggctcgcacctgtaatcccggtacatcagcaggctgaggcaggaggatcccatgaggccaggaattcgaacaagactctacttttaaaaattaattaattcaggttatataaaacaatttttaaacatcactttcatattctatcttactttcaatgttttacttaaattttttttttttaaagagacagggtattgctgtcacccaggcaggagtgcaatgacgtgatcatagccactgcagtgactacagcctcgctcaatctcctagcctcaaggtgatcctcccacagcagtctcctgagtagctgggactacaggtatgtactaccataccaggctaattaaaaaatwtttttttttcttttttggaaactcccagctacatttcccagggtgatttcaaactcttggcctcagaagatcctcggctttagcctcacgagagctactccacccagaaatgctttacttaatttaattcaggtcatcagtgcttatcacactccaccccacagagaaggcatagaa

SEQ ID NO: 751185 - DNA, 609 bp, Homo sapiens
gaaattaagaaaataattccggccgcgcacggtagctcatgcctgtaatcccagcactttgggaggccgaggcaggtggtcaggagttctagaccagcctggccaacatggaaaaaccctgtctctactaaaaatacaaaaattcgcctagcatggtggcaggcgcgtgtaatcccagctactgggggggctgaggcaggacttgaacctgggaggtggaggttgcagtgagccgagatcatgccatcgcactccagcctgagggacaagagtgagactttgtctcaaaaaaaaaaaaaaaaaaaaattccattcacaatacgtaaataaaatcaaaaggaacaaaatacttaggaaaaaatgatcaaaagtagtgctagatatatacactgaaaacaacaaaatattgaaaatattgctgagagaaattaaagaagatataaataaacatcatgtgatgggttggaagactyaactttgttaaagggtgattttccctaaattgatttacattcaacagaattcttctcaaaatcccaagcaggctatttttttgtagcaattgataagctgatcataaaatttatatggaaataccaaggaccttgc

SEQ ID NO: 751186 - DNA, 566 bp, Homo sapiens
tccagactccagtccttgtacttgaacatttaattgtttgaaagtaacacattttattatgaagaaaaataatctatattcaaaatttagcaagtataccctggcaaaaaaatatataaagttgttttcaaattttcccattcaagaatggtgayatttaaatatattttctccttgactttttcccgtatctattaattatattaactaatatattaataccatattattacatattatatcatgttataataacatatcttataatccccatgcctttaaaaatgtcttattgttctgtcactcaaacagttattttggactctcatttgctgttttgacttctaatgttgcaaaatcttcttgagccaataacatttataattaagggagcagagttcttaaaattgaaaatgaaacctgtttggttatgaaatatcagagagttacaactttttccttaaatagatgtgagttgactttcattaaagggggaataaaagaaagaacaaacattttaagcaaacgttctaaacaaaggttgcaaaatcttactatctaaggca

SEQ ID NO: 751187 - DNA, 566 bp, Homo sapiens
tccagactccagtccttgtacttgaacatttaattgtttgaaagtaacacattttattatgaagaaaaataatctatattcaaaatttagcaagtataccctggcaaaaaaatatataaagttgttttcaaattttcccattcaagaatggtgatatttaaatatattttctccttgactttttcccgtatctattaattatattaaytaatatattaataccatattattacatattatatcatgttataataacatatcttataatccccatgcctttaaaaatgtcttattgttctgtcactcaaacagttattttggactctcatttgctgttttgacttctaatgttgcaaaatcttcttgagccaataacatttataattaagggagcagagttcttaaaattgaaaatgaaacctgtttggttatgaaatatcagagagttacaactttttccttaaatagatgtgagttgactttcattaaagggggaataaaagaaagaacaaacattttaagcaaacgttctaaacaaaggttgcaaaatcttactatctaaggca

SEQ ID NO: 751188 - DNA, 505 bp, Homo sapiens
tgaaattccttctcttggctcatcctggctcaaaagctcccctactgagcaccttgtgaccccgccactcctgcccaccagagaacaacccccctttgactgtaattttcctttacctacccaaatcctataaaacggccccacccctatctcccttcgctgactctttttggactcagcccacctgcacccaggtgaaataaacagccttgttgctcacacaaagcctgtttggtggtstcttcacatggatgcgcatgaaagatggttcttagggatttttctatttaaaaaaattagcaggctgctataaatattttgtacttatctttttgtgtccatgtacactttataggcaaacggatatgtgaatatgtaatattgtgcagcaatactaacgtcttccaaagaaattgtatgattcacccaaatcagtaaattcttgttcatgtacattctctccaatattggcattgtcagacttcctaattatggacaatttagt

SEQ ID NO: 751189 - DNA, 492 bp, Homo sapiens
cctccagcccattcaggtaaaaactcgcacaaacctccggctcactcagttaagggaacaagaccagacacagaaatgcctttgtcctttgtataatcagcaggctccgaggaaaaagtttcttcttttgtgggcatgaacacagtgggcttcagtaggttcaggttggcactttcttttgtggaaaaggaaaagcccagcctctgtaaatcatcacttcarctcctgattggtcccgggccaagctgaatagcccttaggaataatcacttcaactcctgattggtcccgggccaagctgaatagcccttatgaatcatcacttcggttcctgattggtcccgggccaaggtcccagaccaagctgaatcacgctttctccaagacagcccgcaggctaagtgcattccttccccttcccagtccataaaaaccccggaccccagcctcatactgggcaacttatttggatccccatctccactgtggaga

SEQ ID NO: 751190 - DNA, 492 bp, Homo sapiens
cctccagcccattcaggtaaaaactcgcacaaacctccggctcactcagttaagggaacaagaccagacacagaaatgcctttgtcctttgtataatcagcaggctccgaggaaaaagtttcttcttttgtgggcatgaacacagtgggcttcagtaggttcaggttggcactttcttttgtggaaaaggaaaagcccagcctctgtaaatcatcacttcaactcctgattggtcccrggccaagctgaatagcccttaggaataatcacttcaactcctgattggtcccgggccaagctgaatagcccttatgaatcatcacttcggttcctgattggtcccgggccaaggtcccagaccaagctgaatcacgctttctccaagacagcccgcaggctaagtgcattccttccccttcccagtccataaaaaccccggaccccagcctcatactgggcaacttatttggatccccatctccactgtggaga

SEQ ID NO: 751191 - DNA, 565 bp, Homo sapiens
agttgagaatgtagtatttaagaaaaatttagaagtatataccatgacacatattgacaattttatattcaacttttatgtgtgttttcaatgaataatccaaaactatgaaccaatttatttaatcagcccatttataatgcctctctaaattaatttatactagaagctccaaactccataataaaaatctttccaaactagagtttgccatattaaatggggtgtcttttgatgtgtctattctatatccaaagtgaaaaagagaaactttgstaatggctaattctttaatttctcccccactctgagaagtaaccaaattttggtggtctcttacatcaaagtgtactagagaaaagggaagccatgtctttgttaaccaaaaaatcttcttaagtgatgaagttgatagcttaactaatccttgttcccaccccagtcactctccactcttaccactcacactgtacatgcccttctctaaaccattttaataatcttcctaatgaatatttagttagcatgcaagcagattttttctattgccgaaggccagcaatct

SEQ ID NO: 751192 - DNA, 586 bp, Homo sapiens
agaatcaatccttaagctaggcaatgcatggagacatcaattatgctaaaatatttaaactatttcataagagtagataatgatgcatagtaaattgtgtcctgctgataatattagaaaatacttaggcaagatggacatacatgtatattttaaaacaattctttttcttttttctttctttcttactcktttctttttttaagtacttgcactttttaaagattcctagagaaccagatgggtgatgaaatatctcaaaataccaggtttcacacgtgatagtaatattgggagaaaaaagtgacactagaaattatttagttattctgaaatctgtcacttcttgaaaacagcaccagaattaagaaataaaattaatcgtgtaacattgtgttctcacattttcaattcagctagtgaattatgaggccaaaattccttaagacaattaccccagggccttagtcggctcccaagtctctgcctttcacctgagaaagaatttccaaactgcctgatgagggagaaaaccatatccatggtcccagcggtctggaggatcccaagaatctggatgggaagc

SEQ ID NO: 751193 - DNA, 586 bp, Homo sapiens
agaatcaatccttaagctaggcaatgcatggagacatcaattatgctaaaatatttaaactatttcataagagtagataatgatgcatagtaaattgtgtcctgctgataatattagaaaatacttaggcaagatggacatacatgtatattttaaaacaattctttttcttttttctttctttcttactcttttctttttttaagtacttgcactttttaaagattcctagagaaccagatgggtgatgaaatatctcaaaataccaggtttcacacgtgatagtaatattgggagaaaaaagtgacactagaaattatttagttattctgaaatctgtcacttcttgaaaacagcaccagaattaagaaataaaattaatcgtgtaacattgtgttctcacattttcaattcagctagtkaattatgaggccaaaattccttaagacaattaccccagggccttagtcggctcccaagtctctgcctttcacctgagaaagaatttccaaactgcctgatgagggagaaaaccatatccatggtcccagcggtctggaggatcccaagaatctggatgggaagc

SEQ ID NO: 751194 - DNA, 586 bp, Homo sapiens
agaatcaatccttaagctaggcaatgcatggagacatcaattatgctaaaatatttaaactatttcataagagtagataatgatgcatagtaaattgtgtcctgctgataatattagaaaatacttaggcaagatggacatacatgtatattttaaaacaattctttttcttttttctttctttcttactcttttctttttttaagtacttgcactttttaaagattcctagagaaccagatgggtgatgaaatatctcaaaataccaggtttcacacgtgatagtaatattgggagaaaaaagtgacactagaaattatttagttattctgaaatctgtcacttcttgaaaacagcaccagaattaagaaataaaattaatcgtgtaacattgtgttctcacattttcaattcagctagtgaattatgakgccaaaattccttaagacaattaccccagggccttagtcggctcccaagtctctgcctttcacctgagaaagaatttccaaactgcctgatgagggagaaaaccatatccatggtcccagcggtctggaggatcccaagaatctggatgggaagc

SEQ ID NO: 751195 - DNA, 557 bp, Homo sapiens
gatggtctagaggtcccaaaggatcctgtgatgtgccaggttgtaaagtggtaacaaacattccccaaatatcagtggcttcatataccaaagtctgtcactctcactctatgtccagtaaggggcagcaggggccctgctcatcagtgtcgtgcaggagccccttggagcaagggaggaccactctctacatatgcatagagatctccaaggactgaagagggggcctcttgaggctctcacactggtcatcaaatcgctggctctggagatacttcctcttacaactaatccaatgactacacctgcacgcaggctcagcctctgatgaccaggagaaagawgacaaccagccagccaccagtccggatgctgcacaccttctcagggatacccagggagttaaataagaaacagacgagcaaaatattttcaagactttaactgaataataaaaatcagtcgtacttagttggctggagttttattgcaatacaaatctaagatgagcatttcagataaaagttggaccaaggttcaggaattaaacattttga

SEQ ID NO: 751196 - DNA, 557 bp, Homo sapiens
gatggtctagaggtcccaaaggatcctgtgatgtgccaggttgtaaagtggtaacaaacattccccaaatatcagtggcttcatataccaaagtctgtcactctcactctatgtccagtaaggggcagcaggggccctgctcatcagtgtcgtgcaggagccccttggagcaagggaggaccactctctacatatgcatagagatctccaaggactgaagagggggcctcttgaggctctcacactggtcatcaaatcgctggctctggagatacttcctcttacaactaatccaatgactacacctgcacgcaggctcagcctctgatgaccaggagaaagaagacaaccagccagccaccagtccggatgctgcacaccttctcagggatacccagggagttaaataagaaacagacgagcaaaatattttcaagactttaactgaataataaaaatcagtcktacttagttggctggagttttattgcaatacaaatctaagatgagcatttcagataaaagttggaccaaggttcaggaattaaacattttga

SEQ ID NO: 751197 - DNA, 575 bp, Homo sapiens
agtgtcactaacccttaacatttttgtgagagcacattcgcatgttggagtgacacatatagtttaaagacacgtctcaattacatgatgtggtctggacagctgcccttgtggggacagaggctgccactaaactctgagcaattacttaaaattagacttgtcaaatttgtttagggtgaccaggcaagtacatacrttgacctaatgtcactcttcctggagagacgttgtaatgattttgtatatcagtcaaactatttaaaactaatgccgccttcatgccataatcaccattctagtcagatgtcatttttagaagcccttggggatttgcctctcttaattattcttcaatacccaaaccaagcattctttaattggtgtaaattgaacagtgttccagtgcaaacaaggagagggcacattgatcaatgattctgtgcatgtctattggaaagtcgttgccattagatcaagtaacaaatccttaacccctttggcttcagtggaaacatcaggttgtggggctgagaaatgctacttctccttaagtcatcatcattgggaaacag

SEQ ID NO: 751198 - DNA, 575 bp, Homo sapiens
agtgtcactaacccttaacatttttgtgagagcacattcgcatgttggagtgacacatatagtttaaagacacgtctcaattacatgatgtggtctggacagctgcccttgtggggacagaggctgccactaaactctgagcaattacttaaaattagacttgtcaaatttgtttagggtgaccaggcaagtacatacattgacctaatgtcactcttcctggagagacgttgtaatgattttgtatatcagtcaaactatttaaaactaatgccgccttcatgccataatcamcattctagtcagatgtcatttttagaagcccttggggatttgcctctcttaattattcttcaatacccaaaccaagcattctttaattggtgtaaattgaacagtgttccagtgcaaacaaggagagggcacattgatcaatgattctgtgcatgtctattggaaagtcgttgccattagatcaagtaacaaatccttaacccctttggcttcagtggaaacatcaggttgtggggctgagaaatgctacttctccttaagtcatcatcattgggaaacag

SEQ ID NO: 751199 - DNA, 313 bp, Homo sapiens
tctcttatcaagatataagctccattaaggcaataatttgttggttttgttcactactgtcttccaagagcctagaagactgcttggaacataggctttcactaagtatttattgaataaataaaggactagatgctagtttraggttaattgatttgctttaaatctcaactgataacacattaagtttgttttcacatggttttagataccaatgccaaaataaaatgtagatcaaaccttatctctccaaccataacagtgatcatcaatgtttcattgaacaatgtcgttttaaaacctatgcccattt

SEQ ID NO: 751200 - DNA, 548 bp, Homo sapiens
caaaatccagctttcctgcttccttatgtctcttttcaaaggaacagaaaaaggacatgaaaaacagaaggtctagagaatgctgattctctcatgaaagacacggcctcccaggtgactggctcctataagcctggcaaaagctgccaggggaacagtcasttgtccatctgaacggaaggaggcaacttaaaagatgaaagaatcatgaaagacccctgctccagccccagccccccataaaactgttaagttttttaagttttataggcatatttggctttaaagaaaatctgaaacataaaatcaaaatttatagatcagatatgtctggaagcacggtttatgttacaaaaaaatggaatttttgctttactaaactcttcactacagttttctctgaaataatgacttcccttatgattaataaatatcccattcaggtgcaatatcagggctatttctatggcattaagcaaggtacacctctgcactgttgactccactaaatttagcttactttcttattgtaattgggaggaaaactc

SEQ ID NO: 751201 - DNA, 628 bp, Homo sapiens
acccttcctccattggtcctcgagccttcacctccccattagctgcagccgtaacatttctaccctcaccctggtaccaaaggcatcccccccagcgctcaggcattctgtctatcactgtgggtgccctgcaggtcccacagcccaggccctcacctctggaaggcctcacggcagcactggtaaatctcaaagctactgctgctgagggtcgtgttcaagagggacatgcagtcaacttcagcccccctgggcatgtagaggatccctgtagagggaaagtggtgggtgggcagggcccccgggctagccagaaagtcagggttccaccttytgagcctgccaggcctgcactcacctgccatacaggcgttcaccagggacacacaggctcccgtgaagagcgcccggagcactatctgggagaagtcgctcttccgttgggggaccatggaggctgcaaggggacagaagtgctcagggcctgggaagctgtgtccctctctgcccgcgttccgcagctcgggctgcatctgctgacctcccttcctcttctattaatagatggccagagggacagatgttgtcctcctgacagcttgctgagctcaggagttctctttggcct

SEQ ID NO: 751202 - DNA, 607 bp, Homo sapiens
aatggggaagtgaaactaagatacatccattcagacccaacttggttgtgttcaagtattcaaagaaacatcatagaactgacagcaatgaacggaagcagaacttagagattcagattgtatcctttctctctccctattcctcttccatttcattggttgtatcagccaggatgcttgtggttgcaagtcaagaaaattaatcttaaagtattaggcgayagagtggatttactgcctcatgctaacgcagagtccagggtcagctcttgcgagcttcaggaaaggtttggtaggacttcacaatacgggtttgcaattctctaagcctattctcacccaggagttggctttgtcctcactgtggggggctgtgagggaggtgggaggaacatcttcccccaaccactccatagtctgattgggacagtttctatgacatgcctgcccctgaattagtaactgggaccagatgaattccatgtcctgctcagcttgggcctgggttatgtatctattactgaaccaataaatgaggcaaggatgttgctggggcccaccctagagctggaaatgagctcaatcccacccaaactacacaactatt

SEQ ID NO: 751203 - DNA, 611 bp, Homo sapiens
cttgccccatacccagaaggaaaaaatgctcagagagcccaagaagagtctacacagacaggctttgctgtttttcctccactcagtcgattagtattagatcacactctgtttgtccaattctatttctatgtggctatccatactttgttgaacctgagcgtaaaaatggacaattttccctgtatctttgggtcttccttctgaaggcccccgtgtgtatgcattaaataaatttgtgtgcctttctcctgttaatctcccttttgtgagctgatttttcagtgaaccttcagaggacgtaggggaaattttcccttggcctccacacttccaaaaacaattggtggtggggtgggtgggtgcaccagttttaatgagcccttttctaggcctcagcaagacaggtgcaaaccagatgacagtctctagaattctagatgggagggtaccaggccagaaaccaaagcmcctgagcccaaggggacttcttgaaaagtcacgcaacagctggccctgcccagacagctctgtggcatgtagagctgagcttattggtgtggtccaggcatccggagtgaaggagagatggaggggcaggctggctgttt

SEQ ID NO: 751204 - DNA, 454 bp, Homo sapiens
tgtgtttgcagcattgcaagcagtgaagccctgtgactggcttcctggtcgagtcccagggaggtcccaggactgcagagagaggaatgcccgtgtggtgcgtggcaagcagggccctagaaagccagtgaggctctgcaggcaccaaaacagcggaactagtctccacgagaggcytgaagagaagagaggcgggagaccagaatgagcccaccatggagaagagggggtcgccatggccacctgcaaggatagaggacccaggaccagctggagaagtggacaggtcaggagacacttgaggagtaatgatagataagcccccccggtgacccccagaggaagggatgaagggaggttccaaatggacagaaattgagttcccgtcactcactggaatgataacattgagggagaagataagttgagttataaaaaataaaatgacctttct

SEQ ID NO: 751205 - DNA, 657 bp, Homo sapiens
tgattgctgatgcagaacagaatgaaatagtaaagagaattcaaaatgagacccaacaacaaacaatttacgggctatgaaaccacaaggaatatgcatataggatgttccaaaaatgagcaactctattatgctgaaaatcgtcacttcattataaatgtttccattctaagctccatccctcactctctgttaataattcaagcatttaaatttttattwgattgtaaattggcacacaggtcatgagcctgacttcacaactgtcatattcaaaattggaatggaatgaatctctttctgcttccagtcaagtcacccatttgcactatccaaatatgcctaatgggaaggagagacacacttgatgggaggaaaaaaaatctcatggagttaacatttgtagtgcaatcaaattaaatttccatcggattttagtttaaaatggtgcttggctagttgctgctgatacatcatctcccaaatttccactaaaatatcaatgaagacacagaaaaaagataaaaaatatacatcatctacagaaatgaaaatttcagaagagtctattgctcagaataatagagaatgttgactaaatgtaaaaccgaagaagcacaatagaaaaatatatatatattactctaatgatgctta

SEQ ID NO: 751206 - DNA, 657 bp, Homo sapiens
tgattgctgatgcagaacagaatgaaatagtaaagagaattcaaaatgagacccaacaacaaacaatttacgggctatgaaaccacaaggaatatgcatataggatgttccaaaaatgagcaactctattatgctgaaaatcgtcacttcattataaatgtttccattctaagctccatccctcactctctgttaataattcaagcatttaaatttttattagrttgtaaattggcacacaggtcatgagcctgacttcacaactgtcatattcaaaattggaatggaatgaatctctttctgcttccagtcaagtcacccatttgcactatccaaatatgcctaatgggaaggagagacacacttgatgggaggaaaaaaaatctcatggagttaacatttgtagtgcaatcaaattaaatttccatcggattttagtttaaaatggtgcttggctagttgctgctgatacatcatctcccaaatttccactaaaatatcaatgaagacacagaaaaaagataaaaaatatacatcatctacagaaatgaaaatttcagaagagtctattgctcagaataatagagaatgttgactaaatgtaaaaccgaagaagcacaatagaaaaatatatatatattactctaatgatgctta

SEQ ID NO: 751207 - DNA, 646 bp, Homo sapiens
tggctgtcaggccatcccctctggccccaaggttggtgggggtgacctgaaccctcgaccactgtgcactctgtcatgggagggcttgaaaaccttcagtgccagctctgtttgcagcaggcctgatggctgccatggctgtgtcctctggcagcggtgatcctaagaaagggccctctcagctgggcacggtggctcacgcctgtaatcccaacactttgggaggccgaggcaggcggatcacgaggtcaagagatagagaccatcctggccaacatggtgaaaccccatctctactaaaaatacaaaaattagctgggcatggtggcacgcgcctgtagacccagctacttgggaggttgaggcaggagaatctcttgaacccaggaggtggtggttgcagtgagccaagattgtaccactgcactccagcctgacgacagagygagactgtctcaaaaaaaaaaaaaaaccacaaaaaaatgaaagggccctctcagctgttgggccggcctctgccaggccctgcacccatgactatctctgcccctacctggggctgctggagggagatggcctcctcctaatgcagggagtgtgtccctccttgtggaaaggaccacggcctgggggccatctggaagtt

SEQ ID NO: 751208 - DNA, 582 bp, Homo sapiens
taacccaaaaaatatcagagacaggtctcaatcaatgtagaggcttattttgctatggttaagggccatggcctgtgacacagtctcaagaggtcctgagaacatgtgtccaaggtggttggggtgcagctttgctttcatacattttagggtacagaagttgcaggcaaagatatcaatcaatacatgtaaggtatacattggtgtgacccagaaagtgagaggcttccaggtyataggtggattcaaagatttcctgattggcaattggttgaaagagctgagctttgcctaaaaagtttgaggtcggcagaaagagatgcttgagttaagacaaggggatcgtggaagccaaggtttttgttatgtagatgaagcctccaggtagcaggcttcagagagactagatggcgaatgtctcttatgggaccttaaaatgtgtcagactctctgtaaaagacctattaagggcagggaattctctacagaatgcaaatttcccccttaagagacagctttgcagggccatttcaaaatatgtcagagaaatatattttggggtaaagtacttttatttttttc

SEQ ID NO: 751209 - DNA, 582 bp, Homo sapiens
taacccaaaaaatatcagagacaggtctcaatcaatgtagaggcttattttgctatggttaagggccatggcctgtgacacagtctcaagaggtcctgagaacatgtgtccaaggtggttggggtgcagctttgctttcatacattttagggtacagaagttgcaggcaaagatatcaatcaatacatgtaaggtatacattggtgtgacccagaaagtgagaggcttccaggtcataggtggattcaaagatttcctgattggcaattggttgaaagagctgagctttgcctaaaaagtttgaggtcrgcagaaagagatgcttgagttaagacaaggggatcgtggaagccaaggtttttgttatgtagatgaagcctccaggtagcaggcttcagagagactagatggcgaatgtctcttatgggaccttaaaatgtgtcagactctctgtaaaagacctattaagggcagggaattctctacagaatgcaaatttcccccttaagagacagctttgcagggccatttcaaaatatgtcagagaaatatattttggggtaaagtacttttatttttttc

SEQ ID NO: 751210 - DNA, 582 bp, Homo sapiens
taacccaaaaaatatcagagacaggtctcaatcaatgtagaggcttattttgctatggttaagggccatggcctgtgacacagtctcaagaggtcctgagaacatgtgtccaaggtggttggggtgcagctttgctttcatacattttagggtacagaagttgcaggcaaagatatcaatcaatacatgtaaggtatacattggtgtgacccagaaagtgagaggcttccaggtcataggtggattcaaagatttcctgattggcaattggttgaaagagctgagctttgcctaaaaagtttgaggtcggcagaaagagatgcttgagttaagacaaggggatcgtggaagccaaggtttttgttatgtagatgaagcctccagrtagcaggcttcagagagactagatggcgaatgtctcttatgggaccttaaaatgtgtcagactctctgtaaaagacctattaagggcagggaattctctacagaatgcaaatttcccccttaagagacagctttgcagggccatttcaaaatatgtcagagaaatatattttggggtaaagtacttttatttttttc

SEQ ID NO: 751211 - DNA, 582 bp, Homo sapiens
taacccaaaaaatatcagagacaggtctcaatcaatgtagaggcttattttgctatggttaagggccatggcctgtgacacagtctcaagaggtcctgagaacatgtgtccaaggtggttggggtgcagctttgctttcatacattttagggtacagaagttgcaggcaaagatatcaatcaatacatgtaaggtatacattggtgtgacccagaaagtgagaggcttccaggtcataggtggattcaaagatttcctgattggcaattggttgaaagagctgagctttgcctaaaaagtttgaggtcggcagaaagagatgcttgagttaagacaaggggatcgtggaagccaaggtttttgttatgtagatgaagcctccaggtagcaggcttcagagagactagatggcraatgtctcttatgggaccttaaaatgtgtcagactctctgtaaaagacctattaagggcagggaattctctacagaatgcaaatttcccccttaagagacagctttgcagggccatttcaaaatatgtcagagaaatatattttggggtaaagtacttttatttttttc

SEQ ID NO: 751212 - DNA, 385 bp, Homo sapiens
ggtgctcacgagctatggccatgaaggcccagaatggccgtggcctcagcattcctctctctgcatcagttacctcttggccaattgcctaggggcccccccactcccacagtgcagtagcctgctcaccccaaggacaggtcagacccagggccagcctgaccctcagcgtcttcctctggatgcrttaccctccacctccttccactcttcctcctccttctccagggacctcacacttgggcactgcttggtcttcaggtccggaggttgggctggcggagaagccaggcccgggaagtcctaggtgcttgggaattattcaggagcaggaaaggcctttgtggggttcctgcagccccactccagtgacttttcagggggc

SEQ ID NO: 751213 - DNA, 567 bp, Homo sapiens
tttattgttttaatatataaattgattcctttaaaaaacaagccacaaatctcatggcgggcccttttacgtgcatgagctctaattacttgattttttggaagcgcctgaaaaaattatatttctaattcctctaggcctgtcatgaaagagccttttataactgccgggctgtccctcctgggaatcagacgctgcggtgcagaggaggatgacgacaggaaccgctcttctcagaaaagggccttgcagccctgagcgtttccagctcaaacagaatggatgcgtccgctaatgatgtctgtcrctatttgcatcgtggatgcatttccagggttcgcaggccctggagaaggaggaaaagcttcccaccctgtcatgctcaggatcatgtcgtcatcgtccacagctgagtcacatcgcccggagcagatgtgactggcccccaccccctctgtgtgtacagagagatgctctcagagggtcgggaagccagagcctctgagcccagcttggagcatggcaagccacgctggctggaaacccctggacacagagacttgctga

SEQ ID NO: 751214 - DNA, 625 bp, Homo sapiens
agtgcagctaagtttataaactatcccataagattactgcccttggacatgagctcactgatttaagatgtgaggcaggtacctggattggaagtaatatttttttggaatgcttccttggcaatgaaaaggccaccctttaattaaacaatggtcaggtagctgrctagttcccttagggtatcacgtttgaccaccatttctggcaaattggacattcagtagtagcagcagttaactaagctcatgtataatgatcattcttgttaccataacaactttgtttataaacctgaagtcccgggccaactgtggaaggagtatgactcatattcacattcagcttatacatctggattaagcctcctcttatgtggagtagagtgtattctggttagaatccacatgggatacaaatatttttatgatttggacttttttcaagtattccatccacatactcctttccaagcttacttgtctctaattcttcttcttcttcttcttttttttccaattctcaatctccctctttcctaatttatactaacaattgcccaactacccaaaataagagttaattcttacatttcagtgggtggacaagaaaattgttctgctcaat

SEQ ID NO: 751215 - DNA, 613 bp, Homo sapiens
attacagctcacaaacgcagtgcagaccaaagtgtgagcaacagcaatatttactgcaaagagcgaaagaacaaacctaccatagtgaggaaggagaccccagcaggttggcactgctacctcaggcagcctgcttttattctggtatctggccccacccacatcctgctaattggtccatcttacagagagctgattggcccattttacagagagctgattggtccattttgacagggtgctgattggtgcatttacaaaccttgagctaggcacagactgctgatgggtgcatttacaatcctttagctagacacaaaagttctccaactccccactagatcagctagacgaagagcactgattggtgcrtttataaaccttgagctagacacagggtgctgattggtgcatttacaatcctttagctagacaaaagttctccaagtccccactagattagctagacacagagcagtgattggtacgtttacaaacctttagctaaacacagagtgctgattggtgcatttacaatcctccagctagacataaaagttctccaagtccccactcaactcaggagcccagctggcttcacctaatggatccc

SEQ ID NO: 751216 - DNA, 615 bp, Homo sapiens
tattacattgtacacatgggattttctcaatgcctactaattaaaatttcttttaaatacaagacacaaaaaatctttatttcagaaggaaatataaactctcaaattataaaggattaattttaaacattaaaaaattccctactgtagactgaatggttgctgtcttcgataagtgcaaagaataataatacaatgtaatatattaaattgatcaatacaaaattgctgtgtttgcagataaaagacattcatatactagcaatacatacgattcmatttataaaaagcacctagcagagctcctagctaatatgtggtacaataaatatttgttgaatttaattgggtagaactgcactgttgaatatggtagccattagccacaggtagctattgtgtacttgaaatttgacgagtgtgactgacaaaacaaattttaaattttgttaaattaaaaatttagtttttaacttaaagctgataatctatagttacagaaaaatgtataagtatgtaacaatttggatatgtgaatctatttttcagctacaaattttgaggaagtctatatacagatcaaatatttccattgaaaatatagtgtcagagttg

SEQ ID NO: 751217 - DNA, 621 bp, Homo sapiens
aactgtgaccaatgacttaccaaatgtatgtaatttatagatttgggacactgtgtgcaagaaaggtcacattccctgtgtaaatttagcatggtcgcatcttctgtctcagaatcctgactgcagccaacaattattttagtyattggaggagagttaactaatattaaccaataattgtttgtgctgcatgactcaaataggatgatgagccaatcagggagaaggatcaggtggctgtagagtttagagagtttaaggtggcagccacaatgagagagagtgattcaatgtagacacagaaataagaagagatagtcatatatggaacacttattacatactataagcatcattctaagcgctttacgtctctaatgtcccaacagctttattaggaagcttctgttttgattcacatttttcagatgaggaaaataaaacttatttaaactactagtttatctaaagtcatacagttagtaaatagtagaacaagattttggacttcggtagtctgactcgaggcccatattcttgggcagtgagagaagctgagatgtgatgagcagccagatactacaaacttcagttttcagatctggttttcttaaaggctgt

SEQ ID NO: 751218 - DNA, 621 bp, Homo sapiens
aactgtgaccaatgacttaccaaatgtatgtaatttatagatttgggacactgtgtgcaagaaaggtcacattccctgtgtaaatttagcatggtcgcatcttctgtctcagaatcctgactgcagccaacaattattttagtcattggaggagagttaactaatattaaccaataattgtttgtgctgcatgactcaaataggatgatgagccaatcagggagaaggatcaggtggctgtagagtttagagagtttaaggtggcagccacartgagagagagtgattcaatgtagacacagaaataagaagagatagtcatatatggaacacttattacatactataagcatcattctaagcgctttacgtctctaatgtcccaacagctttattaggaagcttctgttttgattcacatttttcagatgaggaaaataaaacttatttaaactactagtttatctaaagtcatacagttagtaaatagtagaacaagattttggacttcggtagtctgactcgaggcccatattcttgggcagtgagagaagctgagatgtgatgagcagccagatactacaaacttcagttttcagatctggttttcttaaaggctgt

SEQ ID NO: 751219 - DNA, 604 bp, Homo sapiens
gcaatggctaaattgagctaactgatatatgtattacctcacattctcgtttttgtggtgagaacacttaaaatctaatctctacgaattttaagaatacgacatgaggggacttcaaagagtttgtgaaaaatgaaatcaaacgataaaaattaaagatataaactttatttctcaatataagttctatcaagtttaagacacttttgtagtgatgataccagccgtttagtccatcccattagaactgagagtcctgggaatttaaccatatcgatgcagtcttttttttacattaactgrtgaaaaataagtgcattttaaagattttttaagattaggacaaaaataagccaaaggagccaaatcagcactgtaaggtgaatgactaatgagcggaatcagcaggaacattgttatggtagagaaggactctctggtgaagatttcctgggcattttttggttaaagcttagctaactttctcaaaaccctctcataataagcagatgttatcattttttggcctttcaggaagtcaacaagcaaaatgccttaagcatctctaaaattgttgctatgacctttgctcttgaccagtccc

SEQ ID NO: 751220 - DNA, 582 bp, Homo sapiens
ataatagatgagagaaatgaggcccaaggaggtttctaaacacctacatgacagagctgaaatttgaaacagacatcctggtgccagaactcatccttctaaatgccataatgtatcatttttcatatgacctgaaggattaggtacaacctaattaaatgtgatccaataagtaatttttatgacttaattgaatataggtattataaacatgaaaaacattatttgttattataaacaatgttaattaaatgattgtctacattctaccaatttgatgggggattccttcacagaatgttatggtttcccatgtctaatcatgtttcaaataaaggcatcacttaattagttgtagaaaaacagttaaacagaaggttacactgacaatttttaaaaattaacacatggtaaattactggaacgttttaatttgtgctatgacatactatgtatggtaatgtggacataccatgaagtatataataaatggtttaaattactaagggaataaaatgaaacataatttaaagtttacatttatattgagttatatatcartgtgtattactatataggttg

SEQ ID NO: 751221 - DNA, 641 bp, Homo sapiens
agcgggaggatcccttgaggccaggcgtttaagaccagcctgggcaaaatagtgagactctgtctctactaaaaataaaaattataaaattagtcaggcatggtgacatgtgcctgcagtcccagctgtccaacaaggagaggaaggaggactgctggagcccaggagtttgtgcctgcagtgagctatgattgtgccactgcactctaaactggttggcagagaaatatatatatattttttttgtctcaaaaaaaattgcttcatcaactgttaaatggaaataataatatttacttcacagtgtagattaaataaaataagcatgttaagtactgagcacactacctagcatatggtacctggaatattaattaatagtaataattaggattattaacmatgatacgctgactacaaatgggattggcagtcacaaagcgttcctgcaggaggtggaaattaagctgctggaccttcttttttttttttttttttgagacagagtctcactctgttgcccaggttggagtgcaatggcgcgatctcagttgactgcaacctccacttcccgggttcaagccattctcctgcctcagcctcccgagtagctgggactacaggcacatgccaccacccct

SEQ ID NO: 751222 - DNA, 564 bp, Homo sapiens
ggtgtgtgcctggttttaaggtgttacctgggtcaaggtgggtatattctagagatatataccaatagagttttatgttccatattggacttcttaaaaaaaagatctgaaaagttttgcataatgttttctaaattctttccattaaaaatattaaaaactatgaattacaaaaacctctaaagagaaaataaacaaaaataatactatatacaactctgcattaacacagtgactgtgaacattttaattcatttctatctatatttttcaatatattttcaagagttcagtccattgcatgtgtgtgtataggcacaygtatacacacacacatatatactcaagcacaaacatgtagatacacaaatacatttataactttgaatgtcaccttcttttaacaaattaacattatatcaaacattttcatgttttttgtatttgtcatagtcttcatttttaatagctgtatctggtttcattgattgaacatgctataatttatttattcagtgagcaattgtaggggatgtacaaatatttttctttattgggacactt

SEQ ID NO: 751223 - DNA, 564 bp, Homo sapiens
ggtgtgtgcctggttttaaggtgttacctgggtcaaggtgggtatattctagagatatataccaatagagttttatgttccatattggacttcttaaaaaaaagatctgaaaagttttgcataatgttttctaaattctttccattaaaaatattaaaaactatgaattacaaaaacctctaaagagaaaataaacaaaaataatactatatacaactctgcattaacacagtgactgtgaacattttaattcatttctatctatatttttcaatatattttcaagagttcagtccattgcatgtgtgtgtataggcacatgtatacacacacacatatatwctcaagcacaaacatgtagatacacaaatacatttataactttgaatgtcaccttcttttaacaaattaacattatatcaaacattttcatgttttttgtatttgtcatagtcttcatttttaatagctgtatctggtttcattgattgaacatgctataatttatttattcagtgagcaattgtaggggatgtacaaatatttttctttattgggacactt

SEQ ID NO: 751224 - DNA, 646 bp, Homo sapiens
agctgattaagagtattacaaagagatggctaaggtcacggttttaatctacttaatggcctgtttactttgcttagctctgttccacgtgggccacaagtacacctctctcaaacttacatttctaaattaaggtggaccgagtaataaagcataagcgaaaccatcactgatgactggaagacacaacaggaactgctcaccatggaaagtgagcatctccaccaacacagaacttaaaagacatttcatttagtcttttttttttttttttttttttgagacggagtctcactctgttgcccaggttggagtgcagtagcacgatcttggctcactgcaacctctgcctcccgggttcaagtgattctcctgcgtcagcctcttgagtaactgggattacagrggcacaccaccatgcccggctaaattttgtatttttagtagagatagggtttcacaccatgttggccaggctggcctcaaactcctgacatcaagtgatccacctgccttggcctcctaaagtgctgggattacaggcgtgagccattgcacctggctcatttagttttttcattcattctttccatatggccagtgctgacatcacagaaagaaaccagatacgccctccacccagaag

SEQ ID NO: 751225 - DNA, 579 bp, Homo sapiens
gcattactgtagaacaccgcaggctttacaaacactgcacacttaggctatgctaaatttataaaatatttttcttcaatagtaaattagccttagcttactgtaacttttactttataaacttaaaaatttttaaactttttaactcttgtactcatacttagcttaaaacacaaacacatatagctgtacatattttctttcatatccttattcttataagcttttacgatttcaaacatttcttatttttaaaacttttttgttaaaaatgaacacacaccacatacattagctgaggcctccagagagtcaggatgatcaatgtcactgtcttctacctccacctcctgtcccactggaaggtcttcaggggaattaacaggcatggagcagtcacctcctatgacaacaatgccttctcatggaatacytcctgaaggacctgtctggggctgttttacagttaccttttttttgttgtttttgttttttgaataagtagaaggagtatactctaaagtaatgattaaaagggtggtatagtgaatgtataagccagtaacatatttgttatcg

SEQ ID NO: 751226 - DNA, 594 bp, Homo sapiens
cctgggctcaagcagtcctcctgcctcagccaccccaattagctaggactacaggtgtgtgctaccacacttggctaatttttttttttttaatttttttagagttgggtctcactgtgttgttcaggctggccttgaacttctggcctcaggataccctccaacctcagcctcccaaagtgytaggattacaggcatgtgctaccacagccagcttgtatcaacaattttaaaaacaattaatttatcaaagatttacttaagtcacaagaactgaaaaaacatttgggttaattactacatattttatatgagcacttgtttacttaaactaatcagaataaatttttttagggatttctggctgactatatgagattttattatgtagacacagcatacaacatagtatatatatataatataagcatatctacacagatatacatacttataaataaattcttatggcttttgttttagagttttggtcatgaaatagtaaaacactcaccaatttataaaaaacagtaggatccagattatctttctgacaaaatggaataaggccaaacttaatgttcttttttaaaa

SEQ ID NO: 751227 - DNA, 592 bp, Homo sapiens
acaaaactaagagttggtttttgaaaaactaaacaaaattgacaaacccttagcaagactaagaaaaaaagagatactcaaataaataaaacaaaaaatgaaagaggagacattacaatagatgcctcagaaataaaagggatcataacggactattacgaataatcacacaccaaaacactggaaaacccagaagaaatggatagagtctggaaatatacaacctgccaaaactgaatcatgaagaaatagaaagcccaaacagaccaatagcaaatatggagatkgaatcagtaatcaaacagctctcaacaaagaaaagcacaggaccagatggtttcatgggtgaattctattaatcattaaaaaaaagaattaataccaatctttcttaaaccttccaaaaaatagaagagagaattcttccaaactcacattatgaggccagcatcactctgataccaaagccaaagacaccagaagaaagaaaagtacaggtgagtatctctgatgaacatagatttttaaatcctccataaaacactagaaagccaaactcaacaacatactaaaagtattatatactgtggct

SEQ ID NO: 751228 - DNA, 496 bp, Homo sapiens
cagtgcttgagatattttgcagaccctgcacttgatggatcagctggctccacccagattgataaactggctcatctgatcttgtagcccctgcccatgaactgactcactgcaagaagacagcttcaactccctatgatttcatctctgacctgaccaatcagcactcctggctcactgggttctccccacccactaggttgtccttaaaaattctgctcccaaaatgctcggggagactgatttgagtaataaaactctggtttctgcacagctggctctgtgtgaattactccttctctattgcaattcccctgtcttgagaaatcrgctctgtctaggcagtgggcaaggtgaacccattgggtgcttacaccatcatcttcagttttttctttgtaatcatgtttacattccacaaatgttaggaacttaacactttagccagaactctaaagttaaatacacgggtattttgttaatcagaggacacggt

SEQ ID NO: 751229 - DNA, 617 bp, Homo sapiens
ccgggggcagtgggtcacacctgcaatcccagcactttgggaggcagaggcaggcagatcacctgaggtcaggagtttgagatcagcctggcccaacatggtaaaaccccgtctctactagaaatataacaaaaattagccaggcatgtgccaccacgcctgtagtcccaagctactcaggaggctgaggcaggagaattgcttgaacctgggagatggaggctgcagtgagctgacatcacgccactgcactccagccttggtgacagagcaagactccgtcttgggggccggtgtrggggaatagttgggccaggcttcctagcactttggtaggccaaggcaggaggatcacttgagcccagcagttcgagaccagcatgggcaacatggtgaggccctatctctacaaaacacttctaaaacaaaatttagaaaattagccaggtgtggtggtgcatgcctgtagtcccagctactcaaaaggctgaagcaggaggattgattaagtccagaaggtcaaggttgcagtgagccatgaccatgccactgcactccagcttgatcaacagagcaaaactgtctcaaaaaaaaaacaaaaaaaaaaaaaacaagag

SEQ ID NO: 751230 - DNA, 609 bp, Homo sapiens
aaatgggagaaatatcgctgaattctttttctcagcatggaacatcccctgagaaagagaatgcacacctgggggtgggtctctgaactggcccccctcccccgggggcgtggtcgtctcttatggtcgaggctgcagagatgaaataaactccagtctcccatagcgctcccaggcttattaggaggargaaattcccgcctaataaattttggtcagaccggttgctctcaaaccctgtctcctgataagatgttatcaatgacaatggtgcccaaaacttcattagcaattttaattttgccttggtcctgtggtcctgtgatctcgccctgcctccacttgccttgtgatattctattaccctgttaagtacttgatgtctgtcacccacacctattcgcacactccctccccttttgaaaatccctaataaaaacttgctggtttttgtggcttgtggggcatcacggatcctaccaacgtgtgatgtctcccccggacacccagctttacaatttctctcttttgtactctgtccctttatttctcaagccggccgacgcttaggaaaaatagaaaagaacctatgtgattactggggcaggt

SEQ ID NO: 751231 - DNA, 495 bp, Homo sapiens
agaagaaggtggctgccctcaccatagggcatgagtcccaactagagcttaaatcgcagtggtaactgtgagcctgggccctgggtggggcaagagtggattctccatttgtgattagacaagagaaggggagagagagggacgagaccctgaacttcagatgccactatagccctccctcccattactctytgtgtcctgttgagctcagtcttagccaggcagcagggacccaagctgtccagcctgtacctcctcagaaacaggcttcttctgtggggccccaagaggccaagtcaaagacctgggcagaaaggggctgccccaagcttaaagtccagattcctagactcagagctgggctactgctgtggatttgtcacttctctgggcctctgtttccacaccaggaaaatccacaccaagccattgtgaaagttaagatgtaaagtgctatggaaatgtaaggtgggttccttaattattctatgacaa

SEQ ID NO: 751232 - DNA, 625 bp, Homo sapiens
gtgtcgggctgcaggacgatcagatctttcccttcccaggaagccatatttcagactatcacctggggagaaaccttggacaatacctggctttcctaggcagaggttcctgcagccttcctcagtgttttgtgtccctgggtacttgagattagggagtggtgatgacttttaacaagtatgctgccttcaagcatttgtttaacaaagcacatcctgcatagccctaaatccattaaaccttgagtcaacacagcacatgtttctgccagcacagcatctcaaggcagaagaatttttcttagtacagaacaaaatggagtctcttatgtctacttctttctatgtagaaacagtaacagtctgatctctctttcttttgcccacaagcctgaccaacacggagaaaccccatctccactaaaaatacaaaattagccaggcgtggtagtgyatgcctgtaatcccagctacttgggaggctgaggcaggagaatcgcttgcacccaggaggcagaggttgtggtgagccgagattgtgccaatgcactccagcctgggcaacaagagcaaaactctgtctcaaaaaacaaaaagaaaagaaaaaaaattggaaaaacaacaa

SEQ ID NO: 751233 - DNA, 657 bp, Homo sapiens
gcaagagcattacaattatcgccttctctaagaacatactgtgacctgaatcaggtaatttaatagttcacaatgtgagttatttctgtggtagcttattttacatgctttggaatatatttaagacaagaatttgtttttcagattatcctaacctatattattatttagaattctaaattgatgacaatataggttargatagtctaagttataataaaataatgtatgaaatctaagacaaacattgtaaaatttatatgaccttttgttttttttgaccagttagggaaatggtgcaattaagtctttgtaacacttgatctgagagcaagtaaggtgacattgaggtgaaagtttaggtttctaggacacccgattaaaaaaatgaggacaaataagggtagcaaactgaataggactctattttgttcacataaacaatttaggtgtggctgtcaactcttaacgttaaaatttaattcaaaatcctagtcaagtttttctcttccaattccattccaaattgtgcaagtcaagagacagcttcagccatctcctatcatctaatcatgtgcctgaggggtagaattgggcaaaaaaacaaaagtttcttatactttgacaggacaagattaatcacagatctttgctgac

SEQ ID NO: 751234 - DNA, 616 bp, Homo sapiens
tgacaatgtgtctgggcaaagatctttttgcgatgaatttcccaggtcttctttgtgcttcctgtatttggatatctaggtctctagcaaggcctggggagttttccttgattattcccccaaatacattttccaagctttgtgcttcttgtatttggatgtccaggtctctagcaaggctggggaagttttcctcaattatttccccaaatatgttttcctgaggaagaagagaagtctatggtttggtcgtttaasgtaatcccagacttcttggaggctttgttcatattttcttttttccttgtctttgttggattaggttaattcgaagaccttgttttcgagctctgaatttctttcttctacttgttcaattccattgctgaggctttccagaacatttcgcatttctaaaagtgtgtccaaagtttcctcaatttttgattgttttaagctatttccttgaatatttctcccttcacttcttatattgttttttggatttccttgcattgggcttcgcctttctccctgattagcttaataactaatcttctgaattatttttcaggtaaatccaggactacttcttggtttggatccactgctggtg

SEQ ID NO: 751235 - DNA, 488 bp, Homo sapiens
ccgtgggccactgcgcctgctgcattgattttcatatgtcattatccttgcattttaaaaataaatcccactagataaaggtgtataatctttttatcataaatttgtttaacatcattgttgccttggcatccatttttaggcctaacataagttgtttaaaactgagttataccacctcatctttggcctagttaaaactttccctccccatgtggctgtttgcagtgtgggtcacttgttctacatctcactgacccaacatatcccayagctgcttaccacaataaaaccagaatcaacaccagagtcatgcaaataatttcccccctttacacatattttctttaaattagccagttcacaacccctgctggaaagccttaagaggtaatgcctgtggaccttaataaaggcagagttccacagattcactcttatctgtgattaacaaaatgctgcttttatttcatgtgttttgttttgct

SEQ ID NO: 751236 - DNA, 600 bp, Homo sapiens
acatatacagtgagtgtgtgtatgtatggaaaaatatcttgaagaatatatacactaagttgtctagcagaatgtgactttatttttatgtctatactaattttctatactggttctgcaataaaattttgtaaaataaattacgtaacacaattgatagatttacattcaattcaagttttaatgtttcataatttcaatgacagtgcttgtaattcattcaacacttacattttaagtttctgtgaaatgacagtgctttatccctttatttrctagatagagggcctggatattttatttctattaaagacaatcgaggaattctataaaagtgaagatggagaaaatctggaaatcctctgtccagttcaagatcaagcctgtgtagctaaatttgaagatggaatttggtaccgagcaaaagttatcggtaggagaatgcatgctgtttctacagggagatgtcatacttcaaaactaatatcatttgagttggtaccaattcaatcttggaagtaatgttatttgatcttatcatttgctctgccatctgtctttagaaaagctagtgataatgttgaaaggtgaatctatctt

SEQ ID NO: 751237 - DNA, 574 bp, Homo sapiens
ttaatgtgagaacaataatcagaaaagtcattttgtccatattatattaaaaattttgaaataaatttttaaaataatcaacttacttaaaatataaaatacttaatctttgccatattttaaaattctgtaactaaactgataatgcaattataattgataagtgacaccaaatgggagatgtcaatacttaatttttcccttctccaaaaataggatttaactatttgagagaaaattgattttatccagatgtttctcttaagtgaaaaagcttcgagaatacaatgtcaaggcagcttgacatatctcctcaacctcttttgttgttgacagtacataataggttgtatctttaaccttaaaagcatagtcaagcaaaaaccagaaaaatatagatctttcaaacaaagaaagtgtwcaataataaaggctagctattgtactaaatagtcacatttctcactttcaacacgaacaatacctttcttcaatattagccacttctgaggaatcatcatgtttttgtaagttcttatcatttgcttcctgaatctgttctgtcactttctcc

SEQ ID NO: 751238 - DNA, 491 bp, Homo sapiens
tttttttaattaaaagtaatgtatatcacagattttacaacactcaaggaattctttaatataattaagagaaactacaaaactccaattaagacacttgaggccgggtgtggtggctcacacctgtaatcccagcactttgggaggccaaggcrggagaatcacttgaggccaggaattcgagcccagcctggccaacgtggcgaaaccccgtctctacaaaaaaaaaaaaaaaaaaaaaaaaaaaaattagccaggcgtggtggcacatgcctgtaatcccagctacctgggaggctgagagcaagcagaggttgcagtaagccaagatggtgccactggactccaacctaagtgacagaggaagaccctgtctcaaaaataaaataaaataaaataaagacacttgacattcttcaaaaggttaatgtcatgaggaaaaaagtgtggggttttctagagattaaaaaggctaaagagttgtaagaatc

SEQ ID NO: 751239 - DNA, 624 bp, Homo sapiens
ttctttatccactcattgattgatgggcatttgggttggttccacgattttgcaattgtgaattgtgctgctataaacatgcgtgtgcaagtgtctttttcgaataatgacttcttttcctctgggtagatatctagcagtgggaaggctggatcaaatggtagttctacttttagttctttaaggaatctccacactgttttccatagtaactgtactagtttacaatcctgccagcagtgtagaagtgttccctgttcaccccacgcatgcawctattgttttttgattttttgactatggccatttctgcaggagtgaggaggtggcatcgcattgtagttttgatttgcatttccctgatgattagtgatgttgagcattttttcatacctttgttggccatttgtatatctttttttgagaactgtctatccatgtccttagcccactttttggtatttttttttcttactgatttgtttgaggtcattgtagattctgggtattagtcctttgtcagatgtacagattgtgaagattttctcccactctgtgggttgtctgtttactctgctgactgttccttttgccatgcaaaagctctttagttcaattaggtcc

SEQ ID NO: 751240 - DNA, 565 bp, Homo sapiens
ccgggcattgtggctcacacttgtaatcccaggactttgggtagctgaggtgggcagatcacaaggtcaggagttcgagaccagcctgaccaacatggtgaaaccccatctctactaaaaatacaaaaattagccggtgtggtggcacacacctgcagtcccagctactcaggaggctgaggcaggagaatggcatgaacccgggaggcggagcctacaatgagcygagatcgcaccactgcactccagcctgggcgacagagcgagactttgtctcaaaaaaaaaaaaaaaaagaaaagaaaagaaaccaagtgtagcactctagctgaaacaaaaaaggaagtggtgaagggtgcagactttaataataataataacaattttattatattatatattgcaaaatattataattgttatatttatgttataaatagaatgtattataatatttacatttatattatagatatgatatatagtcattgtatttaaaatagtatatgtattaaatatattattatatttaatataataattataataactaacctttattcagca

SEQ ID NO: 751241 - DNA, 642 bp, Homo sapiens
ggcagcaaagtaagtgctccatcatattagccattgtgattctaatgaagcttttgaagctgaggttagaacacgccaatttggtgtcagcataatcggagccctggattcatattataaagacctacatggagcctcagaaaggtgagcattagacaaagaacacctggggcagtcccctgagagaatatttaatacttgaggaagcttctgggtgaggacttattggtcccatcagcatccacctccacccccagcagcagcagcaattcagaaccaagaatgaaataaatactaggctcagtgttaacaaaggtacaagaaaatgtaaaaagrggccaggcgcagtggctcacgcctataatcccagcactttgggaggccgaggcaggtggatcacctgaggtcaggagttcaagatcagcctggccaacatggtgaaaccccatctctacaaaaatacaaaaattagctgggcatggtggtggcgcctgtaatcccagctcctcaggaggctgaggcaggagaatcgtttgaacccaggaggctgatgttgcagtgagccaagatcacgccattgcactccagcctgggcgaaagaccgagattccttctcaaaaaaaaaaaaaaaaagctaggtgt

SEQ ID NO: 751242 - DNA, 630 bp, Homo sapiens
tccaggattatgcaggatatgtacactagggacagggaatcttggtagccatcttatatttctgcccaccacaatattatatgtaatagtttttgtattttcagaatttgtttatttccactttcttcttattataaataatgttttgggtgaaatgacattttgtaatttgcattttctaatgaagttaaacattaattttcatatgttttttgaccatgtrtatttcttcttatgtgaattattccttgctgttcttttttacagtattttttctaattgatatataatgctttttcaatagtaaggttactaagcctttgctgatttaaaaaaaattgtttattgaaaggagtcacactatgttgcccagactagtcaataagcaatcctcccactttggccttccagagcactggaattacagttgtaagtcattgtgcctggccccagctgctaattttatcacaaatattttacctttgcttactttttgatgcacaaatattttaaacatatatatacacaattctacctgtatctttctttttctttctgcctttggagtcatttagaaagtccttttgtaccccaaaattttagaagtattgagttacatttctgtgttac

SEQ ID NO: 751243 - DNA, 630 bp, Homo sapiens
tccaggattatgcaggatatgtacactagggacagggaatcttggtagccatcttatatttctgcccaccacaatattatatgtaatagtttttgtattttcagaatttgtttatttccactttcttcttattataaataatgttttgggtgaaatgacattttgtaatttgcattttctaatgaagttaaacattaattttcatatgttttttgaccatgtatatttcttcttatgtgaattattccttgctgttcttttttacagtattttttctaattgatatataatgctttttcaatagtaaggttactaagcctttgctgatttaaaaaaaattgtttatwgaaaggagtcacactatgttgcccagactagtcaataagcaatcctcccactttggccttccagagcactggaattacagttgtaagtcattgtgcctggccccagctgctaattttatcacaaatattttacctttgcttactttttgatgcacaaatattttaaacatatatatacacaattctacctgtatctttctttttctttctgcctttggagtcatttagaaagtccttttgtaccccaaaattttagaagtattgagttacatttctgtgttac

SEQ ID NO: 751244 - DNA, 630 bp, Homo sapiens
tccaggattatgcaggatatgtacactagggacagggaatcttggtagccatcttatatttctgcccaccacaatattatatgtaatagtttttgtattttcagaatttgtttatttccactttcttcttattataaataatgttttgggtgaaatgacattttgtaatttgcattttctaatgaagttaaacattaattttcatatgttttttgaccatgtatatttcttcttatgtgaattattccttgctgttcttttttacagtattttttctaattgatatataatgctttttcaatagtaaggttactaagcctttgctgatttaaaaaaaattgtttattgaaaggagtcwcactatgttgcccagactagtcaataagcaatcctcccactttggccttccagagcactggaattacagttgtaagtcattgtgcctggccccagctgctaattttatcacaaatattttacctttgcttactttttgatgcacaaatattttaaacatatatatacacaattctacctgtatctttctttttctttctgcctttggagtcatttagaaagtccttttgtaccccaaaattttagaagtattgagttacatttctgtgttac

SEQ ID NO: 751245 - DNA, 630 bp, Homo sapiens
tccaggattatgcaggatatgtacactagggacagggaatcttggtagccatcttatatttctgcccaccacaatattatatgtaatagtttttgtattttcagaatttgtttatttccactttcttcttattataaataatgttttgggtgaaatgacattttgtaatttgcattttctaatgaagttaaacattaattttcatatgttttttgaccatgtatatttcttcttatgtgaattattccttgctgttcttttttacagtattttttctaattgatatataatgctttttcaatagtaaggttactaagcctttgctgatttaaaaaaaattgtttattgaaaggagtcacactatgttgcccagactartcaataagcaatcctcccactttggccttccagagcactggaattacagttgtaagtcattgtgcctggccccagctgctaattttatcacaaatattttacctttgcttactttttgatgcacaaatattttaaacatatatatacacaattctacctgtatctttctttttctttctgcctttggagtcatttagaaagtccttttgtaccccaaaattttagaagtattgagttacatttctgtgttac

SEQ ID NO: 751246 - DNA, 666 bp, Homo sapiens
  misc_feature 420: n = A,T,C or G
tgattttaacatctattcatctaaaccattaagtaatcaaaaatgaattaaatagaggaaaatacaactgactattcatacacagagaagtgtagactcttcaatggaaaacatgttttttaagtgcccaaggaatagttataaaattgctgagttttttaattaaacaactaatatttaagtattaggctcaagagaataatttagtcaaagtccttaaatatgagaggctaagtttgataaagattggaaatgcactgaaaagcccaagtaagaaaattattttttcattttagaaatatagggccaataatatttcccagctatgaggtgtgtgtatgtgtgtgtgtgacgtgtttgtgttattgagcttgttaacaataagttatcaaaattattagttgggcagcacccagattnttaggaatattgccccttgctgggcttcccaagaaaacsttggatgcttttggtaggaaaagttaggactcactaaatctggcacagaaaaggtgaatcaacagtggtcgtgattctagttttgaccgagctgcatataacagtgtaggcatctgatgtacgatctatgtattaggttagaaaatttcccttacaactgccattgctcagcacaaattatagagaggttaaacaaggaataaatgg

SEQ ID NO: 751247 - DNA, 318 bp, Homo sapiens
ctggatcccgactcttatgatatcaggtgaaaccctggagataaaataccacacaggactggccacctcagggttaggagtgtatggctgacttctcatttatttttattttaatttttttatgagacaaggtcttgctctgtacccaggctggagtgcagtggygtgtgatcctggtgcactgcagcctccaactcctgggctcaagtgaccctccgacctcagcctcctgagtagctgggatgacaggcgcatgccaccacgcctggctgattttttgtagagataaggtctcactatgttgtctaacctagtctt

SEQ ID NO: 751248 - DNA, 620 bp, Homo sapiens
tagcaatgcagccaacatcagagcacagtgtataaagcaaacattaatagacttaaaaggagagatagactgcaacacaataatagtaggggactttaacagcccactctcagtaatggacatattatccagacagaaaatcaacaatgaaccagcagagttaaagtgcacaccaaatctaataggcctctctgacatttatagaaatttcacccaaatttctatacacgcagaatacatgttattttcattaaaacacgggacattctccaaaatagatgatatcttaggtcataaaacaagtctgagaacatttttaaaaaaacagaggtcatatcagtaatcttttctgaacataatgaaatcaaactagaaatcaataacaaaaggaacctcggagaatacatgaatacatggaaattaaacaaaatgcccccaaattacgaatggatcaataaagaaattawgaagaaaatcaaaagtttcttaaaacacatgaaaatggaaatacaaaataccaaaatctgtgagatccagcaaaagcagtcctaagagggaagttcacagtgataaatggctgtatcataaaagcagaaagaggccaagcacggtggctcatg

SEQ ID NO: 751249 - DNA, 615 bp, Homo sapiens
acagtgattacttgtacgctcattaacatatggtgaagcaaatctggccattagcagtttatgccttatgatttaggatctgatgttctacatacaactttgtgaagtatgacatctttatttcattaatttattcaactttctaattatatacttactttgagtgcaaattaagccatcagatatgttcyggtgctttgatttatacagaacatggtgtattttatggatattgagactaatttcacttgttttcaacatagatttacgagcaacacgctagggtgttggggttacagcaatgatgaagacaatgtgtacaatctttgttttccttgagcttacgagtccaatagagacaaataaactgaggttacaaaatgacatactttgccctaacaggcaaagtatagggcacagagaacaaacactacacctacattctggagtcaataaaggattcctagtagaactgatatctaatctgatacctgaaagataaattattgggaataaagcaggatgggggatattcccaccagcaaaagagaacatgaaagggaaaagcagagcagtctactagtaatttaaatttgtgatgatggtggcttgaac

SEQ ID NO: 751250 - DNA, 615 bp, Homo sapiens
acagtgattacttgtacgctcattaacatatggtgaagcaaatctggccattagcagtttatgccttatgatttaggatctgatgttctacatacaactttgtgaagtatgacatctttatttcattaatttattcaactttctaattatatacttactttgagtgcaaattaagccatcagatatgttctggtgctttgatttatacagaacatggtgtattttatggatattgagactaatttcacttgttttcaacatagatttacgagcaacacgctagggtgttggggttacagcaatgatgaagacaatgtgtacaatctttgttttccttgagcttacgagtccaatagagacaaataaactgaggttacaaaatgayatactttgccctaacaggcaaagtatagggcacagagaacaaacactacacctacattctggagtcaataaaggattcctagtagaactgatatctaatctgatacctgaaagataaattattgggaataaagcaggatgggggatattcccaccagcaaaagagaacatgaaagggaaaagcagagcagtctactagtaatttaaatttgtgatgatggtggcttgaac

SEQ ID NO: 751251 - DNA, 588 bp, Homo sapiens
tgttaaacaacatgctaaatgtgacatgtcaaccctcactctaaactttgcctgttcagagcatcagatgaagacttcattgggttttatagtggctttctgattttcggtagtccattgaagaaggtagttaagtttgaaagttgttgtgtactgttaatgactgtctgcccatgttctgcctgaaataccacgactgtttmtggaaagtatctttaataaagctggatacagtttggcttggaaaaaaaaaaaagagtggttgatttgcacagtgggattgcggggacttttttttttcttcttcatacttgtttgtattttccaaatcttccctaaggtcatttattacttttagaatttaaaaattattttataaaaatatgtaaagctctggttttttaatgactatgtaatgactatgtctactcaaaagtatcttcaaaatgacctatttaaaaatctatcccctcaaaacatcctgataaatcctttcatctttttttggactaaaaatacagtgtaataactgaagaacaggttaaaaaatgttaactaaactgtaatttagaattgatatgattaatt

SEQ ID NO: 751252 - DNA, 588 bp, Homo sapiens
tgttaaacaacatgctaaatgtgacatgtcaaccctcactctaaactttgcctgttcagagcatcagatgaagacttcattgggttttatagtggctttctgattttcggtagtccattgaagaaggtagttaagtttgaaagttgttgtgtactgttaatgactgtctgcccatgttctgcctgaaataccacgactgtttctggaaagtatctttaataaagctggatacagtttggcttggaaaaaaaaaaaagagtggttgatttgcacagtgggattgsggggacttttttttttcttcttcatacttgtttgtattttccaaatcttccctaaggtcatttattacttttagaatttaaaaattattttataaaaatatgtaaagctctggttttttaatgactatgtaatgactatgtctactcaaaagtatcttcaaaatgacctatttaaaaatctatcccctcaaaacatcctgataaatcctttcatctttttttggactaaaaatacagtgtaataactgaagaacaggttaaaaaatgttaactaaactgtaatttagaattgatatgattaatt

SEQ ID NO: 751253 - DNA, 626 bp, Homo sapiens
ctgctacagatggttatttctatggtattatttatattacgctaagttacattatgaattaaatcaacttttgaaaggaggaacagaaacctaaagaatatttatcaagttgtgttcaggggaaggaattaagaattaaaatacagatggtaatagtttactgtgtatgatgtgtacagggcaccatggcaagtagtttacatatattctcatttaatcaacacaaagaaacaggtattatcattacttgacacataagaaaaccaaggctcagaaagtcagagctggaagtcaaatgtcattctatctgatccaagtctgtgctsttagctatcacacttcattgttttgtatgtatgtttcaagttttaaatatcattgtaaaatataatcttaatatttcatgaacagttgactgcctctgtgagagagtgtgcgtgtgcatgtgtgtgtatgagtgtgtaatgtagctgcaaatagacatttattaaacttgttttgctttttggaatctacttatttaaaatactccatatatttgagaagcaattgaaaatgcatccatgtatgttatttgagcgttactagaaatttatttatacaaatccatattaatgtgctaataa

SEQ ID NO: 751254 - DNA, 626 bp, Homo sapiens
ctgctacagatggttatttctatggtattatttatattacgctaagttacattatgaattaaatcaacttttgaaaggaggaacagaaacctaaagaatatttatcaagttgtgttcaggggaaggaattaagaattaaaatacagatggtaatagtttactgtgtatgatgtgtacagggcaccatggcaagtagtttacatatattctcatttaatcaacacaaagaaacaggtattatcattacttgacacataagaaaaccaaggctcagaaagtcagagctggaagtcaaatgtcattctatctgatccaagtctgtgctgttagctatcacacttcattgttytgtatgtatgtttcaagttttaaatatcattgtaaaatataatcttaatatttcatgaacagttgactgcctctgtgagagagtgtgcgtgtgcatgtgtgtgtatgagtgtgtaatgtagctgcaaatagacatttattaaacttgttttgctttttggaatctacttatttaaaatactccatatatttgagaagcaattgaaaatgcatccatgtatgttatttgagcgttactagaaatttatttatacaaatccatattaatgtgctaataa

SEQ ID NO: 751255 - DNA, 606 bp, Homo sapiens
gaggtccactccagaccctgtttgtcttggtattaacagcagaggctgcataacagcaaatattgctgcctgatccttcctctggaagcttcatcccagagggtcacctgcctgtttgaggtgtctgtcagcccctactgggaggtgtttcccagtcaggctacacaggggtgagggacccgcttgaggaggtggtctgttcgttctcggagtttgaaygctgtgctgagagaaccactgctttcttcagagctgtcagacagggacgtttaagtctgcagaagctgtctgctgccttttgttctgctatgccctgccccaagaggtggaatctacagaggctgagctgcggtgggctctgcccagtctgtgctttgtttacactgtgagctattcaagcctcagcaatggcggaccccccttcccccgtcaagctgcagcatcgcagtttgatctcagactgctgcactagcagtgagttacggctccgtgggcgtgggacccactgagccaggcacaggagggtatctcctggtctgcaggttgctaagactgtgggaaaagcacagcatttggtcagaagtgtactgtttctgcagatacagt

SEQ ID NO: 751256 - DNA, 605 bp, Homo sapiens
accttgcttaaagaataggtcgtttgccaatacctttgcagcatctttgttcctctttccaaatctgtcctctttcctatcaacagaaaatacttaacaatcttgaattttgtgtttatcaattcatgccttttcttcaktattaccacatgtgtatgcattccgaaaataatacatgatattgcatatttctcaacgttatacaaatggaatcatactgcatttattctttgacaactttattatcatttctcagtattttatttatgacagctcatactgatgcatatagctatagttccttcattttcagtaccatgcactgttacgttgtttgaatgtacctcagtttatttgtgcattctcttgttaataggtatttgttttctgttttttgctaataaaatcagtgctccttaacaattgttgtgatatccattatatattcagctttagtaggtactgttaaactattttacaaagtgtttgtactatttgacatcctaccaatagtgttcaggtgttcccatcaatctctatcaggaagtggcaaactttttcttaaagtgccaaatagtaaatgtttcaggtctccatcgcaacta

SEQ ID NO: 751257 - DNA, 621 bp, Homo sapiens
agttttcaaagggaatgctaccagtttttgtccattcagtatgatactggctgtgggtttgtcataaatagctcttattttttttgagatatgtcccatcaatacctagtttattgagagtttttagcatgaagggctgttgaattttgtcaaaggccttttctgcatctattgagataatcatgtggtttttgtctttggctctgtttatatgctggattacatttattgatttgcatatgttgaaccagccttgcatcccagggatgaagccaacttgatcgtggtggataagctttttgatgtgctgctggatttggtttgccagtattttattgaggatttttgcatcratattcatcagggatgttggtctaaaattctctttttttttgttgtgtctctaccaggctttggtatcaggatgatgttggcctcataaaataaattagggaggattccctctttttctgttgattggaatagtttgagaaggaatggaaccagctcctctttgtacctctggtagaattcggctgtgaatccatctggtcctggactttttttggttggtaggctattaattattgcctcaatttcagaacctgttattggtctatt

SEQ ID NO: 751258 - DNA, 668 bp, Homo sapiens
tccaggatcctttgaggttgccttccctgatgctgcggagaaaatgaagaaggtcattacacagcttaaagaaggtaaaatacactccatctctccttccccagacacacacacacacaattagaaaaccccacttttggccggggatggtggctcacgcctgtaatcccagcactttggaaggctgaggcgggcagatcacttgagatcaggagttcaaaagcagtctgaccaacatggtgatacccatatctactaaagatactaaaattagctgggcgtggtaacgcatgcttgtaatctcatctactcaggaggctgaggcaggaaaattgcttgaaccctggaggcggggttgcagtgacccgagatcggcactccagcctgggtgacagagcaagactccatctcaaaacgaaacccactcctgagaccccccatccactccccgtacaatcccctggccccatctctgagcctcagaccttgagggacgactatttccccgcgtggaccatttttgatcyggccccgccccttcgatgaaaggtttcgtctccaactgagcccctttccgggactactactaacctggccacgcctcttctctaactgggccaccaccttagccttggtctcctgcaaggatcgcccaggatctagccccg

SEQ ID NO: 751259 - DNA, 686 bp, Homo sapiens
gaaaactggaatggctatgttaatagcagacaaagtacacttaagagcaaagaaaatcacaggaacaaaaagtgatgttacataatgtaaaacagttgattcagccaactgcggtggctcacgcctataatcccagcactttggaggctgaggcgggtggatcacctgaagtcaggagttcakgaccagcctgacttacatggtgaaaccttgtctctactaaatacaaaaaaaactagccaggcgtgatggtgcgtgcctgtaatccaagctatttgggaggctgaggcaggagaatcacttgtacctgggaggcggaggttgcagtgagccaagatcgcgccattgcactccagcctgggcaaaaagagcgaaactctgtctcaaaaaaaaattttttttaagttgattctttaagaagacatgagaattcttaatatgtatgcacctaacgacagagtttaaaaatacatgcagcaaaaactgatgaaactgagaggagaaactgacaaatccaacattaggatcagagacttcaacattcctctctcagtaatagactgagctggtagacaaaaaagttaccagctataaaactgaacaccattggacaactatgtctaattgccatttaatattcgtcccataacagggcaatacacattctttctaagcacacatggagc

SEQ ID NO: 751260 - DNA, 593 bp, Homo sapiens
gaattaatgaataggtatgagagcacctttgagtacttgaatcgcaacccaccagtactctgtattctaacctaccattccctagcattgtgagatactgtgggctgggacgtgctataagggtgtcacaagtaattttgtgaccgttccaaaagcatcagtgtttgtgaatgacttacttttatcttacaaattagatcaaatgtatggttattctttgtcatacttaagcctgtgtcctctagaaaacagagactaaggcaggattaagtcactgacagtttatttggggaaggggagtgtgagcctgagacagcgatggtgaggataaaagggaaagtgattcaggaaacttcaaggggtgatgactgcagytttctcttcacagtagtgccaacacccagcaggtatgctcttgcagcatgggggcactgcttcagtagctcaccagggggaacagcatctcagaggagtccgtagacagagagaaaaggaagtttttctacctgattgtctctcatctcctgcttcccattggtcatagtcccaactgacttcccagttgtgtcatccagttctgtggtggctactca

SEQ ID NO: 751261 - DNA, 580 bp, Homo sapiens
gagaggagacagttaaggacattacagaaggcacacatctttgtgtctagtacgtctttatatcatgacactcacacatctgctgtaccctgtgctttactgggtgggagaaaaagagatgccattgtagctcttatagccccaggcatggaaactgtacgtgaccctgggtatatccgtgtgatcctgtcactccgtgaacatcatcagtcatatgtgttttcatctcagctccaagtccatgtgataaattggatattgcttttgcttatctaattctcattgccccagccagactgtcaagtcgttgtggtactgtttgtgcatygtactgaattatgacatccacatgatagatgtagaatgcccctttgaaatgtatcgcacacactctgtctgtcttgcacgctgtagagctggggtgggacagatgaggggtggatgctgctgcaggacagggctcagtatctgccctcccaaggtcaggcctgacattgctaggagacagaggcacggggccccaccttcctgtccaacctcccttcctgctcctcccccctcaccctctctcatcatcaca

SEQ ID NO: 751262 - DNA, 644 bp, Homo sapiens
gtgcttcaagcttgtctagttactgttttcagccctggtctcttacagctttgttatttgttctattttggcatgtcttttgattctgcaaagcttaaattactttcctaagagtgtagtaagtcagttctgttaaaagcacagaccatgaaacacaagcagatctgggttcacattatagctctgccacttactagctgtgtgaccttgagctggttacttcatgtctctgtgccttctctcccatctgcaaaatgagatagcatcagccctcactttataaatatttttagagatggggtctcaacttatcttatctcaaataagataatgaatgaaggtgattagcagkgtgcctggtacactgtcattgatggtatcactgtatcctccctcgggaacagggactactcttttgctttctactcccactcacttctgagcatttgcagttcccataacagacagaagagaaatgcaatatttgttgaacaaattatttgactcttcctgtttccatctgagtactatttaacataggactgcttgccaggtgtacctgggtatactttcccacataagcaactttcccttttggggagaatttaaccaaaagtgccaatattacgtagtggttaataatg

SEQ ID NO: 751263 - DNA, 644 bp, Homo sapiens
gtgcttcaagcttgtctagttactgttttcagccctggtctcttacagctttgttatttgttctattttggcatgtcttttgattctgcaaagcttaaattactttcctaagagtgtagtaagtcagttctgttaaaagcacagaccatgaaacacaagcagatctgggttcacattatagctctgccacttactagctgtgtgaccttgagctggttacttcatgtctctgtgccttctctcccatctgcaaaatgagatagcatcagccctcactttataaatatttttagagatggggtctcaacttatcttatctcaaataagataatgaatgaaggtgattagcagtgtgcctggtacactgtcattgatggtatcactgtatcctccctygggaacagggactactcttttgctttctactcccactcacttctgagcatttgcagttcccataacagacagaagagaaatgcaatatttgttgaacaaattatttgactcttcctgtttccatctgagtactatttaacataggactgcttgccaggtgtacctgggtatactttcccacataagcaactttcccttttggggagaatttaaccaaaagtgccaatattacgtagtggttaataatg

SEQ ID NO: 751264 - DNA, 561 bp, Homo sapiens
ctacttaaccattcattgctatgtgacctggggagggttgcttaagtcctctgaacctgtgtttcctcctttgtttaaagagagctaattctttccaactcccagcattgccaggagaattaaggaggtgatactgtttcccaragtgtgacagaggagacgatcttaggcagcaaacacaggaatgttttcttgttcatgtgtttaagttaatgtggattctaaattaatgtgtattcgtgtagctaacctgtaatttcacagatattattacttagcatacagctaaagtaggtgcaaagttagaccagaggtgatgtaaaaaaacatgttagataaatattaatacaggtggtgtggtgtggtgtgtttgggaaagcttgcgtactaaatttctggaggggaagtgggcttcataaatgtcagtgtctttctcttctcctcaccccctgtctactcttactgccaaaacctctgcatgtcaaactgtttcattgccttaaaatggtttctatcaatcattgcttcaattaaattggccactggctgcaaatggaaatc

SEQ ID NO: 751265 - DNA, 566 bp, Homo sapiens
ctgccacatgagctgacagggagacagggtggctccccagaggaaaatcagtgggggctatcgctagaagaagatgggatggaagatgggcaggcaaaacaacagcagcctatgggccaactataagctgtgaagcccttaaaacatgcataatgataaatagaaacacagaaggcctaaactcacggtggggctgggatttttgatgsaacataaaataagaagggttgacctcgacctgccaggacccttttcaccccactgcctggctttggcttcttggaaagactgacccctccattgcttcttgccccatagaaccttaagcgggtggccgaagtgtggatggatgagtacgcagagtacatttaccagcgccggcctgaataccgccacctctccgctggggatgtcgcagtccagaaaaagctccgcagctcccttaactgcaagagtttcaagtggtttatgacgaagatagcctgggacctgcccaaattctacccacccgtggagcccccggctgcagcttggggggaggtgagtctggagggcagggctggctc

SEQ ID NO: 751266 - DNA, 544 bp, Homo sapiens
tgagtccttgtgacatgacctcagtagtctttgatgactgccttgctctctgctgcattaagatattccagatccatctggcacattccctacaccagacctggaattcatcatttctctaagaaactgcttggtttcttttagagggaaatggtattttaaraccacaaattgggcattaggaatgctctttgctactgggcttgtttcttgccttgagattggacagggggaggagattataaatatgtttatagttgtattttatttacatttaaagagaaaataccctgtgagttcataaatatataaattaaagactgttgaattttttctctattatatttctgtagctcctttctttatagcaagagccctggttttcaaggatacaggaggtagtagaattagattcttgtcttacccatgttatacacacaacaatatcagaatagcaatactaatgctaccgctgatatgattatggaaaacactaaacagtattttttgcatatgctctcccatttcccccattgtttctata

SEQ ID NO: 751267 - DNA, 544 bp, Homo sapiens
tgagtccttgtgacatgacctcagtagtctttgatgactgccttgctctctgctgcattaagatattccagatccatctggcacattccctacaccagacctggaattcatcatttctctaagaaactgcttggtttcttttagagggaaatggtattttaagaccacaaattgggcattaggaatgctctttgctactgggcttgtttcttgccttgarattggacagggggaggagattataaatatgtttatagttgtattttatttacatttaaagagaaaataccctgtgagttcataaatatataaattaaagactgttgaattttttctctattatatttctgtagctcctttctttatagcaagagccctggttttcaaggatacaggaggtagtagaattagattcttgtcttacccatgttatacacacaacaatatcagaatagcaatactaatgctaccgctgatatgattatggaaaacactaaacagtattttttgcatatgctctcccatttcccccattgtttctata

SEQ ID NO: 751268 - DNA, 594 bp, Homo sapiens
aacaccacttttttgggaaaatcttttcaagcccattgaattcagaagtcagaaatgccaggttagatgacttcgaaattggacaacctcaagttttcctgatgtatgggttatgagagggtgggagacacttttctgttcttattagctgtgaagttgggttttggtttatttttgattttattttttaccatgctcaaacccctgtctcagccctctttttagtcctgttaactatcaagtgcctctctctgcccaggggtatatcaagtcatttggggaatactacgtttgaattagagtgaaccccagtctcctgtgggggtratgaggccattgtgggacaacatcttggtctcttatctcaaggccatacatgtttgtaggtcatgagtttggcatgagcttaattgctggcacatctctacctctatgtgcctttgtagctctctgggatacagaaaagtcctttgatacttacgtacttgtctttgttggtaatccagaaacccaggttttggggcccatcagcttttctgcacaggatcctgcatacagtccagttgtggattagcctcagcccaaagagcctgt

SEQ ID NO: 751269 - DNA, 495 bp, Homo sapiens
ggggccctagatttccttggccaaatggtgctaaaacccaattcttgggcctgtgcaggcctgtccccacgtccaacctctcaggggtggaacatgaacatggctaggcccaagggtggctacttatggggggatatgaatggagttttgacccttgggcatgtagaagatgtggggtgtatgggatggagcccaggtgggaagagacagagcagggtggccttctgccaaggttcagctctcctccccataccatgttctggtgtggaactccaaggagtccaaagcttccagattaacctgaccttytaggtagtttgaaaagtgtactttctcaagatcaaaaaatagaagctatttaatttaataatgtgtctatgtaccagttacctattgctgtgtaacaaacgaccccaaaacttagtagcttaaaatgacacatatgtattgtctcacgatttgtctgatcaggagtctggaaactgcttagctggg

SEQ ID NO: 751270 - DNA, 608 bp, Homo sapiens
ctcaaattgtacctggaagtgagccaaaatttgtctggattctcagagatattcagctctctctttttacctaacctctcttttggaattgggaggtgattcattgaaattattcagcttgagtctgggtaaggagtatattggagttctttstactattcttgcaaattttctgtaagcctgaaactatttccaattaaaataacttgttaaagtaatatggtagtgcataatcaccattttccccccttaaccataggtaagatacatgtaatattgatatttgcctcacctttgcttcaggagtgatggaagaatttcaggggagaattcacccaacttgactgggataccgggagcacggatctggaaagaaacttttgagctttaggtggctgagtgtgcataaagtaacacacataccaaagtcttccaaacaaagattaagggatggaacctctcaaataaactcctccaaattgggaacaaatgttgcggtatcaggatcacatctcctgtcccagttaccccattgctcaacatgggatgtgggttgtcagggtgaagttcttttagcaattatctttgtttgcttcattatgtaagga

SEQ ID NO: 751271 - DNA, 601 bp, Homo sapiens
caccatgtccctcaggaccagcaccagtaaacagtatttcccattcccaaatgcatcttatcttttctggatcttacgcccaaaggttggatattatattctggtacaagtgatgaccagaatgacaaaaatacattgcatttctcagagggcctctacctgaacaatgagtgacctgtcccttcactgagcatggctgcaaattatactctcttgactgtctcctctgaaagcatgatggtgctgagtgcctgttaccacctaatcaatcattctgtatagcaatatcttcatagtaagaaagtctttgagagcagtgagggatctgaatgattggccatcccagtggcttttgagtgaactttgagcctagatcagaggcccccactagagacagagttaagagggctcyatggaaacactgtcaattttcatgttggagggaagaagaattttatcacagtgtagcagccctcctggcagctcttaggagggtgttgatgtgtccctgaggtgagtttcaatgccaatattatgtcagttggggtgttggtgaattgttccagagcaggtcaagctatgcacacttagcattattttt

SEQ ID NO: 751272 - DNA, 454 bp, Homo sapiens
ttccaagagcatcatggatggttctacaactgccagactaaaaacataatttgttgtcaatgagatagattctttaggtaaagtaaaaagaagttcttttagactagtggtctcaatgttctcaaattcataatcaaaatacaataatgtctgggttaaataaaatcaaagatcgcatakcaccagagggaaaagctaacatatgccatatctctaaatgttgaactgtgcttattattcatgaatataccttaaagagtctataaatatatgaatagtggtactacttgtggacaaaatagaggtttcaaaactccatattaggatcacttggtgtgaaaacagttttttaaaagacacaaatattcactcgttccagaatgtataaataagataaatgaaatacacttaataacctgtaaattcacatttatgaaatacccaagtggatcca

SEQ ID NO: 751273 - DNA, 624 bp, Homo sapiens
gtaagtagcaagtatgttcggatcttttaaaatcctcacaatcatctactgtaaagtagatattatccccatttcaggggtgaggaaactaaggctcagaagaatgacctcccagaggttgataacttggagagatccggagcccaggtccctgatacgcaccctgctgcctcatctgagcagtctttaatcccctttggggcagcacataggcagggactggggcaagggcgacgggctgaattttgagttcaaacccatttgttaagttcttccccaccatggccagatgattaactttatgagaggaagcgtggatcctattyggaggtagagtgaaaggctcaaaagaaaataacttttccttcttttcttttcttttttttttttttttttttttgagacggagtcttgcttttgtcacctgggctggagtgcagtggtgcaatctcggctcactgcaacctccgcctcccgagttcaagtgattctcctgcctcagcctcctgagtagctgggattacaggcacccgccacaatgcccggctaatttttgtatttgtagtagagatggagtttcaccatgctgtccaggctggtctcaaactcttgacctcagttgat

SEQ ID NO: 751274 - DNA, 609 bp, Homo sapiens
agccaccacacccagcctgtttttgtgttttaagtggggatttagtttcagcaaaccatcaaacctttatattaatatgatattatgttaatttatcatctaattcatcaatattttaatgtttatacttaattagtaactttttgatattgcatttgtataaataatatattagagaattgattactagtttcatgtttttgtgtaattaactttataattaaataatttgtcatcactgaaagaaagtgaaatatttttctcttaaatgctatgactatgtctttgagatcaccaaattgtgccatgaaaagctcagataatttttaaagtgatttatttctgttggcttgaattttcatttgaaattctgaggaaatcagtaactgaataaaaatttacatctcaaatcatagctaggacttactgtaagcaacttaaaccaacattaagtagcagatcagaaggcaaacatgattatgctcctgcattgaatattttacaatgctacttttaaacttttctaataaggcttggaggataccaaatgaacttttccttagaaaggttatatcactatttctgtkaaatctgactaatgtttgttat

SEQ ID NO: 751275 - DNA, 601 bp, Homo sapiens
tttatttaattattcctttttatttaatcatatatatggaatattactcagtattatattcaaacaatgacttatttccccctgggtagatacgcagtagtgggactgctggatcaaatagtagttctactttaagttctttaagaaatctcagcacagttttccatagcagctgtactagtttacattctgaccagcagtgaagtgttccctgttcaccacatccaaccaaacgtctactgttttttgattgtttgattatggccactcttgcaggtgtaaggcggtattgcattgcggttttgatttgcatttccctcatcattagtaatgttgagcattttttcatatgtttgttggccgtttgtatatcttctwttgagaattgtctattcatgtccttagcccactttttgatgagattgtttgcttttctcttactgatatgtttgagtttgttgtagattctggatgttagtcctttgtcagatgtatagattgtgaagattttctcccactctgtgttgtctgtttactctgatgactgttccatttactgtgcaaaagctctttagtttaattaggtcccagcgatttatct

SEQ ID NO: 751276 - DNA, 517 bp, Homo sapiens
ccaaaatggcaccagcaaccactggagtggacttagagactagttctatagtggttggcctggagcttggaaccacaggggctggtctgttgttaggttctacaagggcattcctggagcctgaatgtgggctggggtgaagcatgaatcttcaggggtgatcttgggctcgggtgggtccaaaaggataacataattcttattttagtagcacttattcatgtattttgaaaaaaaacttatcaaaaattgatttaatccaaactctattttaccatgttgcatgacaaatgaaaactaagcatttattttctttaatgagaattagatatgtcaattaacactccagtgaattctcaacctttagtatagacaattttawtgatttgatctagggtcagcaaactatgctttattggccaatttgctaacatcttctgatcttttcagcaataatatataacatatataagtcaggatcccaggtgttctggtgtatcataggtcaattcagaag

SEQ ID NO: 751277 - DNA, 741 bp, Homo sapiens
ctttgtgtccatgtgttctcatcatttagctcctgcttataagtgaaaatatgcagtatttggttttctgtacctgcattagttcacttaggataatggactctagctccatccatgttcctacaaagtgcatgatcttgttcttttttatggctgcatagaattccatggtgtatatgtaccacatgtgctatatccagtcttccactgatggaaatttagattgattccatgtctttgctattatgaataatgcttcaatgaatattcatgtacatgtggctttatgatagaatgatgtgtattccttttagtatataccaagtaatgggattgctggctcaaatggtagttctgtttttagctcttccaggaatcatcacatggctttccacaacaggtaaactaattttcactcccaacaatagtgtmtaagcattcccttttctctgcaaccttgccaatatctgttgggtttttttgactttttaattacagtcattctgactggtgtgagatggtgcctcagtgtaattttgatttgcatttctctaataatcagtgatactaatccttttttcatatgctcattggccacatgtatgtcttcttttaaaaagcgtctgttcatgtcttctgctggctttttaatgggatatttttcccttgtaaatttgtttaaattccttatagatgctggatattagacttttgtcagatgcatagtttgcagaaattttc

SEQ ID NO: 751278 - DNA, 521 bp, Homo sapiens
taaaaccttatttctgggcatggctgtgaggtatttccagaagagattagcatttgaatcagtagactgagtaaagaacgtcgtcttcaccaatgtgattgagcatcattcaatctgttgagggtccaaatagaacaaaaaggtggaggaagggtgaatttgctctttttgtgagctgggacatccatcttctcctgccctcggatactggacctctggattcagattgaattataccatcaggtttcctggttctccagttggcagacagcatattctgggacttctcaacctccgtgattgcrtgagccaattcctgtaatcaatctcctcttccatatatcctattgcttgtgtttttactggagaactgtgattaaaaccagtgacaaattatgtataatgaaggttctaatagttagaaagaatgaataagactacttgatagcagaagaggatgactatagtcaataataacttaattgtaatgactttaaaagtgtaattgaattatttgtcac

SEQ ID NO: 751279 - DNA, 515 bp, Homo sapiens
agagtaccatgtagggagaccaaggatcccagccctcagccctggctaagctctcactgacagctggtactagtttgctgaccatgtgagtgagccctcttggaagtgtattttccagttgagctgtcttacctaaggctgcatggaaccaagatgagccttccttgctgaatcctgcccaaattacakgatcatgagcaaaataaataattaaataccttattactaacaactaagcttttggggtgacttcagcagtaactggaacagggtacaaggaaatggtgaaaggaatctgagaatctgggtcgagctctaacaatgtagtagttgctgttgtgtacatgttcggattctctttgccattggtgcatcagtctcccagttcctgtgaatgttggcttctaacagctcactgtagccttccttagagaatttatccaggcttaatgggagccacctcaactgggagggtgttcctttccctgggaagtctacagccaatgactgacagg

SEQ ID NO: 751280 - DNA, 525 bp, Homo sapiens
cacacacactatacatatattattattattattatttatcatgacgaattgccttatgcagttatgggagccaagaagtcccatgatctgccatctgtaaggtgaagacgcaggacagccattcatgtagttccagtccaaactcgaatgcctgagaacctgtccaatgccaggaagagatgaatgttccagctcaagcagagagagacagaattcacccttccaccatctttttgttctattcaggccctccacaaactggatgatgctcaccacatggatgagaggggaatcttctatacccagtctactgatgctaatctctcscaaaaacaccatccgtcacagacacacccagaaacaatgttttgccagctctctgggcatccctcggcccaatcatgttgacacatgtaattaaccatcacaaatggagacttgctcatccatgggcgtaaagtttcagtgaagcaggataattaagttctagaaatctgctgtaccatgttgtacctatagtcagcg

SEQ ID NO: 751281 - DNA, 626 bp, Homo sapiens
cagaatagagggtgggaggagggagaggggaagaaaaaaataactatggggtaccggacttaatacttgaatgatgaaataatctggacaacacatccctgtgccacaagttcacctacgtagcaaaccttctcatgtaccccttaacctaaaataaaagtttttttaaaaaaactaacaacgaggccagkcacggtggctcacacctgtaatcccagcactttggaaggccaacatgggcagatcgcctgaggtcgggagttcaagaccagcctggccagcatagtgaaactctgtctgtactgaaaatacaaaaaaattagccaggcctggtggtggttgcctgtagctacttgggaggctgaggcaggagaatcgcccaaactcaggaggcagaggttgcagtgagccgacgtcgtgccactgcactctagtctaggcaacaagagtgaaactctgtttcataaaaaaaattaacaatgactgggaacttgcatcggttttctgtctaattccttcacatgggatgatctgagatggttttatcttcctctcctttatattggggtgggcatgaaggaggtgctcagaaatgtctacttaactgagagaaatctgtttgttca

SEQ ID NO: 751282 - DNA, 626 bp, Homo sapiens
cagaatagagggtgggaggagggagaggggaagaaaaaaataactatggggtaccggacttaatacttgaatgatgaaataatctggacaacacatccctgtgccacaagttcacctacgtagcaaaccttctcatgtaccccttaacctaaaataaaagtttttttaaaaaaactaacaacgaggccaggcacggtggctcacacctgtaatcccagcactttggaaggccaacatgggcagatcgcctgaggtcgggagttcaagaccagcctggccagcatagtgaaactctgtctgtactgaaaatacaaaaaaattagccaggcctggtggtggttgcctgtagctacttgggaggctgaggcaggagaatcgcccaaactcrggaggcagaggttgcagtgagccgacgtcgtgccactgcactctagtctaggcaacaagagtgaaactctgtttcataaaaaaaattaacaatgactgggaacttgcatcggttttctgtctaattccttcacatgggatgatctgagatggttttatcttcctctcctttatattggggtgggcatgaaggaggtgctcagaaatgtctacttaactgagagaaatctgtttgttca

SEQ ID NO: 751283 - DNA, 590 bp, Homo sapiens
cactttgggaggccaaagtgggcacatcacctgaggtcagaggttcaagaccagcctggccaacatgttgaaaccccatctctgcaaaaatacaaaaattagctgggcatgatggcgggtgcctataatcccagctactcggcagactgaggtgggagaatcgcttgarcccgggaggcggaggttgcagtgagctgaggtcacgccattgcattctagcctgggcaacagaatgagactctgtcttgaaaaaaaaagaaagaaaaaatctttaccggcttgagcatttatccacccattcctaggactaacattggctatttaaggacctgctgttaagtgacaatgtatattattcatgaccaaaaactgatagaagaaagcattgactcccaaagaagatgagaatgtttctcccaagcaggtgcagggatggagattcacacaggtgcagcacaagcgagggaatatgacattattgcatttgcagcctcaagggaaagcggcccccagaagaagtctgcaaagaaggacaactgcaagggaagttagaccctgggtctaacagaggaagtggcagggtaaataag

SEQ ID NO: 751284 - DNA, 552 bp, Homo sapiens
atgaagataagaacatttttggtctcaaaggtttactagggggatgagatgacatgatccaagcacagggttcagtgtaatgtgtataacacagtggggacttaataaatgctgctggtaaagtgctggtaaagatgaggacagtgggtggaatagcgagggctgtggtaggggccagtgtgcaaatgaggcctgatttagaggaccctttaaccacagcaggaatttggactctgtcctgcagatgatggggatacaggagtttcggtccaagactggcttgcccagattttcatgagctcctgaaactgtgaatcacagctctaagaaaggaggcccagggagcccagttcagtcaatacctgcaacatcagtggagttggaggtttagatttcaaaatccctcccagtaatgtcttycgctgagttatatcaccaggcatcaggggcccatagcagaaggaaatgaaatgcatcagagaaggccgggaagagttctaaagctggtgtaattaaagctatctatcacgtcgctgagcatgggaaggcagg

SEQ ID NO: 751285 - DNA, 622 bp, Homo sapiens
catttactttaacctaaagtcatcagctgcattagtccctaacaagagagtcagcctcttttttgaagcttgaagccggactctcacttctctctagctgtgaaagtcctaggtggaaagtcctagaggtatcagtcaggagagtctacatgatgccacagtaacaaacaagcccaaaaatcttagtgggctgaaacaacaaagtgagttatttctcagtcacattaagtgttcacatttgatggagatgggtgtgaggasggctcaacttattgtggtcaatgaggagcaaaggctgagttgaaaaagactccatttctctgctcctcactgtcagaggtgggaggaaggggcacagcacaagccacacatctgcctttaaagcttctgtccggaagggacccatgccattagccaaatggactcacataaccattcacaatttcaaatacatgaagtacaagcctaccaagtgtgcaaagtgagaagagagcaagaatacttgtacagcgcctctaatgcctaccagtgaggtgctaagtgttaccctatattctgattgtgtcaaaggaagtagctttgagcttggagggagtccttgggttttaggtaaaacccaagt

SEQ ID NO: 751286 - DNA, 622 bp, Homo sapiens
catttactttaacctaaagtcatcagctgcattagtccctaacaagagagtcagcctcttttttgaagcttgaagccggactctcacttctctctagctgtgaaagtcctaggtggaaagtcctagaggtatcagtcaggagagtctacatgatgccacagtaacaaacaagcccaaaaatcttagtgggctgaaacaacaaagtgagttatttctcagtcacattaagtgttcacatttgatggagatgggtgtgaggacggctcaacttattgtggtcaatgaggagcaaaggctgagttgaaaaagactccatytctctgctcctcactgtcagaggtgggaggaaggggcacagcacaagccacacatctgcctttaaagcttctgtccggaagggacccatgccattagccaaatggactcacataaccattcacaatttcaaatacatgaagtacaagcctaccaagtgtgcaaagtgagaagagagcaagaatacttgtacagcgcctctaatgcctaccagtgaggtgctaagtgttaccctatattctgattgtgtcaaaggaagtagctttgagcttggagggagtccttgggttttaggtaaaacccaagt

SEQ ID NO: 751287 - DNA, 622 bp, Homo sapiens
catttactttaacctaaagtcatcagctgcattagtccctaacaagagagtcagcctcttttttgaagcttgaagccggactctcacttctctctagctgtgaaagtcctaggtggaaagtcctagaggtatcagtcaggagagtctacatgatgccacagtaacaaacaagcccaaaaatcttagtgggctgaaacaacaaagtgagttatttctcagtcacattaagtgttcacatttgatggagatgggtgtgaggacggctcaacttattgtggtcaatgaggagcaaaggctgagttgaaaaagactccatttctctgctcctcactgtcagaggygggaggaaggggcacagcacaagccacacatctgcctttaaagcttctgtccggaagggacccatgccattagccaaatggactcacataaccattcacaatttcaaatacatgaagtacaagcctaccaagtgtgcaaagtgagaagagagcaagaatacttgtacagcgcctctaatgcctaccagtgaggtgctaagtgttaccctatattctgattgtgtcaaaggaagtagctttgagcttggagggagtccttgggttttaggtaaaacccaagt

SEQ ID NO: 751288 - DNA, 622 bp, Homo sapiens
catttactttaacctaaagtcatcagctgcattagtccctaacaagagagtcagcctcttttttgaagcttgaagccggactctcacttctctctagctgtgaaagtcctaggtggaaagtcctagaggtatcagtcaggagagtctacatgatgccacagtaacaaacaagcccaaaaatcttagtgggctgaaacaacaaagtgagttatttctcagtcacattaagtgttcacatttgatggagatgggtgtgaggacggctcaacttattgtggtcaatgaggagcaaaggctgagttgaaaaagactccatttctctgctcctcactgtcagaggtgggaggaaggggcacagcacaagccacacatctgcctttaaagcttctgtcyggaagggacccatgccattagccaaatggactcacataaccattcacaatttcaaatacatgaagtacaagcctaccaagtgtgcaaagtgagaagagagcaagaatacttgtacagcgcctctaatgcctaccagtgaggtgctaagtgttaccctatattctgattgtgtcaaaggaagtagctttgagcttggagggagtccttgggttttaggtaaaacccaagt

SEQ ID NO: 751289 - DNA, 585 bp, Homo sapiens
agattaattatctactatcacataacaaataaacccaaaacatagcaacttacagcaacaagcgtttattatttcatagtttttgtaggtcagaatcagggtcttgcatgaggttgtagtgaagatgtcagttggggctgcattcatctgaaggctagacggcacactcattggcaggtggcctcagttacttaaccatgtgagcctctccacaaagctgcctgagcttccttacaacatggctgctgtctycccccaaaagaagtggtccgagagagagaaagagcaaatggaaaactgtggtgcctttataacgcagtgtccaaagttacatgccatttactttcactttattcagagtcagtaagtccagtccacacaccaggggaggagtattagactctatttcttgaatggagggagatctatttgcagatttttttttctcactctggcacccaggctgtagtgcagtagtgtgatcttggctcactgcagcctccacctccctggttcaagcaattctcctgcctcagcctcccatgtagctgggactacaggcgtgcactgccatgcccagctaat

SEQ ID NO: 751290 - DNA, 585 bp, Homo sapiens
agattaattatctactatcacataacaaataaacccaaaacatagcaacttacagcaacaagcgtttattatttcatagtttttgtaggtcagaatcagggtcttgcatgaggttgtagtgaagatgtcagttggggctgcattcatctgaaggctagacggcacactcattggcaggtggcctcagttacttaaccatgtgagcctctccacaaagctgcctgagcttccttacaacatggctgctgtcttcccccaaaagaagtggtccgagagagagaaagagcaaatggaaaactgyggtgcctttataacgcagtgtccaaagttacatgccatttactttcactttattcagagtcagtaagtccagtccacacaccaggggaggagtattagactctatttcttgaatggagggagatctatttgcagatttttttttctcactctggcacccaggctgtagtgcagtagtgtgatcttggctcactgcagcctccacctccctggttcaagcaattctcctgcctcagcctcccatgtagctgggactacaggcgtgcactgccatgcccagctaat

SEQ ID NO: 751291 - DNA, 646 bp, Homo sapiens
tatcaggagaagacggatgaagaaagtggtatagagaaggggggtggaatcttaagcaaggataaagagagaagattaaatttggagcacaaactgcaccacggagctgattccaccttgagacattttagtatccctgtcagtcattggctgtagacttcccagggaaaggaacaccctcccagttgaggtggctcccattaagcctggataaattctctaaggaaggctacagtgagctgttagaagccaacattcacaggaactgggagactgatgcaccaatggcaaagagaatccgaacatgtacacaacagcaactactacattgttagagctcgacccagattctcagattcctttcaccatttccttgtaccctgttccagttactgctgaagtcaccccaaaagcttagttgttagtaataaggtatttaattatttattttgctcatgatcmtgtaatttgggcaggattcagcaaggaaggctcatcttggttccatgcagccttaggtaagacagctcaactggaaaatacacttccaagagggctcactcacatggtcagcaaactagtaccagctgtcagtgagagcttagccagggctgagggctgggatccttggtctccctacatggta

SEQ ID NO: 751292 - DNA, 635 bp, Homo sapiens
ggaacttgaagcaggaaggtcatgctgtagactggagagggtatgaacagccaaatatactagcggacgaggaaacaggggaagttcgtttgcgggacaaggagaataagacagatacacgcacagaaatagaatcrggagacatcatgaagccctggaggaaagagaacagacttcctttcaggtggtctttcaatttgatttttaagttcttctagagtcactggagttggtttgagtttctgcctcttacgaacaaaactacagcctcagagaagttaagtcactcgcctgtactcagcttttcagtgggaggaccggatttcaaatctgcatctctgaataggccttggtttttgtatttattatggaatgtcttgaccaccaaaaaacataataatagtaaaataaatatccatgcacccatgacccagccaagaaaataaaattttaccagtggagctgaagcctctgtgtgctgcgcctggaccctgtttagcttcccctccactgcccctgacccaagaggtaactactcttctgcaattggtgtttatcattcccccacctttatttatacatctgcaaacagtgtacatatgtttgtgtgttttaaagcattataaaattggtat

SEQ ID NO: 751293 - DNA, 635 bp, Homo sapiens
ggaacttgaagcaggaaggtcatgctgtagactggagagggtatgaacagccaaatatactagcggacgaggaaacaggggaagttcgtttgcgggacaaggagaataagacagatacacgcacagaaatagaatcaggagacatcatgaagccctggaggaaagagaacagacttcctttcaggtggtctttcaatttgatttttaagttcttctagagtcactggwgttggtttgagtttctgcctcttacgaacaaaactacagcctcagagaagttaagtcactcgcctgtactcagcttttcagtgggaggaccggatttcaaatctgcatctctgaataggccttggtttttgtatttattatggaatgtcttgaccaccaaaaaacataataatagtaaaataaatatccatgcacccatgacccagccaagaaaataaaattttaccagtggagctgaagcctctgtgtgctgcgcctggaccctgtttagcttcccctccactgcccctgacccaagaggtaactactcttctgcaattggtgtttatcattcccccacctttatttatacatctgcaaacagtgtacatatgtttgtgtgttttaaagcattataaaattggtat

SEQ ID NO: 751294 - DNA, 635 bp, Homo sapiens
ggaacttgaagcaggaaggtcatgctgtagactggagagggtatgaacagccaaatatactagcggacgaggaaacaggggaagttcgtttgcgggacaaggagaataagacagatacacgcacagaaatagaatcaggagacatcatgaagccctggaggaaagagaacagacttcctttcaggtggtctttcaatttgatttttaagttcttctagagtcactggagttggtttgagtttctgcctcttacgaacaaaactacagcctcagagaagttaagtcactcgcctgtactcagcttttcagtgggaggaccggatttcaaatctscatctctgaataggccttggtttttgtatttattatggaatgtcttgaccaccaaaaaacataataatagtaaaataaatatccatgcacccatgacccagccaagaaaataaaattttaccagtggagctgaagcctctgtgtgctgcgcctggaccctgtttagcttcccctccactgcccctgacccaagaggtaactactcttctgcaattggtgtttatcattcccccacctttatttatacatctgcaaacagtgtacatatgtttgtgtgttttaaagcattataaaattggtat

SEQ ID NO: 751295 - DNA, 553 bp, Homo sapiens
aaaaatacttttaagtcccagtcaaaataaacataaagttttagaatataatccatgtaattcctctcttcaaacatcaatacaatagctattaaagtacctaactataactctagtcacctataaagagatgtattcaaccacaaactgtagccgcagcagaatttttgctgaaatcatctcactgcgtgattgaaggcatttctcttgacagcccgatactgacggtatggtacccacgtcaccccagaaattctggaggccaattcacctaataaattcctttctgctttagccagttacagcgtactgtagtggtctgtaattaaacaatgaccattatagtaattgggtatagaaatgatttcaggyaatgtactcctggggcaaatggaaatgtgtgattggtatctgatctggttgggtttgaagacagaaaggctgcagtgatcataagagggttaaacactggtagtccatgatatcccatgatgaaagaattacttaagttatcatgtgtagtaacagaactaagacagttacctaatgcacg

SEQ ID NO: 751296 - DNA, 588 bp, Homo sapiens
gagcttctttcatatattatagttactcctgttcctctctttacaataacaaccaaaataattagctcttaatgagcatctgctatgtgtgccaagcactgacaccatgagctttccacacattactcatgcgttcctcacacccaccctgcaaggtggtcaatctcactctcctaagagaggcgacaaagagtcagagtcagtcacagacagaggagaggttcgacacagtcagtgtgactccaaagaccacgtcctctctgcctcygacaacaccattctgcctatacacaagccatgatttatggcaataccatccttgtcaccaataaagagagagggggaaacagggcagttaacatgtgctgggaaaacccaaaagataattctttaagaaccaggagcatatctcttcccccacaaacgctctcttgattgggctagtcaggtggacaaaagaaaacatagaaaaatgggtggccacaggatggggcaagaatggagggagataatcacctgatagagaggccctggttgagatttctgcagagcttatttccagggcaaatcgtgaaggcaagctggctg

SEQ ID NO: 751297 - DNA, 588 bp, Homo sapiens
gagcttctttcatatattatagttactcctgttcctctctttacaataacaaccaaaataattagctcttaatgagcatctgctatgtgtgccaagcactgacaccatgagctttccacacattactcatgcgttcctcacacccaccctgcaaggtggtcaatctcactctcctaagagaggcgacaaagagtcagagtcagtcacagacagaggagaggttcgacacagtcagtgtgactccaaagaccacgtcctctctgcctccgacaacaccattctgcctatacacaagccatgatttayggcaataccatccttgtcaccaataaagagagagggggaaacagggcagttaacatgtgctgggaaaacccaaaagataattctttaagaaccaggagcatatctcttcccccacaaacgctctcttgattgggctagtcaggtggacaaaagaaaacatagaaaaatgggtggccacaggatggggcaagaatggagggagataatcacctgatagagaggccctggttgagatttctgcagagcttatttccagggcaaatcgtgaaggcaagctggctg

SEQ ID NO: 751298 - DNA, 617 bp, Homo sapiens
aatttatttcaataatctgcctccaattccctaaacataccattctctttccagcctctatacctttgttcatgcagcttcctctgactgggtttgttcttcacttggctaacccctcttttacttaagcacaccttgaacattccctccttccccatttccccgcagtgcccctaatggacatacttctgaataacacaggtggtattccttccttgttggaacctcctggaggaagagacagatgattaacaaatccttccatcaacccctttgaccatgacatcaacagtgctccaaattatggggtaccgtattagcctatgtctatcttgatcagaatccttacctcggtgtattgaaattatytatttcgtgcctgcctctttaaagtcagggtttgccttatctattgtctaacaccatgcagtaggtaacatgcagtaggaaacatggcattaaattatttgggttcaaatcccagttatggtgtgtaaatgcctaccaggcgtgaggcacctgctaagcaggttgcacgcatcatttgaattcacaccaccctttgcaatagaacagataggcaacagaggctcatttgggctaaaggatttgatgga

SEQ ID NO: 751299 - DNA, 590 bp, Homo sapiens
tatcatttgggttttcagagaatgtgggaggtggctgttgggcttgttttcttttgcagcaaagctttttagagcatgactatgaggcaggcattgttccaggcaccctacactgttgcaccaaagtcccttaagagctgacgttcttgtggtaaagacagataataagcaactaaatgaaatactaatacagatcatgtcagtcaatgaaagtgatatgaggaaaatagggtaaaagaggggggctggggagaactcgtctctgaggaggggacaactttgaacggaggcctggctggcacagcaggtgccatcaggagacctgagagagaatgatctctcacacagaggcaaagggaataggaatgtgtgtgggaggatttcccagggagccatgaagatgacgttytgggctccaccctttatgcctctccaggggcctaggaggggccttagctattttgcatttgtaatttctcttaaagacacccccccctcaccaccagcccacatgctgcccactctgcctacccacacctagttatagaagctttagaccccataaaacctggatctgcccctgagaacca

SEQ ID NO: 751300 - DNA, 622 bp, Homo sapiens
cattcgttccaaatgcagctaatgaaatttgattatgccccatgtactgtgccaggtgctgggtataaaaaaacaaacatgattcaagcccagggctaagaggacacattctgctgaggaggcagagaaataaatcagcaattaaaattgaagtgatatcatcagtggcagagagtcctgggaagatggtgatctgaactcaattctcttcccttcagtcacactttctatttcttttctttttttttttaaactccagagttctctttattttctttccttttttttattattattatactttaagttttagggtacatgtgcacattgtgcaggttagttacatatgtatacatgtgccatgctggtgtgctgcacccattatctcstcatttagcattaggtatatctcctaatgctatccctcccctctcccccaaccccacaacagtccccagagtgtgatgttccccttcctgtgtctaggtgttctcattgttcaattcccatctatgagtgagaacatgtggtgttttggttttttgtccttgcgatagtttactgagaatgatgacttccaatttcatccatgtccctacaaaggacatgaactcatcatttt

SEQ ID NO: 751301 - DNA, 654 bp, Homo sapiens
ataccctggccccgatatccccagcaaggtgggaggtctgtatgtacatacctctaaaaagggggctgaatccagggggccaagcagcatccgtttgcaggccccacttccactgcacctcacaagatgagacttactagcttggaattccargcagccaccggcaacagggtggatggagcctgcctgagacaggatggagcccccggggggagaagtgggctgtgatttttgttgtttggttgactcagccattccagcctgcaggctttggagagtccaagcagtccagatgaggaagggtcccccaagctcagcacagctgctttgccagaatgtgtccagattgcttctttaaacgagaccccatccattcctcctcactgggtgggacctcccagccggggcagcctcaagcacccccactctcccatattctatagacagagctctgatctctccctaggggagagtgtgtggtgggagggctgggccaccaccttggttattgggacaactcagcaattccagcctatgggctttggagagtccaagccaacaagggcagagctggttccgcagcaaggcatggctgttttgtcgagatgtggcctgactgattctttaaatgggacctggatcttgcattctaat

SEQ ID NO: 751302 - DNA, 654 bp, Homo sapiens
ataccctggccccgatatccccagcaaggtgggaggtctgtatgtacatacctctaaaaagggggctgaatccagggggccaagcagcatccgtttgcaggccccacttccactgcacctcacaagatgagacttactagcttggaattccaagcagccaccggcaacagggtggatggagcctgcctgagacaggatggagcccccggggggagaagtgggctgtgatttttgttgtttggttgactcagccattccagcctgcaggctttggagagtccaagcagtccagatgaggaagggtcccccaagctcagcacagctgctttgccagaatgtgtccagattgcttctttaaacgagaccccatccattcctcctcactgggtgggacctcccagccggggcagcctcaagcacccccactctcccatattctatagacagagctctgatctctccctaggggagagtgtgtggtgggagggctgggccaccaccttggttattgggacaactcagcaattccagcctaygggctttggagagtccaagccaacaagggcagagctggttccgcagcaaggcatggctgttttgtcgagatgtggcctgactgattctttaaatgggacctggatcttgcattctaat

SEQ ID NO: 751303 - DNA, 595 bp, Homo sapiens
gctccaaatataaggggacttagagtctaagcaaaataaatgagtagataaaaggaacttttgaattactttataataaagacaatttaagcagtgtactttatcctaagatttaaattatgtttactttcatgatctaaactttagattgaaaagctctgaaatcaaactgacttggatacaaatccttgctctatgtcttcccagaagtgtgatcttgggcaaaattcatcagcttctctgagcctctggctgtcatgcacagtaaggtgtgaactgatgagataatgtataagaagtttatgatacaatgcctgcaatgatgaagaagctattatcaatttcatgacacaggcaaggtgaaatgagaaaaatgaggtaagamtcaatcgacttgttttatgaaagaatttgaaaatcactctttggagaactggcatagaatagtaaaatgtttatgatgttttagtgcacattgacagtgagagtctgaggaagatacttcctctttagtcccagttttatcatctgtaaagtgggaaaaacaatattttctacacaaggtcattgaaagaaagaaatgattactgcaaag

SEQ ID NO: 751304 - DNA, 617 bp, Homo sapiens
cattcttctgcatatggatgtccagttttcccagtaaaatgtattgaagagactgtcctttcctcaacgtatatccttaaaatctttgccaaaaattagctcactgatacatggatttctcagttctttattctgttccattggtctctgtgtctatttttatgccagtaacatgctgatttggttactatagctctgtagtgtaatttaaagtcaggtaatatgattcttccagttttgttctttttgctttggatgtctttygctactctaggttttttgtagttccatataaattttaggatttttttttctatttctatgaataacgtcactggtgttttgataggaattgcattgaatctatagattgttagggtagtatagacattttaacaatattgattcttccaacccatgaacataaatatctttctatttttggtgtcattttcaatttcttgcatcaatgttttctggttttccttgtagaggtctttcatatctggttaaatttattcctaggtatcttatttttttgtagctactgtaaatgggattgctttcttgatttctttttcagattattcattgttgatatgtaaaaacgtgactgg

SEQ ID NO: 751305 - DNA, 607 bp, Homo sapiens; identical to SEQ ID NO: 739503

SEQ ID NO: 751306 - DNA, 521 bp, Homo sapiens
tcactctttctgctcctagtcagggtttttctactctccctagcggtaaatgatttgcttctcccagggaaaaaaaaaaaattaaatttaacgtgggtctttagtgattgcatttcagacttccttttgaacaagtacgtattctttactaataaaraaaaaacccggccgggcgcggtggctcacgcctgtaatcctagcactttgggaggcggaggcggacggatcacgaggtcaggagatcgagaccatcctggctaacacggtgaaaccccgtctctactaaaaatacaaaaaattagccaggcgtggtggcgggcgcctgtagtcccagccactcgggaggctgaggcaggagaatggtgtgaacccgggaggcggagcttgcagtgagccgagatcgcggcactgcactccagcctgggggacagagggagactccctctcgaaaaaaaaagaaaagaaaaaaacccaatagaaaaatgaaccagagatacaaattagtcgtttaaatgaaataa

SEQ ID NO: 751307 - DNA, 529 bp, Homo sapiens
ccagagatgtttcctacaaatcctcttaccacacagacagaccctagtgaagaaacagctatgttaataccttctgcttcttgtgtacctcctataagccaaacactttgcatttgcatctcttttaattgtcacagtaacagtacagtactagtatccttattttaccagtgagaaaagagaattcagaaagattttgtaaggaggaaatgactcaccatcacttcaaaaagtctcctcttattagtgcctccttcaactcaggaacttgattaatgcttacataatcatcacatttaatcttcctacaactccagtcagatacctatccttatctcaaatttatatcygagggaattcaaagaaaataaaatattaggttcatatcagagactcttcctatgagacactcttagcaagggtattgggcaacatgaagtggtgatgccatctcactgtgagactcccaccccacccgcaatacagggttgaggcctctgttgcaggtttttcttgattttcgttactg

SEQ ID NO: 751308 - DNA, 401 bp, Homo sapiens
ctgtttcaacaagacagccaaccagcattccttcctgatgagagaccaccgaccatggagtggttctggaagtctacaggaagatgagtagtgagggtttttgtgtcctctgcttcaccttttgatatgagaaggccaaaaactccaccctcagatggtgataatgccccattttttgcacatggktcccacagagaggcatggagcaaaattgcacatgcacgtatttctcctttcatgaatattcatgactcctcctatagcttattgaatatgtatatttgtccacctcattcagtataaatccctgtcttatacttttcactctcaaaatatctgtttctggcttctggccagaggctacacttcgtggcctgtcagaatggccaccctgcaggctg

SEQ ID NO: 751309 - DNA, 656 bp, Homo sapiens
cgtgaaaaatgctgtcttgattcttgttgagcattatcagttgaaaatgacaatcctgactttcataaaataaaaatttgtataaatatgttcctgatgctcataataatattaaaactgagctttgaaagtatcatttctaagcttgtaaatgggatttgcaatcctttttcagaatgtcaccaaatctgaatttgacctggatgtaatcaagtgctgctagctgaacattccttggggacctgaccattcacatctaagtaaaacttttagctagagagaaatagccctamtccatccatttaatgatagttgccaacttccctgaagaagtaagatgcaacagatgatttttactcagtgcacactattttcaggatgagagttaatttgtgttaccaaatgctatattccatctatcacttccctgactaattaagtccagatgagccttacatgtgagacttttttttgttgttgtttagtggccctgaccaatatttgaaatagagatattttgttcatttcaattcaaatgggtgggaagcaggtaaccagccttcactgagtgcctgtacagtaatttaaggcatcacactgttggcggttgatatggcttgactgtgtccccacacaaatctcatcttgaattgtag

SEQ ID NO: 751310 - DNA, 583 bp, Homo sapiens
cagatgatgatggtttctgcttgtgctgccagggaatgttttcactttcttaatatgccttgagtttggtaactggttaagcttattttgtcattttcttttttttttttttttctttcttttttgaaatggagtttctctctttttgcccacgttggagtgcaatgggggcatgatcttggcttactgcaacctcygcctcccaggttcaagcgattctcctgcctcagcctcctgagtagctgggaatacaggcatgtgccaccacacgaggttcatttttttgtatttttggtaaaaatggggtttctccatgttgatcaggctggtctcgaactcttgacctcagatgatccgcccaccttggcctcccaaagtgctgggattaccggcatgagccactgcgccaggcctccattttctttctttagcacattatgcagtaaatagttgaatccattatttctttctatgaaacaaaggtaataacaacacagaattcactggcccattataaatatcaaaacagaaaatccaagtaaaagtatttagcatatcgtgtttggctcatagtaaactataa

SEQ ID NO: 751311 - DNA, 583 bp, Homo sapiens
cagatgatgatggtttctgcttgtgctgccagggaatgttttcactttcttaatatgccttgagtttggtaactggttaagcttattttgtcattttcttttttttttttttttctttcttttttgaaatggagtttctctctttttgcccacgttggagtgcaatgggggcatgatcttggcttactgcaacctctgcctcccaggttcaagcgattctcctgcctcagcctcctgagtagctgggaatacaggcatgtgccaccacacgaggttcatttttttgtatttttggtaraaatggggtttctccatgttgatcaggctggtctcgaactcttgacctcagatgatccgcccaccttggcctcccaaagtgctgggattaccggcatgagccactgcgccaggcctccattttctttctttagcacattatgcagtaaatagttgaatccattatttctttctatgaaacaaaggtaataacaacacagaattcactggcccattataaatatcaaaacagaaaatccaagtaaaagtatttagcatatcgtgtttggctcatagtaaactataa

SEQ ID NO: 751312 - DNA, 610 bp, Homo sapiens
aacataaaggggtagctaggctgtattgccgtcttgtttcccatatgaccataggactggatttgtgctgcagttggaagagactaaagtgggcaatgagttttcacttggaagcaaagcacaattttgtcactttgatgctttggcagttttgggctgcactagatttcaatacccagattaggacagcatttccccaaaaggaaaaatgaagaaacttttgtggcaggcagagcargcaggcaagatactcattagaatcaacagccactgcagcagatagtgaagttgaccagaagagacctgaggctaagacagtcacaccgagaggcaaagactcatccttgcactatgtaatgcccggtatatttgagagataggtggtttgtctctccaggaactgtctttataaatgtggtgagaactgaggtagcaaaaatgaatattaacgttaatacaaccttagagtctatggagcccaaatgggacatgcgggttgtatacaaaattataattaacatataacaagtatctgatgaatatgaatacaaatagcaatgaggacacataatagtatagaattaactcatggagaacctaagggaggatt

SEQ ID NO: 751313 - DNA, 604 bp, Homo sapiens
agaggactttgacttgcattttggataccagctcagccacagtaggatagggcaccaggcagagtcatgaggccccgttccaggccttagctctcagatgatatttcatttctagacacaacctggaccaaaagtgaacccagtgccttgaaggtaaggatccagtcctggtaggattcatcacctgcagattaaagaactcttgggccctgaataaccagcagtgataacgaagggaatataccatgtgtcttgggctttgagacttactagcttcaggggtgacccagcatattcccagctatggtgcctacagtgaaatactactaatgtttcagaaaagcagagggaaaaataaagggaactttgtcttgcatcctatgtaccagctyggctacatgggggtagagcaataagctggctcttggggtcccaaagtccaggcttaggctcttggacagcatttccagatgtgctttgggacagaggggagctcactgacctaaagagcgagtctcaggcctggcagcattcatcacaagctgacagaagagcccctaggctctcagtaaacatcagtggtggcctgaaggaatcccctgtg

SEQ ID NO: 751314 - DNA, 586 bp, Homo sapiens
gtgaaatactactaatgtttcagaaaagcagagggaaaaataaagggaactttgtcttgcatcctatgtaccagctcggctacatgggggtagagcaataagctggctcttggggtcccaaagtccaggcttaggctcttggacagcatttccagatgtgctttgggacagaggggagctcactgacctaaagagcgagtctcaggcctggcagcattcatcacaagctgacagaagagcccctaggctctcagtaaacatcagtggtggcctgaaggaatcccctgtggaccggtggtgggggtggccacagggaaaggcagctctgcctgtggaaagtgaagagtaggaaagactttgtattgtggtttgagtgcaggcwtaatgacagtagaatagaatatcaggaaaattgctaagctgtttaactccagtccctggctcccagacagcactttggacattcccggagcctgtgggaactcacggccctgaagggaagaaactggggcaagacctagtgctgtgcaggtttcaggtctaacccagtgcagccctagtggtggtggccacagacttacttgca

SEQ ID NO: 751315 - DNA, 671 bp, Homo sapiens
ctctcttctccctttcttcgggtgggcctagcagtctgacgccggctcttcttttgcaggtgtttttggatgagacaatgatagggattctgaatgagaataataaggacctgcacattcctgaactcagggtatgtaatttgagagtccaggtgatgccctcgacccccctcaaatgcagacggagcctggtcctgagacagtcrgcctcccttctccacccctgctgctggtgctgctgctcacctggggcggcggcaggaagtgtgcagggctggaagccaaagtgcctcccaggccctggcccctcaggagctaccgcatgtgtgctggaggggaggggatttcctcaccaagtcctgagcctgtcctcagcccctggttgggtttctgtgccttttggagttggttaaaggtacagctgagtctctctgcctttcctagtaggatcagcagaggggaaagggaagattgactataggaacacaaggcagtccttaggtgaagggaagactgctgggccctggagcctcctgttctcccatgtgtctctccatgtgggactcagtgaaaaaacgggttgtcgggtagacgccctccatggctgcgtggtctccatgacctggcctgtcccagcaggactgccgatacctgaggatcctggtggagaa

SEQ ID NO: 751316 - DNA, 586 bp, Homo sapiens
cagggtgatgctggggttagtggatggctgcaccttgatgtggcctgaggacgtgagcttcaactctgagagcttcaggtcagtaagtctcattggtgaccctgatggatagagcccaggggtcagaaagcctactggtgacaggcaagagccacacagttgcccccatagccttctggggccccagatatgcacacgctcatcacttgtcctgcccttcctgagttactccttcaccagcacctccagagtgcccagggtgagccccagacgacacrggacactgcaggtcagacatgaagacagagcctttgtcctggaggagcatggagcctcccacgcccacgccactcagctccttcctgcccgaaccactgtcccctgcgaggtcagccgccacccatctcagagggtgggtggaggaggagcaaaagcagcttctctctctctctctctctctctctctctcgtaaaatgcattcaagcaatctaatagtagcagaaatctatttagattttgtgcctcaaattattctggctttcgggaatatacaattgctcatacaataaagactgactgcccccc

SEQ ID NO: 751317 - DNA, 553 bp, Homo sapiens
taaacccagccaggataagatagaaggaaggttgtttacacaccggcccttcaataccaggtggggctgctgttttggaggccaaagaacatccattggaataggagaagtcctgttagaaaccagacgaagacagaggagcccaactgtcattttcttgaatttattttattatttttatttttgatttttcaaaatgggttttgctctgttgcccaggctggagtgcagtgktgcaatcaaggctcactgcagcttcgacctcccagactcatgagatcttcctgcctcagccccctgagtagctgggaccacaggtgcatgccacaacacccagctaattttattttattttgttgttttgtagacgggggtctcactgtgttgtccaggctagtctcaaactcctggactcgagctatcttcctgccttggcctctcaaagtgctaggattacaggcatgagctaccacacccggccttgaatttattttaaatgggctctgagtcagtcctaccagagaaaggtgtctaaatgtataatgcaagttaa

SEQ ID NO: 751318 - DNA, 599 bp, Homo sapiens
aagttatgtgcaaaagctatgaaaatgtgaagatgggagcactagagacattccagggagggcaacatttgagatggccctttaggaatgagtagcaatttactagctagacaaggagataaaggcaattccaggtaggggaatggctatgcaaagacacaaacatatgcggtggtaggacgtgatttgagaatgggtgtggttgcctaggatattccaggtagtcaagagatgacaatggaagggagggaagccagggtttgaacagcagcaacagttacagaggtgagcatttctggtactttctagacacctgatayggaaactatgttacttatatatgttatctcatttaatccccgttattattatttttataggtaaataatgtaatttaagtttttcattttgcatgtcaaatgtgaaaatctgtaagagtaagtaactttgattgtacaacacgtaaagatccttgaaattagttgtaattaaaaatattttgctcttttaaaaatgggaattaaactttgattttttgttctaattaaaaatgaccattttcttttttaagaataaagatattagacactagtgaactc

SEQ ID NO: 751319 - DNA, 480 bp, Homo sapiens
gttcaagttgctggaacacagtaattggggcaggaagtagggggagatgagggcaaggatgtcatggggaagaatgtgcagggttttgcggtccaaggaaagcactttggcttttctgctgaggaaggtgggagccatagagggttctgagcagaggggggatgcgacctggctcaggtgttcacaggcgccctctggctgccgtaggggggacagacagtgggggatgggagcagggggggccagggtggaggctgctgcactggtccaggtgatcagtagtgaaggctgggccagggygggacagtggcagtggggtgaagtgtgtggattctggataaggaggaaggtagagcctacaggatttagagtgggttggatgtgcatgtgaagaacaggtgtcgagaacaacctgaacctggggacatgagcacttaggaggacagagttgccattagtgagttggggcagattggaggt

SEQ ID NO: 751320 - DNA, 461 bp, Homo sapiens
agttactgtcgcctttgttaggagttatctttccccagggatcccagcgcctgggcccagaggggacccgccagccaggagggggaggatggatgaggaggccagtgcaggctggacagcggtggggcaggcgagaggcggtgcctgagtgaccacggttccgtgccaggcagtgtctagccgggcgggcggggagcaggcaggcgggggcagggctytgctgcaggcctgttgggtgggggtggggagggcaggccgacggagtcacagcaggggggcgtgactggaagccacctctgaccaccacctctgcctccacaggctggacaatttgctcaacatggcctacggcgtcaagaggtaacagtgaccccgccccactgtccccacccctcaccatccatgcccctgatgcacccctccccagctcacccccagggctgcaggcttagccttgtttg

SEQ ID NO: 751321 - DNA, 461 bp, Homo sapiens
agttactgtcgcctttgttaggagttatctttccccagggatcccagcgcctgggcccagaggggacccgccagccaggagggggaggatggatgaggaggccagtgcaggctggacagcggtggggcaggcgagaggcggtgcctgagtgaccacggttccgtgccaggcagtgtctagccgggcgggcggggagcaggcaggcgggggcagggctttgctgcaggcctgttgggtgggggtggggagggcaggccgacggwgtcacagcaggggggcgtgactggaagccacctctgaccaccacctctgcctccacaggctggacaatttgctcaacatggcctacggcgtcaagaggtaacagtgaccccgccccactgtccccacccctcaccatccatgcccctgatgcacccctccccagctcacccccagggctgcaggcttagccttgtttg

SEQ ID NO: 751322 - DNA, 611 bp, Homo sapiens
aatgggacattaacattttaagaggatgatgcagaagcttttagagataatattctccctgccctattctgttgatgctgtcttagaaaatgcagcatattttttccctaagcaatgatgagttcataaaaaacaggttattacaaaagacataattttttttgcagtcctccatcacttcaaaaaatcaaaatttgggttacaaatagaaagtttaccaaaaggagagaaagcccaaactaagcacccatcaagtccaaatcaacaatgaatatatctctctgtraacatccaccacagtataacagtaacattgcacggtcctagcaggcaggcaactgtagtggctaagtctcaccctttctcattttctttttttccttttttgtgtctcctcttgttgaagggatttctctctcctctggcctcctcaaaaatttcctccctcaatttcccccactgtgtcctgcttcatcactttctttcagtctgccttctggcttactctcattagcaaacaagctccactatctcagagtaactaacctttcatttccccatccaaactatagccttatatccctcatttttaatagtcagacttctctggt

SEQ ID NO: 751323 - DNA, 611 bp, Homo sapiens
aatgggacattaacattttaagaggatgatgcagaagcttttagagataatattctccctgccctattctgttgatgctgtcttagaaaatgcagcatattttttccctaagcaatgatgagttcataaaaaacaggttattacaaaagacataattttttttgcagtcctccatcacttcaaaaaatcaaaatttgggttacaaatagaaagtttaccaaaaggagagaaagcccaaactaagcacccatcaagtccaaatcaacaatgaatatatctctctgtgaacatccaccacagtataacagtaacattgcacggtcctagcaggcaggcaactgtagtggctaagtctcaccctttctcattttctttttttccttttttgtgtctcctcttgttgaagggatttctctctcctctggcctcctcaaaaatttcctccctcaatttcccccactgtstcctgcttcatcactttctttcagtctgccttctggcttactctcattagcaaacaagctccactatctcagagtaactaacctttcatttccccatccaaactatagccttatatccctcatttttaatagtcagacttctctggt

SEQ ID NO: 751324 - DNA, 610 bp, Homo sapiens
tgatactatttcattttaaaatgtggatccaagtttcttgccatttgctacctgcctaaagaaaatgtttaatacagcttgcagggcagagctgctggcaatgaattccctcagtgtttttctttgtttgataatgtctttatttctcctttgcacttgaaagataatttcactggatattgaaatctagtytgatagttgttttttcctttcaataccttacattgtttttactccagtctcttcttgcttgcctggtttctcttgagaaagtatgctgtaatccttatctatgctccctaaaggtaatgtgtctcccctcaaccacccaaggaccatccttttcccctggctactttaaagatattctcttttcttttgtttgtctgaagtttaaataagatatgtataaatgtatttcctttggtattcattctatttggtgttctctcatcttcttgggtctgtgatttagtggctgttattaattttggaaaattctccaccagtgttactgtatacgttgtttgtactctattctctctttcttctggtattgcacttatgtgtgtcacatgttttgaaataattgtacagtcattgaatggtc

SEQ ID NO: 751325 - DNA, 650 bp, Homo sapiens
aataccaattaaattaataaaggaagcatcacatttatagtgtatttccagaattaaggtggagacagcaggagtcacccgaagaatggaaggatggtgccaatgacttgaaaaggagtttagaagacaccagtttggtgagtagatgatgttttgggttttagggatgtggtaacagtaagatattcctgctgaatgtgtccagtgggcaactagagacaaggaacargaactcagtgattaatgagggtttgctttgattgaagatggggctggaaatgtaaatttaggagtcattagcatagaagtgatgtgtaaagccatgagaatggatgagctctcccaggatgtgttaaaggaataaaaggcagagagactttctggctttgggaaggcgtactgctgagggcaagaggaaatgagagaatcagtaatggaaacaaaggaaaagaagagatgcagagtggaaggtaggagaaagtgagtgagacacaggaccgaggtcagagccaaggtcaggcagatacatctgctatgtcgttgaagctgagcagtcagagaaaacagacatgaagaatctacaattgattgggtgatacattctttcaaagccactgcaaaaatttaggagagtaataagatgttccatg

SEQ ID NO: 751326 - DNA, 564 bp, Homo sapiens
gcttgggctctactccctctatccaaagcacctcacctaaaccttctaaacactgtgcatgaacaaggagatgaatcaactcaagaactcttgaccccagggactcaaagcctgggttatttgcctgattatagactactagctcaattaccacatgactcaatcttagcaaatgttcattaattcactcaaatataatcaatcacctacaattttcaatgtaacatgcattttttaaatagactttattttgtagagtagctttaggtcacagcaaaattgagcagaaggtacagagaattgccatctgcttcctgccccttcacaggcacagcctctcctattagcaacatcccccaccagagtggtacatttgttacaatcaatgagcctacattggcacatcrttatcaccctaactccctggtttacgttagggttcgctcttgctgttatacattctacgggtttggacaagtgtatggtgacatgtgcccatcatgatagtatcatacagatcagtttccaaaaccctctgtgctctgcctagtcgtccctccatcc

SEQ ID NO: 751327 - DNA, 613 bp, Homo sapiens
ggtcagtggagcatcagaacacatacatttattgataagttggcagtcttacacaggtgcagtttgtggtgtctcaaaacaattatggtagtagcattaaagatctgtgatcacagatctccgtaacagatataataataacaaactttgaaataatgcaagaattactaaaacgtgacacagagatatgaagtgaggacatgctgttggaaaaatgattccaacagacttgttcgatgcaggattatcacaaaccttcaatttgtaaaaaatgcaatatctgcagagcacaataaaatgcggtatgcctcatcaacwcattttcccaggtattttatgaatttttgtggggttttttagaagtggaatttctgtttccagagattttcttggtcctccaagaaaatctttatttatttatttttaacttttatttatttagagataaggtcctgctccgtcacccaggctggagagtagtggcgtgattatagcttactgtaaccttgaacttctaggtcaaacaatcctaccgcctcagcctcctgagtagctgggactaaaggtgtgcactgccacacctggctattttttcccaatttagaaacgttgt

SEQ ID NO: 751328 - DNA, 625 bp, Homo sapiens
gtatgtatttgaaatatatatatatttaaaacagcaagtggtggccagccaagaaaagcctcccataatatcgttttccaaaaactgaaaatatactttaacttgaagggtactagggcacacttccaaattaggcattttcttttagttaaaaatcataattggccgggcgcggtggctcacacctgtaatcccagcactttgggaggccaaggcgggcggatcatgaggtcaggagatcgagaccatcccctggctagcacagtgaaaccctgtctctactaaaaatacaaaaaattagctgggcatggtggtggatgcctgtattcccagctactcgggaggctgaggcaggagaatggcgtgaacccaggagtcggagttygcagagggccactgcactccagcctgggtgacagaccgagactctgtctcaaaaaaaaaaaaaaaaggaaaaaaaaatcataattgacagaggagatcaggtgataaattctaaaaacaaaccccacttctcaacaaagaggcccttacaatcaggcctttctccatcttaagatgtcttttgacctgattcttttacatatttcctactgattatgctagtagccacatcttagctaaa

SEQ ID NO: 751329 - DNA, 714 bp, Homo sapiens
tcacccgcagaaatgttgcattttaggtcaagacttggatcccagaagcctaatccaagctgaaactgcccccacaaaattcacatttcactgctacttgctacctggaagagcttaggcaagttatttactccagactcagtttcctcatctctaggtacaaattaagtcatcatacttgcaaaatcccaggaacttggctctgcaagaggccagtctaaggaactgaatacgcttcaaagcccactgagaggcctgacatgacagcagaccctggatagatccatctcaggatgcatccatctcaggatgcatctcaggatgcaggcatgccatgagccaatggccatctgagttaagcttaaaaattagtccaaaatgatgtctctgatattatagccttgggatgatcagggaccatcactggggctgtctctaaggagataacccaatttgagaatggaaggaatgagcagraaggaattggctggtgttttctcaatgcctagcaaagacttcttgctgttggttttcaaagaaaacagaaagaaggacatggcataactaacagacataacaaagaagaaggaaaaaatagcagtcctatgttttctacccacagctagcctcaggaaactagtgcatagagtcccaagatctggatattggaggggacataaaacagcagccagacagctgtgggtaagctgcagg

SEQ ID NO: 751330 - DNA, 570 bp, Homo sapiens
ccgggttcatccaagttgttgccaatgacaggatttccttcctttataaggccaaatagtattccattatgtacatatcccacattttcactatcctttcatatgctgatggtcacctatgttgatttgatatcttggctactatgaataatgctgcaataaacacgggcataccgatatatttttgaaatatcagttttctatcctttgaatatacacycagtggtgagattattggatcatatggtagctctattttaaaattttcagaaacctctatactgttttccataatagctgtactgtaataatttatattttgcctacatttatttgtgacggaatctggaagacagacagacaacattaggagtaggagaaggcaagtaacatgagtttcaaaggagtagcagcttctaaaagaaagtgaatgagcattagtctagaacaaagcctggaaaatgctttgcatttgcagtaaaaatgctccccaaatgggtgtacatctttaaaatattaagggctcccataggttctaaataaatggcaccaaagtgctaatggagaaaa

SEQ ID NO: 751331 - DNA, 568 bp, Homo sapiens
cccaaacagcatggtactggcataaaaacagacacatagaccagtagaataaagaacccagaaacaaatctgtacatccacagtgagcacattttcaacaaagctaccaagaacatacagtgaggaaaggacagtctcttcaataaatgctgctgggaaaactggatatccacatgcagaagaatgaaactacactcctatgtctcaccgtatacagaaatcaaatcaaaatggattaaagacttaaatctaaggcctcaaactatgaaactattayaagaaaacattgggaaaactctctaggacattggactgggcaaagatttctttcaaatatcccacaagcacaggcagccaaagcaaacttggacaaatgggatcacatcatgttgaaaaggtgctgcacagcaaaagaaacaatccacaaagtgaagagacagcccacagaattggagtaaatatttgtaaactatccatctgacaagggatgaataaccagaatatataaggagctcaaacaactctataggaaaaaaaataataatctgactcaaaaatggacaaaaga

SEQ ID NO: 751332 - DNA, 569 bp, Homo sapiens
tatttatcctatagcccagacatttcagtcttaggtactcacccaagagaaattggttgcttgagggcctgaagggagaactggtagggggtgctttatgagtgttgtcagttaggccctgggcttgcgatccgaggagggaagaggagagaggctgattttggtatcctgagattcttcatggacccaagaagccaaagggaaaccctgaagtgggttgaaggggaccaggaaactcaaaggctttctttaggtgcatctgaagagatctgctgcttgctttgttctttactaccagacttgggccaacagagacccctgtgtcttctagcatctctgggactgctcctgttaggggaagaaggtatctgagttrcctaaggtgaatccgtacgggtctgcagcaacctcagttcttacctcttcagagcagcaagaattcgactaagaggcataaggcaaaaaaagaccgaggcaagtctcagagcaggagtggaagcttattaaacagctttagagcagaaagtaaagtacacttggaagagactccagtgggtgacttgaaggac

SEQ ID NO: 751333 - DNA, 599 bp, Homo sapiens
ggttagtacaagctcctccattgtgctcagatgttggagatgtagcttctgcttatccacaagtgtcccaaagccccaagggactggtttaggatttatcctctgtcacctggatgatcacaccagacttctaactggtctctgcttataggcttaccctttccaatccatgctaactcaggaaaatgatacatctgttgtatttttccaaaatttcttatagtatacatttctcagataataaactatggcttctggcttcccctctctacctacagtgctgcagacttggttcaaaaattaggaattggcaagccatgctttgggaggcccaagtgggaggattgyctgaggttaggagctcgagacctgcctggccaacatagtgagaccccatctctagaaaaaaaaatgagcttggcatggtggtgcactcatatagttctagctacttaggaggctgaggatcactggattccaggagttcaaggctgcagtgagctttgattgtgccactgtactccagcgtaggtgacagagcaagaccttgtgtctaaaaaacaaacaaaacacaattaagaactgaatttctaaagtat

SEQ ID NO: 751334 - DNA, 569 bp, Homo sapiens
tatttatcctatagcccagacatttcagtcttaggtactcacccaagagaaattggttgcttgagggcctgaagggagaactggtagggggtgctttatgagtgttgtcagttaggccctgggcttgcgatccgaggagggaagaggagagaggctgattttggtatcctgagattcttcatggacccaagaagccaaagtgaaatcctgaagtgggttgaaggggaccaggaaactcraaggctttctttaggtgcatctgaagagatctgctgcttgctttgttctttactaccagacttgggccaacagagaccactttgtcttctagcatctctgggactgctcctgttaggggaagaaggtatctgagttacctaaggtgaatccgtacgggtctgcagcaacctcagttcttatctcttcagagcagcaagaattcgactaagaggcataaggcaaaaaaagtccgaggtaagtctcagagcaggagtggaagcttattaaacagctttagagcagaaagtaaagtacacttggaagagactccagtgggtgacttgaaggac

SEQ ID NO: 751335 - DNA, 621 bp, Homo sapiens
tatttccagcctcagaatcaacaatttctccaaataatcctgtttgtattactggaggatgatgagagtaatcaaaatcaagtgtgcttgatgctactaaggtaccagtgttttctgtcctgcctccttcggctacatttaaattttttccctttgtcttaattttcagtttgattgtgaggcatctacatacaactttctttgtttttaagcctccttgaagttctgtgagctttttcaatctgtaatattttagctttttccctaatttgaataatttcacaattattgcctcaaaaacaaaaatcagtcccattctttctctcatttcattttgagacccaaactacacatctggtagaccttttgatattgttcctcaagtacctgaggatctctttcttttcttttttgttctttttttctcacttcttcagttggataattctgctgatagaccttatggttaatttttagwagtaggattactgtggtcaaagagatgtataggccagaaacagtggctgatgcctataatcccagcaccttgagaggctgaggcaggagaatcgccttgaggccaggagttcaagaccagcctgagcaacacagtgaagccct

SEQ ID NO: 751336 - DNA, 655 bp, Homo sapiens
cattgagcactactgtagttttcataccactgttgagaaatattattcttgcctgggtgcttaaagaattgttaaaaagtcctatgagctagagattttaataatttcttcctattgcctaacccttcatggagaacttgctttatcctcagccctatgggacagctctaatcactgtatgaccctcctcttttgggcacagataatgggccatagatggataactgtccagagctggactattaatcatcttatccaggaatctgtaactggggaattagactgagcgtgctacctgcaggaagttgaattcagatagtgtaggctcaagtggtgacgtttcctttgggtgcagccattgtcaaccatgtataaacaagtaaataagcagagaagccagtttgcagagaaatttgaatgaagtagtcatagagtgaaaatgagaggtagctgtgtgtgtgtgtgtgtgtgtgtgtgtgcrtgtgcgtgtgtgtgagagagagaggaacgcccactggaggcattgctatagagcacatggcaaggtgcactatcttgagagtagagaattttcttctctgtaactcccctctttactggctccagcaactctagccagcccagtgcctggtcccgtctgtgcatgtctagggga

SEQ ID NO: 751337 - DNA, 554 bp, Homo sapiens
catggccaccaggagcgagtccagattccttaccgtggcctgggttctgcagttagatggggctgcgctcaaattccatctctgttgctataagttatgtgaccagctgtgttaacctgtgagggcagacctcagttttgtcatctgtaargtgggcatcattattagtagccatcacttttctttttacttactttccttttgcttttttttctttgagacagtctagctctgtcacccaggctggagtgcagtggcccaaactcagctcactgcaacctctgcctcccgggttcaaacgattctcctgcctcagcctcccaagtagctgggattacaggcgcccgccatcatgcctggctaatttttgtatttttagtagagacggggtttcaccatgttgaccaggctggtcttgaactgacctcaagtgattggcccgcctcggcctcccaaagtgttgggattacaggcgtgagccaccttgcccggccactaatattcttatcactgttttctctccagcatttcccctcactcattcttatatgatc

SEQ ID NO: 751338 - DNA, 554 bp, Homo sapiens
catggccaccaggagcgagtccagattccttaccgtggcctgggttctgcagttagatggggctgcgctcaaattccatctctgttgctataagttatgtgaccagctgtgttaacctgtgagggcagacctcagttttgtcatctgtaaggtgggcatcattattagtagccatcacttttctttttacttactttccttttgcttttttttctttgagacagtctagctctgtcrcccaggctggagtgcagtggcccaaactcagctcactgcaacctctgcctcccgggttcaaacgattctcctgcctcagcctcccaagtagctgggattacaggcgcccgccatcatgcctggctaatttttgtatttttagtagagacggggtttcaccatgttgaccaggctggtcttgaactgacctcaagtgattggcccgcctcggcctcccaaagtgttgggattacaggcgtgagccaccttgcccggccactaatattcttatcactgttttctctccagcatttcccctcactcattcttatatgatc

SEQ ID NO: 751339 - DNA, 554 bp, Homo sapiens
catggccaccaggagcgagtccagattccttaccgtggcctgggttctgcagttagatggggctgcgctcaaattccatctctgttgctataagttatgtgaccagctgtgttaacctgtgagggcagacctcagttttgtcatctgtaaggtgggcatcattattagtagccatcacttttctttttacttactttccttttgcttttttttctttgagacagtctagctctgtcacccaggctggagtgcagtggcccaaactcagctcactgcaacctctgcctcccgggttcaaacgattctcctgcctcagcctcccaagtagctgggattacaggcgcccgccatcatgcctggctaatttttgtatttttagtagaracggggtttcaccatgttgaccaggctggtcttgaactgacctcaagtgattggcccgcctcggcctcccaaagtgttgggattacaggcgtgagccaccttgcccggccactaatattcttatcactgttttctctccagcatttcccctcactcattcttatatgatc

SEQ ID NO: 751340 - DNA, 604 bp, Homo sapiens
tccaaggttttttgcctaagccaaatggtgaggaagacttgggggaacactgtttcaggagaggaaaccaagagttctgttctgaaccctgtattagttatctattggtgcataacaaatttccccaaaacctagcagcttaaaaccgtagacattcatcctgtcactctgagtcaggaatctggctatggtttagctgggtgattctggttcagtgtctytcctgaggttacagctgagatgtcagttggggctgtagtcatctgaaggcttgaggggctggaggctctgttcacaacatggctcagagacatgcacagcaggccttaccacgtggccctctccacagtgctgcttgagcgatctcctaacatggcgactagcttccctcaggcaagtaagccaggagatgccaaggctcttacatattttctgacctagcctaggaagccactttctgttatttccacaatgccctatcatttgcacatatcagtcatattcattcagtaggcgaggcacccacacaagggtgtgaataccaggagggaagaatccctggtggccatcttggagggttgctaccacagatcgttagccaact

SEQ ID NO: 751341 - DNA, 475 bp, Homo sapiens
acttcaagtactcacaaaattaaaattatcaatgaaaagttgcaaacttcaagtactcacaaatacgaatggctgtaagatgatgtatttcatcagatacagatgtagatatgctagcaggtggcagagcaatatttcacagcaatattgccataataccggaggcccacttcataaygaaattaggttgtgtacgcaactttgcttgacagacccacagcactctttatttgtatttgtgtgcttccagatgtgttttgaggtaattagttgagtgtgatacccagctgttcatgcagtgagcaaaattcttggcacaaatgctgagaacgttggcaatggcctgtggagtattctgtctactactgagttcagtatgcagtgaagtgggcttctgcctgcctatcacccttgtgttttatttaaacaaaccctgcattttctccccgcagagcaagaccggttgtgactgtag

SEQ ID NO: 751342 - DNA, 499 bp, Homo sapiens
tttatgttttcccttcacttactacctgtatgcacatattacaagattaaggcggttgcatttttcatataatttactcatctgctttgtcttgctttgcaatttcttactaccagcagccatattctctttctccatttctcttgtcccttgaaataatcattttattctcacgggcaataggcataaatatgagttttatgatatatgtgagtagattcctcgctggttataacccaaagggkgctggtcactgagttagtgggaagcagagaggaagtccctgtatttgggctgtagggcttggtccctagcccactattaacacagagaagacattgtttaaatctccagtgacccagtggtggaaaaaacagttgccacagtgggtgacagaataaagaaaataaagataatgaacattctctgggcatatatttgtatgtggcactgggccacacacttgtggtagaagtgaatttaccaagcataaataggc

SEQ ID NO: 751343 - DNA, 577 bp, Homo sapiens
gtaatccagacactacatgatatttttgaaagccagaaaatagccaccttgagaacattttccaatgcctttcaatactccttggttatcctgccttttctttggcacctttactatgttttcatagtatatgggaaagtttttaaaagatawtttttttaatacatcaagagactttagatgaaataaaattcaattgtggggaattagtctgtcacatcttttttatgaggatatagtatgactaggaaattattgtactttttaaatgttgtgtgttaaacctaacagaaaaacgttttggtgactttagatcacaatcgtatacatgccacagatgtgctacatgcagtttggtatctgacaacacggccagttcctggcttacagcagatccacaatggttgtggaacaggaaatgaaacaggtacttccttctacaaatctcttaattattttgatcaggaatagtaaatcaagctttctcatttcattacctctgttcttttaagtttttcattaagtaaccgtttagtacatacgaaggactgtgtacgtttttttaaccacttatccc

SEQ ID NO: 751344 - DNA, 636 bp, Homo sapiens
ccgtgaactttaatttttttctttttcgctagctgattatcacattatatttaatggtattaactactaacactgaattaccttatgactagtataaaacgaaatctgtatttactttaaagtctgtaatttgaacatttcattaattcattatttcctttcctttataacaaaattttaaacatacaaagcatttatttcatttaccttactcactttagaggcagtctaacacagtgacaaggttttgtagcaaacatacctgaatttgaaacctaaactttaatcttacctgtgtgaccttgagtaatttacttaacctctgaatattttagtttcttcaatgtaaaatcaggatagtaatgtctaccttattatgggctaatatgagaaatctgataatatatgtaaagcaaataaagcagtgtataatgtatgatttaaagcacaaaaagtattattactattaatattatggaaaatgatgagataaaaatamagaaaaatatgttatagttcaaaagagatagcgataacttaaagatgaataattaacaaaaacctcacagacagggtagcatcaggcaaggccttaaaaaattggtagaaaaaaattttttaatttagaagaaatat

SEQ ID NO: 751345 - DNA, 540 bp, Homo sapiens
tgaatgatttgatatatattatggatggagatcttcagattggttgcttgccacttcaagataaatgaatccagcataaggtccattatttaaaaaaaaaaaaaacaacaaaaaaaaaaaccaagaaaaagaaatttatgaagttgttgctatagctacatcagcaggcataaaaaccttgaactttatgagaaatacttttgccctcatattgaaaatgcagcttttatgtgagtgcaggattgctataggaaaggcatacctaatatgattcgagaaaaagtgaattcattgtatgacaacttaaagcaaaaggaaggtgaaggatctaaagctgtagaagttaatgccarcaagggaaggttcgataataggaggagcagcttctgccaacaaagaagcagcagaagagttcccaggcatcattaagaaaactattgaggagtggctgggcgcagtggctcatgtctgcaatcccagcactttggaagtttgaggcaggcggatcacttgaggtcaggattggaaccagcctggcca

SEQ ID NO: 751346 - DNA, 652 bp, Homo sapiens
catatattcaacaaagaatgtgaatccataatacgtgaaagccttctacctcatctcaaataaaaggcaaaaaataaatttttaaaaacagataaatgacataaacagacacttcacaaaggaagatacacaaatgaccaataagcacatttaaaaagtamttgacggcagggtgtggtggctcacacctgtaatcccagcactttgggaggccaaggtgggcagatcatgaggtcaagagatcaagaccatcctgaccaacatggtgaaaccccgtctctactaaaaatacgaaaattagctgggcgtggtggcactgcacctgtagtctcagctacttgggaggctgaggcaggagaatctcttgaacctgggaggcagaggttgcagtgagctgagatcatgccactgcactccagcctggcaacagagcaagactccatctcaaaaaaaaaaaaaaaagtacttgacatcattagtcaatatggaaatatgaattaaaggcatcatgaaataccctcctatatgcactaaaatggctaaaatttaaaagactgacatgagcagatgttggtgaggctatggaatttttatatgttggctttttgaagtgcaaagtaacgcaactattttagattttggcagtttcttc

SEQ ID NO: 751347 - DNA, 670 bp, Homo sapiens
aattaaaggcatcatgaaataccctcctatatgcactaaaatggctaaaatttaaaagactgacatgagcagatgttggtgaggctatggaatttttatatgttggctttttgaagtgcaaagtaacgcaactattttagattttggcagtttcttctatagttaaaaatacatgcaacttatgacccagcaatcctatgcctatttaccaagagaagtaaaacatatgttgaccaaaaaaaagtcttgtgccgtaatgttcatgaaagctttatctaaaatagcaccaaaataatccaaagttcatcaatgaatagagtggatagacaaactgtggtatttttgtgtatagaatactactcagtaataaaaaaggtactactttgctttatatgctataaatggataaatttcataaacaatgtgtgatccamaataagccagacacacaagaaatacatattttatgattccacttatatggagttttagaacaagcaaaactaatctatgatgaaaaaatgagaaaagtggttctctggaatggagggttggagttgacatgggaattttcccatgatggaaaagttacgtatcttaatagggctgtgggttacacaggtgtttgcactgtcaaaactcatagaactgtaacatgtaatatctctgc

SEQ ID NO: 751348 - DNA, 634 bp, Homo sapiens
ggcttggtagtggtgaattctttcagtatttgtttgtctgaaaaaaaatgtatctcctcttcatttatgaagcttagtttcactggatataaaattcttggctgataattattttgtttaaggaggctaaagataggaccccagtgccttctggcatgcagggtttctgctgaaaaatctgctgttaatctattaggttttcctttacaggttacctgatgtttttgcctcatggctcttaggattctttcattcgtcttgactttagataacctgatgactatgtscctaagtgattatctttttgcagtgaatttcccgggtgttgtttgagcttcttgtatttgaatgtctagacctccagcaaggccagggaagtgttccttgattattccagggaattgttgcttgattattccctcaaatatgtttcccaaacttttagatttctcttcttcatagggaacaccaataattcttatgtttggtcatctaacataatcccagacttcttggaggctttgttcatttttttaaaaatccttttttctttgtctttgttggattgggttaatttgaaaactttgtcttcaagctcagaagttctttcttctacttgttcaattctattgtt

SEQ ID NO: 751349 - DNA, 375 bp, Homo sapiens
ttcccttttctgggttttatgtttcatttgctaaagaggggattatctttgtttgtttgcactgctatcaaggaatacctgaggctaggtagtttataaagaaaagaggtttatttggctcatcattctgcaggctgtgcaagaaccatggcatcagcatctgctcctggtgaggcctcaggaagcttccactcatggcggaagaggaaggsgagctggtgtgtcacatggtgacagcaagatgccaggctctttttaagaatcaattctcactggaactaacaagagcaagaccttactcattaccatgaagagagtacatgtcattcatgagggatccacccccatgacccaaacacctcccaccaggtccaa

SEQ ID NO: 751350 - DNA, 623 bp, Homo sapiens
aaggactatgaagaagtggaattaaggtgatgtggtaaaaggagggggcagtgctccttatccagagtgttgagaaggctctctgaaaaagcgacatttgagttgcaacctgaacaatgagcgggtggtagccatatgaaggcccggggaagaaaatgccaagcactgagactaacaaatcccaaggctctgraagagaacagcttgatgcatccagaggacagcaagaaaatcagcagctggaacttaaaaaatgagaggaagaacggagggaaggcagtgagggacagggaggcaggaaggagctagatagtgtgagtcttacacaccctaagaaccggttccaattctattccagttataatgggaagccactggagatatttgagtagaggcatgtgatcatctaatttatgctttagaaatatgactctgtcaggcaggagaggaagaatatttaggaggctgtggccacagtcagggagaaggttgaaggggcttagggtggttgcgatagaagtggtgaaaaatggccaaattgtgggtctatttgggagcagagaatactgggtttatagactaaacgtgacattagagggaaagaaaggaactgatcatcactt

SEQ ID NO: 751351 - DNA, 623 bp, Homo sapiens
aaggactatgaagaagtggaattaaggtgatgtggtaaaaggagggggcagtgctccttatccagagtgttgagaaggctctctgaaaaagcgacatttgagttgcaacctgaacaatgagcgggtggtagccatatgaaggcccggggaagaaaatgccaagcactgagactaacaaatcccaaggctctgaaagagaacagcttgatgcatccagaggacagcaagaaaatcagcagctggaacttaaaaaatgagaggaagaacggagggaaggcagygagggacagggaggcaggaaggagctagatagtgtgagtcttacacaccctaagaaccggttccaattctattccagttataatgggaagccactggagatatttgagtagaggcatgtgatcatctaatttatgctttagaaatatgactctgtcaggcaggagaggaagaatatttaggaggctgtggccacagtcagggagaaggttgaaggggcttagggtggttgcgatagaagtggtgaaaaatggccaaattgtgggtctatttgggagcagagaatactgggtttatagactaaacgtgacattagagggaaagaaaggaactgatcatcactt

SEQ ID NO: 751352 - DNA, 623 bp, Homo sapiens
aaggactatgaagaagtggaattaaggtgatgtggtaaaaggagggggcagtgctccttatccagagtgttgagaaggctctctgaaaaagcgacatttgagttgcaacctgaacaatgagcgggtggtagccatatgaaggcccggggaagaaaatgccaagcactgagactaacaaatcccaaggctctgaaagagaacagcttgatgcatccagaggacagcaagaaaatcagcagctggaacttaaaaaatgagaggaagaacggagggaaggcagtgagggacagggaggcaggaaggagctagatagtgtgagtcttacacaccctaagaaccrgttccaattctattccagttataatgggaagccactggagatatttgagtagaggcatgtgatcatctaatttatgctttagaaatatgactctgtcaggcaggagaggaagaatatttaggaggctgtggccacagtcagggagaaggttgaaggggcttagggtggttgcgatagaagtggtgaaaaatggccaaattgtgggtctatttgggagcagagaatactgggtttatagactaaacgtgacattagagggaaagaaaggaactgatcatcactt

SEQ ID NO: 751353 - DNA, 455 bp, Homo sapiens
cttgcccgagatctcaaggccaatgaatggcagaatcatattctaaatataggttttcaaactcctgtaccatttcctctataagaacattctttgaaactttatattcaataattaattacttaatatgtaaatatatgataaacataatataatgatccttttactacttgttataaactggataactagagtttagcacagaaatgggttttattattggtttttcccttttaggggtacccatctcarttctcagagaaagttggctaaagaagataatttcaaaagaaaaaggatatatttgcctcaaatcgcagcaataagtcagagagtatcagtcatttcctacaagtgggggctgtattccttcttgcactgcacatctacagagaagagaccctaaagtaacgaagatgtgttactaagtataaatggagaaagactgagtcaat

SEQ ID NO: 751354 - DNA, 601 bp, Homo sapiens
tacttgttataaactggataactagagtttagcacagaaatgggttttattattggtttttcccttttaggggtacccatctcaattctcagagaaagttggctaaagaagataatttcaaaagaaaaaggatatatttgcctcaaatcgcagcaataagtcagagagtatcagtcatttcctacaagtgggggctgtattccttcttgcactgcacatytacagagaagagaccctaaagtaacgaagatgtgttactaagtataaatggagaaagactgagtcaattccacataaagaaagcttcgccatgcataaggaagatgggcagtttttgaactcacgagtgactagaaaaataaaagctcaagcacttagttcatttacaattcaacactatcaaagaaataaatggttgatacaaatccccagggggaacatcattttattacacacccccataggtggcttttaaagggtacttgattaggtttcatcacaattaaactctctacacctaaaggacaccaaaacatggtagcttatataaagatgtaggagatgggcttgtaattggccttcaattaagtggtaaagaagg

SEQ ID NO: 751355 - DNA, 601 bp, Homo sapiens
tacttgttataaactggataactagagtttagcacagaaatgggttttattattggtttttcccttttaggggtacccatctcaattctcagagaaagttggctaaagaagataatttcaaaagaaaaaggatatatttgcctcaaatcgcagcaataagtcagagagtatcagtcatttcctacaagtgggggctgtattccttcttgcactgcacatctacagagaagagaccctaaagtaacgaagatgtgttactaagtataaatggagaaagactgagtcaattccacataaagaaagcttcgccatgcataaggaagatgggcagtttttgaacycacgagtgactagaaaaataaaagctcaagcacttagttcatttacaattcaacactatcaaagaaataaatggttgatacaaatccccagggggaacatcattttattacacacccccataggtggcttttaaagggtacttgattaggtttcatcacaattaaactctctacacctaaaggacaccaaaacatggtagcttatataaagatgtaggagatgggcttgtaattggccttcaattaagtggtaaagaagg

SEQ ID NO: 751356 - DNA, 462 bp, Homo sapiens
ttagggttgaagccaacacataatttgaatgactaaaatcaatgaatatcatgaatatcattccaaaatgtactctactaatgtgagtaatttctccattcccatgagacagtggaacaggctgcaacagtggccctgccttatgatgtgatttcaataaattgcttccttttctcaaagtgatatsttctcccctatacacacctgctaggtaactgtcaacattttttccacagaggaaaactttacttttgtctactttgcaggcagggataattgcacagtgagatgtgcaaatgacaaatactaaaatcttatctgtgagtttagaggggggtggcccgagactgaaatatagagtgtcattgacagggggagagaaggcagaaagaggaagctggcatcagcaatgaaaatcttggccttttagggtccagggttgggcaatcctgtagaaataac

SEQ ID NO: 751357 - DNA, 770 bp, Homo sapiens
caatggatcctgggcttcttttgtctcttgctgcctatctgcaattaataaatcatttcatgtaactagtggcatatgagtgtgttatttcttaactcaggtaagttggtaaccagtgtacagtgaagctgctttgcattgtttaccaccattgtaaaatatttaggttccctgaactaaggattccttacctataagacaatcagctgtgtatacagatgtcatttgaccctctttgtattgctctgtaggaatcaggcagaaattggttcaaagaaatactgattctctgactattgctattgctgtgattaataatactcctttgtcttgaacccaggggttctgtgcctttttaccagtatctataaaactgtggaaggttgatttatcttataagcagggtacmatctcagaccacttacagttcttgacacaaaaatacttgaaagttttccagtaacctaaattgagtaccagaaaaaaaaaatcactttcctttaacagtcacatccatattaaaaaaaaaactgcctcatattttttagaaaataattgatttgactttgaaagcaaaagcatatcaatttcaaaactatgtgttcaagtaaagtacattcactaaatcttacgttgactcagtggtattgatattgaattcaaaaagagtatttcataaattgaaaagcaacttgaaatttctctcaatatcaatagtgttcaaatttttcttgtagttcttactgttaatttatataatacttttgatt

SEQ ID NO: 751358 - DNA, 592 bp, Homo sapiens
atgttgatttgtgtgacggtgcaccatgggtctctgaggctgttaattttccttcattcttttttcattagcctgaaaaatctcaaggtaccatcttcaagcttgctgatttttttctgcctgctcaaatctgctgttcagcctctagtgaatttttcatgtcagtaactacacagttcaactccagaatttctgggktttttttgttttttttttttttgagactgagtcttgctctgttgcctaggctggagtacagtgatgccatctcagctcactgcaatctccacctcccaggttcaagcgattctcctgcctcagcctcctgagtagctgggactacaggtgcgtgccaccacactcagctaattttttgtatttttagtagagacggggtttcactgtgttagccaggatggtctcgatctctcgacctcgtgatccacctgccttggcctccctctatttggtgagacactcttctcacattttccttaagttctttagacaaatttaaaatagttgatttaacatcattgtctatgaagtccaacatctaggctggaaaagactgtgtctttcctgtgtatga

SEQ ID NO: 751359 - DNA, 522 bp, Homo sapiens
aaggcttagaacatgagttcttcaagaatgatggctcatacctgtaatcccagcactttgggaggcgaggcgggcggatcatgaggtcgagatcaagaccatcctggccagtgtggtgaaaccctgtctctactaaaaatacaaaaaattagctgggcttggtggcgggcacctgtagtcccagctactcgggaggctgaggcaagagaatggtgtgaacccgggaggcggaagcttgcagtgagctgagatagcgccactgcactccagcctgggcgacagagccagactccttctcaaaaaaaaaaaaaaaaggaatgatgaaggatggrttctataaacccaggtgttgtcacacacagttaagtatttagtctacttaaagaaaaacatttaaaaacttagccactcttatagattgaataatagaaatataaagtcccaaaccccctgtgaatgtggcttttcttatttggaaataaggtgtttgcagatgatcgagttaaaatgagttcattatag

SEQ ID NO: 751360 - DNA, 652 bp, Homo sapiens
agttattttgtagactgtccctcaatctggatttatatggtattttttcatgattagatttactttatacatttttagtgagaatgctctggaagtgatattttttcttttgttctcagtaaatgaaatcaaaaggaatataaaactgatttttctcagcattagtgatgctaaatgtcaggctcttaagttggtgtctactaggtttctccactataaagttataaattttaacttttggatttataagaaaaaagaaatgtaatttgaaactgctagaaaagtttgatgctcatcaaatgtttaccaacagttgttattagcaaccattgagtattttctaattccacttgtatatttccatatctatgtatctatatctatatggatataaacatagctatcttcctatcataaggaagagctctctctttttccttacctatttctttgttgtgtatatcagtttggattcatgaattattattttattcagtgtgttaaaagcaattwctctatttcaatatgcaaattttctctgtccatagtgacgtgtctatttatgtctactgaaacttgggaacaaaagtcagaggttttggtatttcagggaagtaatgctgtgtatattatatatcccttgaaacatgtg

SEQ ID NO: 751361 - DNA, 655 bp, Homo sapiens
atgcttatatatacaatcatgccttctatattcaggggcttcctacattcaggttttttttctctgatttggaagccttttatttcttttccttgcctgattgttctgtctaggacttccagtactatgattgaakagaagtgacaggagtaggtgtccttgtctcatttctgatattagagaaaaagctttcagttttttactgttgagtctaatgttagctctagacttttcatatatgccctttttaatgttcaatgttaatgtatgccttacatacctaatatgtcaagaatttttatcatgaatggatgtttaatattgtcaaactctttatctattgagatgatcatgtgacttttattctttattctagtaatgtaatgtatcacattaatttatttctgtatgttgacatattcttgtatcccagggataaatctctcttggttatagttataatctttttaatgtgctgttggaataattttgtgagtattttattgatgatttttgtattgataatcatcaaggatatttgcctgtaatttaattttctcatggttttgtctggctttgaattagtataatgctggcctcatttaataagtttgaaagtgttctcctccaattttttgtatgagtttgagaaaga

SEQ ID NO: 751362 - DNA, 655 bp, Homo sapiens
atgcttatatatacaatcatgccttctatattcaggggcttcctacattcaggttttttttctctgatttggaagccttttatttcttttccttgcctgattgttctgtctaggacttccagtactatgattgaatagaagtgacaggagtaggtgtccttgtctcatttctgatattagagaaaaagctttcagttttttactgttgagtctaatgttagctctagacttttcatatatgccctttttaatgttcaatgttaatgtatgccttacatacctaatatgtcragaatttttatcatgaatggatgtttaatattgtcaaactctttatctattgagatgatcatgtgacttttattctttattctagtaatgtaatgtatcacattaatttatttctgtatgttgacatattcttgtatcccagggataaatctctcttggttatagttataatctttttaatgtgctgttggaataattttgtgagtattttattgatgatttttgtattgataatcatcaaggatatttgcctgtaatttaattttctcatggttttgtctggctttgaattagtataatgctggcctcatttaataagtttgaaagtgttctcctccaattttttgtatgagtttgagaaaga

SEQ ID NO: 751363 - DNA, 622 bp, Homo sapiens
ctaatggattaatgattatccagctcgttcttttaatatccaagttctagttcacataaaaatttctagaaatgtcttctatgtagtataattttcatttaaacttatttattttgggtcttcttactataaacattcaaagagcaaaattataattaatgtctttttaagtaatattccatctacaatttagtgcctctaaatatgagacaatatgcaattytgtgtgtgtgtatatatgtgtgtgtgtatgtgtgtgtgtgtctgtctgtagatgttttaattttacataaatggttctgagatttttttttttctctacctctataccatgttctggtttcttgaactcaatttctcattaattcttttcttttacatcttgataattctaattaggatattttaaattgtattcaatgttttgggtcaactgagttttaaagggaagcctttgctttatctcagcttggaatctcttctttatatatatgaatttttactatattcagagctgaaaaaggaaatttctccaatttactaagtgaacattatgtgataaataagattgcttcatggtacatctttgtgccatattcagctgctgtgagattagacgttg

SEQ ID NO: 751364 - DNA, 618 bp, Homo sapiens
tgcatcttggtaaaaatccttattaaacaataacaactaatttaaaaatttaaagaccatgcgaagcaacatgtaggatggtggagaagaacgctgcacacttcagccaatagtttgcacaactgtcagaccactgttagagctagctgtaagttcagtctcatcgatgtacttcagatttcccaagggtctaaatctcctctgtcctagagagaaatacttcttaaattgtcatgtgtccttcctttggctcctttctatccccaccaagttaacaggattctgtgaaaaaatttcctcagtaaaacacatttggaaaacactacatactatatccctttcttagagatttctggtgcacatgagcatgttaaaagggcatcaaaatatctgagaggttctgaggaagaaaaactgaacccagcattttccaattcaaaccccactcccagttytccccttttgccaccaggaatacctattagcttttcatgggtcactagtattttctagtagagtgattggaaaatgctattccaataaaataaaagtattatgacattttcttgccacattgaaaggactgaagatttaaaagacttaccaaaaggatctatt

SEQ ID NO: 751365 - DNA, 580 bp, Homo sapiens
ctgaagggttgatcggattcaggtactgttttaacttccatcaggtggtatttaatgcctggttagcttttttgtgatcttaccagctacagatggtcactgcatagattcattatgtcacaatggcttgcaaaatagtgatattctaattattttcttcatttattagctggagttctacaaagggaaagttcctcttatcaactgtttggttacccagaagttcatttcatatagtaatggcaggatacacgcttgattttggtttgtatctgccaattttcaaaattatgagttggttgttttcagatgaccataacgttttcttcttttttgaataccactgtgaactcatgcattaaacatatatcaatacaatatgtgtctatctattgtggttgtcattcttattsatgctcaaactgtcccatctttggcttgtgggaagctcttctagttgacacatctgcatggtctaacttccttgctttctgatatgacaagatgttcctgtatatttcctgctcaagcttcttcacaagtctcattttgtatattttgtatgcaagacatggaatca

SEQ ID NO: 751366 - DNA, 582 bp, Homo sapiens
atatatagatgtttgacacctttagtgtaaagaatggcaggggagtaatggaattcctatacatttgcaaagtttctacattttatgtgaagtggcatattaacttaggtagaatgaaaagttaaggatgcatattttaactctcagagcaactaattaaaaaaaggaaacccaagagataaacccaactasaacttctaaaacatatccaaatgacctgaagaaggcaagaaaaagggaacacaggaacgaaaaaccaggagagacagattgaaaataaataataaaataatagacctaaatctaataatatcaataattacattaaatattaatgggccaaacactccaattatgagacatagatgaacagaatcaataaatagcagggcctaactatatgctatttacaagaaattcactttaagtataaagacatagactgaaagtgaatggatggagaaaatataaatgatgcaaacaataatcataagaagattagagtggctatattaatattaggtaaagtagataatcaaggcaaatggtattaacagagacaaagagggatgttccgcaatg

SEQ ID NO: 751367 - DNA, 613 bp, Homo sapiens
gccagcaatggtgataattgggaagctagccaaaatgtagctcagccagggctcattctcatttaaagtcattctgtgtcctagtctgtcatcagaagagctgctttgaagccggcttctcggctgctttgtttggcattggaggacaaccactaattaggacgttatgtatctaaagatgtagctgtttccaagcctttgccagttcttcttagaacaatgaacttagaaagcttggggtttgcatcctggcactggaagtttggaggacacccagctccgatgtgaccacttctgagagccttcccgcgctcgcctcttcaccccttgcctcctccacacccccttcccygcagagccgcattcaaaccctgggcgagctcggctcctgttgtattagtgctgctttatctgtgccccctccttaggctactttgggacccattcaggactgggagctgccttgtccatcctgttatccccagcagctcacagcgcctgacatatggtgggttcttaataatttctggtggaattgagtttgatcaaagggtccacttgagcatactctcttaggagaaagagaagtgccttcgagtctgtggcctacatt

SEQ ID NO: 751368 - DNA, 613 bp, Homo sapiens
gccagcaatggtgataattgggaagctagccaaaatgtagctcagccagggctcattctcatttaaagtcattctgtgtcctagtctgtcatcagaagagctgctttgaagccggcttctcggctgctttgtttggcattggaggacaaccactaattaggacgttatgtatctaaagatgtagctgtttccaagcctttgccagttcttcttagaacaatgaacttagaaagcttggggtttgcatcctggcactggaagtttggaggacacccagctccgatgtgaccacttctgagagccttcccgcgctcgcctcttcaccccttgcctcctccacacccccttccctgcagagccgcattcaaaccctgggygagctcggctcctgttgtattagtgctgctttatctgtgccccctccttaggctactttgggacccattcaggactgggagctgccttgtccatcctgttatccccagcagctcacagcgcctgacatatggtgggttcttaataatttctggtggaattgagtttgatcaaagggtccacttgagcatactctcttaggagaaagagaagtgccttcgagtctgtggcctacatt

SEQ ID NO: 751369 - DNA, 537 bp, Homo sapiens
tttttaaatgattaaaatttaattttttaatttttaattttacagacaggtcacccaggctggagtgcagtggcatgatcacagcttattgtaaccttgaactcctgggctttaaagcaatcctcccacctcagcctcccaagtagctggaactgtacatgtgccactatgcctggctaattaaacacaattttttttttagagacagagtcttgctatgttgcccaggctggtctcaaattcctggcctcaaatggttctcctgcctcagcccctaaagtgctgggattacaggcataagccactgcacccastcaatacaattttatttttaataaacccccagagttccttctgaattctgtcactttgtacttctttgtacactttgtacatcttgctgctgctttgcacatggagccttgtttattcactcattcaacaagtgttgattgaatgcagagactttacatagtctgtattcaatgctatacccacgtgacataaaacagggtctgcactcaatgaacaaataaa

SEQ ID NO: 751370 - DNA, 471 bp, Homo sapiens
agataatgtgattcaagatgagaaaagttagaccttgatctaagttcaaaaactttaactacggaagaggaattgtgggctgtcttctcctcctcccatgcctcttcattctacactttaccaaaggcttaaagaatgagaaaatcctacgtactatggttcaataatagcaggagagcttgtcaatatcaccatggtcatagaaaacctcagccaggagactcataaaattggacaggcggtgrttaggaacagaactcttccagatacctgaaaaggcctcttaaggtgaaacatatgccactttgccaggcacgctggcacttgcctgtagtcctagctactcgggaggcttgagactgtagcatgctgtgctcgtgcctgtgaatagccactgcactccagcctgggcaatatggtgagacctcatttctaaaaaaaaaaaaaaattttaagagatatttaaaaaac

SEQ ID NO: 751371 - DNA, 601 bp, Homo sapiens
ttgaccctaaaggcctgggcaggaagccagaggttcttacccacacttaatgacaggggagccgagacaccaagagcagccagggggtagccagcgaactcaagacttttattctaacaagtagcattgagataggtagggagagatgaagcagagaggaatgagattagaaggccagtgaagacaggagcaagaagaggcaagccaaaaggagtcattggaaggcattccaggcaattctgagcaactctatgcaagatcagagacaggaagctgttgccagatgcacagacaagttggaatacacttcacaaacatcacagaaaatataaaactctattcaaatccttactgacatatgtatcctttaaatacacgtgtaatctcagtatgatcgattctgtgcactctttttacttggkgtttataaagtggttccaagaagccacatactgcacattcctggattatagtttgatgacattctttcctcttgctgtttagccatttgcttgttcttgagatggttccaacatcttgctcgtgtaggtagtgccttggtaaggtgttgtggaaatgtgcctgccaaagcagcattcct

SEQ ID NO: 751372 - DNA, 664 bp, Homo sapiens
acaccctgacaacagtctcccctgatccctgatactgaaggcagagatgcacctgcaagagacaaggaaggccatgggagtgggcctcggagacagagagggtcatgggggaaggcacctgctatttgccctgggcttcccaggggtgagttaagaaatgacttctccccacctccgttttcaccccgctatgaggaacttgtcactggaacagtctctacgaagcaagccagggcaatgacctggcccctgccagccagctgacactgctgacttcaaaggctcctccttctactcgtctcctgctgatatcagggtcctgaaatccagatgggtttattaattcattcattcatttactcattcatcaaatattaactgaggccacttgggccaaggtgcagtagaccctgcattaatctgcaaaaaaggctatttacaaaaagaagktatcatcaaaacggggcttcaccattgcaaagaagtggaattgaatggataacacctaacatggaacaggaaaggcataagcataagtttactcaacagtctacatgattaagcataattatgccacaaggcacagcatttcttaggggccactgatgagctaggggattgataacctacagaaaagatgagggccatttcctagtgattaggc

SEQ ID NO: 751373 - DNA, 491 bp, Homo sapiens
atgagctacacactttctgaaatccacaagtgtgtgtctcgtaagctcctatgagtgtggtctttcttaagagctcaagctccctccggtcttgaattgccttgacatcacacactcaggtgggccctgcctccaagcccaccttgtgaaaacagggaygggggaccgccactagggagagaacgtgagagttggaagggcccaggcccatgggaagtccaaagtgggctgtccaggtagggaatctgaggccagtgaggaaagaaggacttttcgaggccacagagctgtgtggggcagaggtggcactagagtgagtttccctggtgtgaggcccaggctctgtcctctgcatgatccgggggtgggggacgctggaagcctggttgactagaaggaaagacaagccagaggccagtgctactctccacttctgccctttgctgagctggccctgaccccttccaggcctcagggcctcctgctgccct

SEQ ID NO: 751374 - DNA, 627 bp, Homo sapiens
ctacatctcccaagcccccaggccctgggagccaccattctatctctacggctataagtttaaccctttcagctcgcccatgtgagatcatgtggtgcctgtctacgtgtgcctggtttgcttcgctcagcacaatgtcttcaaggttcatccatgttgtcacagatgatgggaggaaagtacccatcttgactttgatcttggtccttcctggcatttctttatatttttactatatatgtatataaaaatactacttttaccccaaaactatcctttgaaaggctaggaactgagacaggaatctgggtcgacctgtgggtgagaggagccgtcgagttgggtgaaatggttccygctgccccccagctctgtccctcacctcatgagtgccccctgcactgttgcagtcatcagcttaatagtctagcaggcactgctttcttgggtgctactgcatgtggtgaaggagcattttgtggatctaaagtagacagggaataagcagaaaatgcaggtggccccagcagccactgaaccggcctggattcgggtgaagaaagcagcgttctcctggtgtaaacagacacagcctcaagtgcaaggcacgcagcttagaaagtcagg

SEQ ID NO: 751375 - DNA, 710 bp, Homo sapiens
gtggtggcccctagaagctgggaaagaccagcaaacagattctccccggatcctccaggaaggaaggccatcctacaaacaccttgattctagcctggtgagacctctgtggacttctgacctgctggaatagaacatgataaattcatgttgtttcaagccacgacatttgtgataatttgttccagccaccatagaaatctaataaacccatcaagcacagcacagttgaggtagcacgactttatggctgcaggctgtttcctctattttcttggataccacaacttaatatatttcacatggtcattgtttgccatttctaatcccatgactgtagtacgtttataactgtttctgcayttcacaaataagggattttgctcagagagccgatttctctttgcttacttctttttcccttatttagagttttgcatttctctgtaccatttccaggtgtttgaactcacaatgactactttatctcaggctttgcttcgcttctcaattaaaattttgtgttgatagaagataggagtgcttgcttgtttaatatctgtttatctagcttgatgatgccatgtttatataataggagctctggaaattaatcaatatttctaatgaagcaacaccccactcctccgtaggtgtaatagctggaaaagtttgagatgcttgcatattacaaccactctggccataga

SEQ ID NO: 751376 - DNA, 617 bp, Homo sapiens
tcatttaggaagtagcagaggaacattgctcagaactaaaggacactattcttttgtccaccatgtaccctgctcaaagtacaaaaatgatctgggccaggtgtggtggctcacgcctgtaatcccagcactttgggggggccgaggtgggtggatcacttgagctcagaagttcaagaccaccctagccaacatggcaaaactctggctctacaaaaagtagaaaaattagctgggtgtggtggcacacgcctgtagtcccagctactctggaggctgaggcaggaggatcgcttgagcctgggaagtggaggtgtagtgaactgagattgcaccactgcacttcaacctgagtgacagagtgagaccctgtctcaaaaaaaaaaaaaaaatccacagcaaggtatatcattgcaaaattttggaagatggggggcaaatacyggaaagcacttgcagagacaagtaacagtatgcagacaaagaaccacgaatctgaatgacggtggacttttttatatcaactcctgagctagaagacaatgaagtaatgctttcaaaatttctggagagaagtgacttttatcctaggatcctttttttttttttttaagttt

SEQ ID NO: 751377 - DNA, 586 bp, Homo sapiens
tcactctgtgttttctctcacaaagttttcattttttttctgtgctattcttgcacatcttttgtttaattcattagtgggtatgttcttttttttactattttaggtaatatcttctgtcttaaattatattttctgtttgttgttattgttatatagcactgaaatcttttaaaatatagaacttttatttggcaacttgatgaacactctttattatgtagacttcgatattatatgtcaagaatgacatttttttctttcaaatccttatacttggtatttgtttttcttgttgcgttggctaggacttctagtacaatgtggattacaaaaagtgagagtgaacattcttgcttcttcctgattttraaggaatatttatattatttcatcactaagtataatttttgctataggtttttgatacctatactttatcacttatgctaagagtttatataataattaggtgttgagttataatatatgcttttgcagtcacatattaaaatgatctctggttttttcttaatctgttaatatagtaaaataatagaatctacgtttatgagtttggcctata

SEQ ID NO: 751378 - DNA, 614 bp, Homo sapiens
gcttgaagtcttggaattcccctcagctttctctacttgctgctgaccaaaacaaaacaaaatgaagcctcagtgtgagcagccaaagagtgaaactaacatccattttatttatcaggaaaccttctgaataaatgcatgactttctggagtatgttttactggtacttccagatcctgggtgtggaaatgatacattgyaatcactacttgttttcaaataagtctttcactaaaaatgtgatgggccctgctccatgccaaaaaaaaaaaagttacttgcaattattacaaattattgcaacaaaccatgcttttcaaaataatttaatcagggcatattttgaagacttggtcttggctgttcgtttgaaatcatgaaatgaggctgctctgttggacttgggaacccctcaaattaagattccgcggttaatagcatagcctctcagcatgtcccctgctgtcggttttgtaagtttcagatgtcctttaaattgctctaccagactgacaaaacatcattcctggagaatatttgccttcgtatgctcagaaaagatagagctagggagatctgaatttcaagtatttttttttaaaccagatgctgc

SEQ ID NO: 751379 - DNA, 614 bp, Homo sapiens
gcttgaagtcttggaattcccctcagctttctctacttgctgctgaccaaaacaaaacaaaatgaagcctcagtgtgagcagccaaagagtgaaactaacatccattttatttatcaggaaaccttctgaataaatgcatgactttctggagtatgttttactggtacttccagatcctgggtgtggaaatgatacattgtaatcactacttgttttcaaataagtctttcactaaaaatgtgatgggccctgctccatgccaaaaaaaaaaaagttacttgcaattattacaaattattgcaacaaaccatgcttttcaaaataatttaatcagggcatattttgaagacttggtcttggctgttcgtttgaaatcatgaaatgaggctgctctgttggacttgggaacccctcaaattaagattcygcggttaatagcatagcctctcagcatgtcccctgctgtcggttttgtaagtttcagatgtcctttaaattgctctaccagactgacaaaacatcattcctggagaatatttgccttcgtatgctcagaaaagatagagctagggagatctgaatttcaagtatttttttttaaaccagatgctgc

SEQ ID NO: 751380 - DNA, 612 bp, Homo sapiens
gagagtccatagctccactgtttttcctgttcttaagtcctgggaagggaattctaggaacacatatcagaaacatttcttctggagctggatgtggtggtgtgtgcctgtagtcctagctacttgaaaggctgaggtgggaggatgactcgagcccaggagttccaggacagcctaggcaacatagtgagagtcccatctaaaaaaaaacaacaaacaaaccagaaaaaacttttgtgctgggacataatctttaatggcgtcataraagctgctttagcgtatggtgttcctctgaaccctgtcatttctggggctcacaatcctttctttattcatgaaataccaagcaccccaatgtcaagtggtcccaatggtgtatggatgggaatgagaatttccccttgtgcctcctgctctcatgtcctccacaaagaggagtttgtctgaagggctacagggaccagaccgaagaggagacaagagacccaaacactgcctggcaggtcaggggaggcttctagagaaggatctttgagaaagacttcatccacacagtcattcaccagcctgaatctgataaagcctctgtttttgaggatgatacagtag

SEQ ID NO: 751381 - DNA, 541 bp, Homo sapiens
atgcagcacttgccagtcccattttattgttttttatttgttagtttttagagacaggatctcactctgtcacccagactgtagtgcagtggcatgatcatagctctctgcaacctcaaacacctagactcaagtgatcctcccacctcagcctagcaagtaactgggactacaggcatgtgccactatgcccagctaatttttgtgtgtgtatgcagatggggtcttgctatgattgcctaggctggttacaaattcctgggctcaagtgattgtcccaccttggcctctcaaagtgctaggaatagaggcatgagccaccacgcccagccattcccattttaaaatgaaactaagactgagaagttggctstgttatatgctcttacagtattctgtacttttttttctggagaaatgttcttgctatgttgcccaggctggtctgaaactcttgggctcaagcaatcttcctgccttatccccctgaggaactagaactggagacaaacaccaccatgcccagcagcactctactttt

SEQ ID NO: 751382 - DNA, 636 bp, Homo sapiens
tgaggggctggggaacaggccagaggttatgggtctgactcataacctattgcttggatttctgtttgactcaagccagagtgccactaaaagctgcagagtgaatgtcctcgtgactttttcgctttgttctgtcttctaggctagcctgaaagctgactctataaataagccctttgcacagcagtsgcaagacttggttaaagtcattgaggactttccagcaaaggtatagctctgctaacgtctctctttggagcatgtcttatacattcgttgaagaactttattataattcctaatttccctccccgccccaaccccgagcactgcctggcacagaggcctggccattaccatgaccattatgtttacggacacatttaaacatgtgaacttgtagatcaggggttctcagccacagatgctctgttcctcagggacacttggcaatgtcagagacatttttggttgtcacatctggaggtagatggggagtgtgtgctactagcttctaagaagtagaggccagggttgctggaaacattctgcaaagcacaggacagctccctgcgacaaagaagtatctagcccaaaatgtcaacagcaccaagattgagaaaccctgatgtaaat

SEQ ID NO: 751383 - DNA, 636 bp, Homo sapiens
tgaggggctggggaacaggccagaggttatgggtctgactcataacctattgcttggatttctgtttgactcaagccagagtgccactaaaagctgcagagtgaatgtcctcgtgactttttcgctttgttctgtcttctaggctagcctgaaagctgactctataaataagccctttgcacagcagtcscaagacttggttaaagtcattgaggactttccagcaaaggtatagctctgctaacgtctctctttggagcatgtcttatacattcgttgaagaactttattataattcctaatttccctccccgccccaaccccgagcactgcctggcacagaggcctggccattaccatgaccattatgtttacggacacatttaaacatgtgaacttgtagatcaggggttctcagccacagatgctctgttcctcagggacacttggcaatgtcagagacatttttggttgtcacatctggaggtagatggggagtgtgtgctactagcttctaagaagtagaggccagggttgctggaaacattctgcaaagcacaggacagctccctgcgacaaagaagtatctagcccaaaatgtcaacagcaccaagattgagaaaccctgatgtaaat

SEQ ID NO: 751384 - DNA, 613 bp, Homo sapiens
aagtcctaattttgcttcttagttgtcctactctttatggcttataattcagggcatctcaactatgtcatagtttataactaaatttattcataaatatctcattaaagtagataatgtgattgtccactattacggagttgatcaatcacaccaagggcagaaaaaccaatggatgttaagacctgacttggaccaacgatccttctctacmgactcaaactctcagccagtagatgtctgttaggataatgctttatattgatgttcaattccagctgacatgggagaccaaaagtctacttttattttttttttagtttccacggagaagtagcaagctgacattctgtaattttcgacatacatactaacaatatattttgcacggaacatgttattcagctcaaagtcatctcatagaccatcttacatgactatttttgcagcacaaatcacaatttcaatatttgggtggcacccattttgctttgattcacactatttcctcagagctagtcagcaaaaatagtcaaatgaccttccagtgactgcacaaaatatggaatgcttcaaagatctgtcctgcctccttatgcagaagccacgctaa

SEQ ID NO: 751385 - DNA, 607 bp, Homo sapiens
gtacagccttgtgtgttgcaaacgacaaggacctcccaagtgtgccaccatgtgcccacccactaccctacccagagtccactgtggatggaccggcagtggctatacagtgggcagacccagagggagctgtctgggggcccagggcaggcaggggtcattctggaacaccaggcttccagtgctgcagggacagcctctgtgcactccagcccctcccagctcaggcccctccctcccctcttctgactccccctgcacgggcaggcgcrggttttccagtggtcacctgagagagaggggtctctgctcttcttctgtgtccctttgccccttcatcttgtgtcaggtcagttgtccagggtggctgtgttcagtggctgaggggtgagaaagcctacggctcaaggacagaccctgcttttcccagaggccaccagggagctcagcggggctgacaggtcctaccagtagcttgggcacacaaggccccatctgggcgatgtggctccagagggtcatgttgacaggagtcagtgtccctgagcccagagctggcacacagcagatccagggctgggtccccaaggttgtcagaggcaaagcc

SEQ ID NO: 751386 - DNA, 490 bp, Homo sapiens
atcatggaagggagtgggccacgaatgggatccagggaacgggattgtctcggggcaaggaggacgatgcggaggtgcgggggcaggggtggtgtcaggacaggctgaagctgcgctgccagagtctctgggccacgtggtcagaaaagcatcggatttggcctgttagcaggggagtgtggccaatggcaaaaagtcaagggcatcctaggagctgaggaggcggtggcagtggcagttaggcaaaccactctggaagcatccaggggtggagacragaatctgcaggagctcctgcctccagcctggcctccctcctccttgtgccccagacagaactgcttcccctgagttgctccaactcgtccttccccggaagtccctcacaagtgcctcctggccggcccccccaactgcattttgcttctgctctcatcccagcagtcccattttctctacagtgagagttcttggcaaaatttaaatccca

SEQ ID NO: 751387 - DNA, 663 bp, Homo sapiens
ttctggatccttgaggaatcactacactgtcttccacaatggttgaactaatttacactcccaccagcaatgtaaaagcgttcctatttctccatatcataatgtagcaccaaatgtagataagcgcctaatgtagatgagaggttgatgggtgcagcaaactaccatgtcatgtgtatacctatgtaacaaacctgcaygttctccacatgtatcccagaacttaaaatataataaaaaaagattgaaaattttaaattttaatacaaaattaggacttagttatttgcaaaatacactgtattttcaatgtgaaaaacaaagggttatcgtatgtattatcaataaagttatatagttttccataaaaataacattaataatggaaaattctaaaagaaaaataattaaatttcttttaggacaatttaaaaatgtatctgtcaattttaacatgaaaattctcttacatttatacatcccacattctaataaggactaatttttatgagcagtaaagaaatgtgtgtatgcgtgtctgtatacttataggtatatatctgtttctgtgaaaatctctcttttagagtcagaaaatctgtttggtcccagttcttactaataatatatgatctcactaaagatacttaaattcaataaact

SEQ ID NO: 751388 - DNA, 663 bp, Homo sapiens
ttctggatccttgaggaatcactacactgtcttccacaatggttgaactaatttacactcccaccagcaatgtaaaagcgttcctatttctccatatcataatgtagcaccaaatgtagataagcgcctaatgtagatgagaggttgatgggtgcagcaaactaccatgtcatgtgtatacctatgtaacaaacctgcatgttctccacatgtatcccagaacttaaaatataataaaaaaagattgaaaattttaaattttaatacaaaattaggacttagttatttgcaaaatacactgtattttcaatgtgaaaaacaaagggttatygtatgtattatcaataaagttatatagttttccataaaaataacattaataatggaaaattctaaaagaaaaataattaaatttcttttaggacaatttaaaaatgtatctgtcaattttaacatgaaaattctcttacatttatacatcccacattctaataaggactaatttttatgagcagtaaagaaatgtgtgtatgcgtgtctgtatacttataggtatatatctgtttctgtgaaaatctctcttttagagtcagaaaatctgtttggtcccagttcttactaataatatatgatctcactaaagatacttaaattcaataaact

SEQ ID NO: 751389 - DNA, 486 bp, Homo sapiens
acgatttcccgctcggccatggtggtgaacctatagccatgctcggtgaggatcttcatgaggtagtcaggcagttcccgcccagccaggtctaggcgcagggtggcatgggggagggcattcccctcatagatgggcacagtgtgggtgaccccgtcaccagagtccatcacgatgccagtagtacggccagaggtgtacagggacagcacrgcctggatggccacgtacatggctggggtgttgaaggtctcaaacatgatctgggtcatcttctcgcggttggccttagggttcagggtggcctcggtcagcaggacggggtgctcctcgggagccacacgcagctcgttgtagaaggtgtggtgccagatcttctccatgtcatcccagttggtgatgatgccgtgttccatggggtacttcagggtcaggatgcctcttttgctctgggcctccttgcccacataggactctttctgatgc

SEQ ID NO: 751390 - DNA, 486 bp, Homo sapiens
acgatttcccgctcggccatggtggtgaacctatagccatgctcggtgaggatcttcatgaggtagtcaggcagttcccgcccagccaggtctaggcgcagggtggcatgggggagggcattcccctcatagatgggcacagtgtgggtgaccccgtcaccagagtccatcacgatgccagtagtacggccagaggtgtacagggacagcacagcctggatggccacgtacatggctggggtgttgaaggtctcaaacatgatctgggtcatcttctcgyggttggccttagggttcagggtggcctcggtcagcaggacggggtgctcctcgggagccacacgcagctcgttgtagaaggtgtggtgccagatcttctccatgtcatcccagttggtgatgatgccgtgttccatggggtacttcagggtcaggatgcctcttttgctctgggcctccttgcccacataggactctttctgatgc

SEQ ID NO: 751391 - DNA, 486 bp, Homo sapiens
acgatttcccgctcggccatggtggtgaacctatagccatgctcggtgaggatcttcatgaggtagtcaggcagttcccgcccagccaggtctaggcgcagggtggcatgggggagggcattcccctcatagatgggcacagtgtgggtgaccccgtcaccagagtccatcacgatgccagtagtacggccagaggtgtacagggacagcacagcctggatggccacgtacatggctggggtgttgaaggtctcaaacatgatctgggtcatcttctcgcggttggccttrgggttcagggtggcctcggtcagcaggacggggtgctcctcgggagccacacgcagctcgttgtagaaggtgtggtgccagatcttctccatgtcatcccagttggtgatgatgccgtgttccatggggtacttcagggtcaggatgcctcttttgctctgggcctccttgcccacataggactctttctgatgc

SEQ ID NO: 751392 - DNA, 422 bp, Homo sapiens
cgcccgcaaagccggccttgcacatgccagagccgttgtcaatgacgagcacagcggtatcatcatccatggtgagctcattcaattgtagagcctttaaaagattatcattcctttttttcacactttcaatatcctccaaatatttcttttctcttagctggctctgatgtttcattgtgtctagctccagtcttagcatggcaatttcttcccgcaacgtactattttcatgcaagatgtctttttctttcttacaactaagagaaagctaagtaaacaaaragaacttttagttagcactcaatagattgacatatcatgatttcttctgaaattcaaaaataacatgtatttgtataatgaaagaatccccatagtggatatttaactggaaaaaaattggacaaaacttcaaacct

SEQ ID NO: 751393 - DNA, 620 bp, Homo sapiens
  misc_feature 159: n = A,T,C or G
ggaaccacaaaagatgctgaaaaacgaaagcaatctttagcaaaaagaacaaacctggaggcatcagactacctaatctttgacaaagcaaacaagaaaatgggaaaggacaccctattcaacatatgctgctggtataattggcaagcacatgcagancaatgaagccgttcttcaaaggttaaatacagaatgaccacatgactcagtaaattcactcctatgtattcaccacaaatacattaaaactaatgccttacacatcaaagtatttatagcaacaaaaagtaggaaacaacagaaatgtccatgaattttgragtggattaataaaatgtggtctgtccataaaataaaatattacttggcaatgaaaaagaaaaacatattaatacatgctccaaaaaggatgaacattgaaaacatgataaatgaaagtagtaagtcacacgtaactatattattatgattccacttacatgaaatgtccagaataggcaaatccttccagaataggcaaattcttaggtaatagatggatgattgcctagggctgggagaggtttaaaggaagaatggggaaaatagggaaagattgctaatgggtgcaaagtttcttt

SEQ ID NO: 751394 - DNA, 513 bp, Homo sapiens
gggatatggaaattgagctatttcctattgataaggaattagactagctccaaattttttacataatactataataaatgtccttatacataagtatacatataacatatctatacaaatatcctttacatgtattatatakgcttactgttatatatgtgtgtgtgaatatgctactcaattaatgttcaaaatgtatttaccaacagtatatgaaatgtctttttcaatgaaaccatttcccctgcagcaacacggatggagctggaggccattatcctaagaaaactcatgcaggaacagaaaatcaaatgccacatattcttactcattagtgggaactaaacatgagaactcatggacacaaagaggagaataacatacactggggcctacttgagggaggagcatggcaggagggagacgaccaaaaaactacctttcgagtattttgtttactatgtggctggtgaaataatctgtaccccaagcctccatgatacagtttaccta

SEQ ID NO: 751395 - DNA, 612 bp, Homo sapiens
cagctctgtgccctctatgcctttacttatactggggcagatggcagcaggtgtctctggctgaaggggataggttcctactgcttcgaaagaccaactccgactggtggttggcaagacgcctagaagctccctccacctctcgacccatcttcgtcccagcagcctatatgatagaggaatccatcccttcccagagtccaactaccgtcatccccggccaattgctctggactcctggtgagtaagcgctaagccctctcccttcaccttcctacctcccatcaccttcctacctccctggcttctgggaattttggggaggtccccctccctcaagcttctgctaaccatcttctcttgtttttctttgatcagcctacctcttgccccygccatggcatcctcatcccactgcctgtcctcctagtcctaaggcttctaggtctcatgccattttccacatcctccctctgcccttcttgtcttccctgtgagttcccaagatgagggacccagttacaacaacacctctgatcacctgccacccaccctccccttttctgtttccagggccgaagttgtttcatggttccctggaggagttgtctc

SEQ ID NO: 751396 - DNA, 618 bp, Homo sapiens
taataaatatgttatgcccatgggcggacaaaaagtgtccaatggatagttacaccagtggaactggaaatctagaacaccaaactgagagtagttgaaaccttggattttaaacagggtcacagagggagaaaacacaatgaaaacagtggcagagtaaccaaagaaaaggctagaagagaagcaggggcctcaagacagacaaaaaaaattttttttttttaaaaagacaaagtcttgctcttgtcccccaggtgggagtgcaatggcgggatatcagctcactgcaaactccgcctcccaggttcaagcgattctcttgcctcagcctcccaactagctgggattacaggcrcctgccaccatgcctggctaatttttgtatttttagtagagatggggtttcaccatgttggccaggctgacctggaactcatgacctcaggtgatctgcccgcctcagcctcccaaagtgctgggattacaggcgtgagccaccacacctggccaagacacaccaatatttaaagggataaagaagaggagtattttgagtggcaactatctggggccagtgtcatgcaggcagtaaaaagaatttaccaagacagttgtagg

SEQ ID NO: 751397 - DNA, 615 bp, Homo sapiens
gttaccaatggaagacactgagtaaaaggacatcataggatattcctatactctttttgcaacttcctataaatctatacttgtttcacaatgaaaagttaaaataaataactgataaatgatacaaattatagaatctgtaaagacacttgaaaagttattaccactatattccacatgtgcaaagagctatagtaaaaagtgagcggctgggcccagtggctcaagcctgtaatcccagcactgtgggaggctgaggcgggtggattacctgaggtcaggagttkgagaccagcctggccaacatggcaaaatcctgtctctactaaaaatacaaaaaattagccaggtgtggtggtgggcacctgtaatcccagcaatttgggaggccaaggcaggagaatcacttcaacctgggaggtggaggttgcagtgagccgagatcgtgcaactcctatgctcaagtgatcctcctacctcaggcctcccaagtagctgagactacaggcttcatgaaccaccacacccagctaagggaaaatcttaaaagcagccagagcaaaaggacacaaataacagcggtttccaacctttttggcaccaaggaccagtttt

SEQ ID NO: 751398 - DNA, 563 bp, Homo sapiens
ctcaaagaaaaaattaaaacaaacaaacacacaaaacccacaaagtattaaaggtctgggttgagaagattccctacctaagaatattttaattcagagagcagaagatataaagagggaaacaactcttaagtgactacagcctggattacctgagcataagagggatatgaaaatgtatttttggccaggcgcagtggctcacatctgtaatcccagcactttgggaggccgaggcgggcagatcacaaggtcaggagttcgagaccagcctggccaacatggtgaaacccctctctactaaaaacacacaaaaaattagccaggcacgggccgggygcagtggcacacgcctgtaatcccagtactttgggaggccgaggtgggcggatcacgaggtcaggagatcgagaccatcctggctaacacagtgaaaccccgcctctactaaaaatacaaaaaaaaattagccaggcgtggtggcatgtgcctgtagtccagctacttaggaggctgaggcaggagaattgcctgaacccagaaggcagaggttgcagtgagct

SEQ ID NO: 751399 - DNA, 671 bp, Homo sapiens
gactgtttgagaccttctggggcctggctgatgggaagagaggccagaataaggccaaagaagggttaagggagtttgtgtaggaatttgtaagccttgttaaggagttagaagctattgaaacaagagagtagcatgatctcattaacttgatttaaaaagattgtcccagcttggctttctgttattagttattggtatttgctaactgttcattcattcatctgtcaaatactaaatgtttactctgtacagattaatgacctatatactgtaaggactacaagtatgaccctttccttaaagttcttacagtccacgggctaattttcttgtgttctcttgttcatctattattttttattccccttgactttgtggcctggtaatatgtcgacctgtcatattaatactttgtattccttatttctrtaagcctaccagatgtgatccttattagataaataactccatttgtaaatttcaatgtgagatcaactcttttgaactctacaagttatttttgctttgcttttgcctctgtctagagttcttacgttaagagatcaattggttgcagtacactctgtgatgatagataggctttttaatgtatataattagagattaaatgttcaaattatcttttgattcttatccttcagtttact

SEQ ID NO: 751400 - DNA, 609 bp, Homo sapiens
agatctaatactgggggagaggccggaaaccctcttgcccaggccactgcctacatgtacaaggcagaatttagctgccatggaagtgtgataaacaaatgctgagaaagccccaaacccagggaccaatagtatggaaaatgcttaagggtgaagcttgtctagcaaaactgagaatatatctacccacaccctcgacctgaagctgagtaacaacagagaaaggaagagcatgaaaagagacaccttctakgacctagtagtttaaggattgttgaaagctagggcagagcaagaatagtgatgagaaacgctccagcattccagtccagtccccataataagcacaaagaaactggagcccactgctgtaagctgaagtgatgcattgatggtgattacagaattaacaatactcaaattcagctgtcttgttgttttctgctgctctaacagaatactgaagacttggtaatttataagaaaaataagtttttattcttggactttcagaactccaagagcatctgatgagaaccttcctgctgcatcatcccatgaagataagcagaagagcaagagagaccatgtgagaaagagcttactttt

SEQ ID NO: 751401 - DNA, 632 bp, Homo sapiens
ctaacagcagagcccagccagcacaatcccctctccaaaatcaatgcaaaggtagcagcccagccatacagagtaacagaaagcaagctctacctgcttggagtcattaccagcccatacagaatcacaagcagtgatctcccagtgatcactaaacagtgaaattctrtccctgccaaagaacacctggaagacgtggctgtctccacaaatgaggagaccaatgcaaaaactcaaagattacaaagaatcagggcacctccaaagaaattaacaaagctccaacaatggaccctaaaggaatggagagctatagatctacagaatgatagacaaagaataatccctttaaagaagttcaggccaggcatagtggcccatgcctgtaatctcagcactttgggaggccaaggtaggtggatcacttaaggtcagcagtttaaaaccaacctggccaacatggcaaaactccatcttcactaaaaatacaaaaaaattagccaggcatggtggcaggtgcctgtagtcccagctacttgggaggctgaggcaggggattcgcttgaacccaggaggaggaggttgcagtgagccaagattgtgccactgcactccagcctgggtgacagggt

SEQ ID NO: 751402 - DNA, 632 bp, Homo sapiens
ctaacagcagagcccagccagcacaatcccctctccaaaatcaatgcaaaggtagcagcccagccatacagagtaacagaaagcaagctctacctgcttggagtcattaccagcccatacagaatcacaagcagtgatctcccagtgatcactaaacagtgaaattctgtccctgccaaagaacacctgsaagacgtggctgtctccacaaatgaggagaccaatgcaaaaactcaaagattacaaagaatcagggcacctccaaagaaattaacaaagctccaacaatggaccctaaaggaatggagagctatagatctacagaatgatagacaaagaataatccctttaaagaagttcaggccaggcatagtggcccatgcctgtaatctcagcactttgggaggccaaggtaggtggatcacttaaggtcagcagtttaaaaccaacctggccaacatggcaaaactccatcttcactaaaaatacaaaaaaattagccaggcatggtggcaggtgcctgtagtcccagctacttgggaggctgaggcaggggattcgcttgaacccaggaggaggaggttgcagtgagccaagattgtgccactgcactccagcctgggtgacagggt

SEQ ID NO: 751403 - DNA, 619 bp, Homo sapiens
ttagcttttggccatgactttttttttttttaatcttttcttcccttgtgctccagaaaccacagttctgtattctagattcttccttaaaatcagtgaaagtcctcagggcgaagtcaggtatctgagtagctcmcttgagtacctcactagattttggcctagcacttcctcataatttgttctcttttttttctgaaatgttttgcttattttatttaacatttttagttttagttttcttctctaagtgggttcaattgaggccgggtgcagtggttcctgcctgtaatcccagcactttgatatgctgaagtggaaggattgcttgcggccaggagctcaagaccagtctgagcaacatagtgagacccccatctctaccaaaaaaacaaaacaaaaccaaaaataaaacagatgtagtggtgtgcacatgtattagttttaactacttgagaggctgccctgggaggattgcttgagcccagaagttggaggctgcagtgagctatgattgcgccgcagcattccagcctgggtgacagagtgagaccttgtctcttaaaaaaaaaaaaaaaaaaaaaaaattcatctgaattacctaggccttcattagaaa

SEQ ID NO: 751404 - DNA, 611 bp, Homo sapiens
ggtttggaggaaatgctaaattcatagaaaaagcacacctggccctcactactcatacttgccttttgcattactggagacacctgagaatagtcaagcattgttagagacagctggaccacagaagagagatgaggggaaggaaatgacaatatttgtcccaagctcaaagaaccctttttaataaagctatcagagaactgaaaccttataactacatgccccacaaaacattcttcttttctatagtagtaattatgaaaagtcaaaatctctgtgtaccttgtaacactgcaaccatggaaaacaatttatcggtgtcaagaactaataagctcttrgaaaaattttacaaagaagtgtctatttgctattatacaaggcggagtatgtaattttgtcatctttgttttataatagaggaagtagttaacaatttctgagcaaaaaaacacaatggtatacctacctcttacgtttggccttaaactcttacaaacttcagtttccattaacagagaacctagcaaacataagagggtctttgaagcacacgagaagccatccagaaaacactatacatatctgacaaaggaggttttaaacagatt

SEQ ID NO: 751405 - DNA, 628 bp, Homo sapiens
tattgttttctacagtcaacatttatttattcttgcttaatcatatatttactctttctatttcttgcattcctttctatatttctgtgtttatttctgttaaaaattttcctcagcctgaagaaagtatggtggctaaaattaacattttttctgataagtgtttttttgaatgttttatctttaggtcagaattttctttcagtagtttaaaaaatataatctgttttatattgacttacatgatctcttctgagaagtcagatgcattttacttttgcttcttgaggaacacctgcttttaatgttttctttttgacattggtgttcaagtgtttgcrtatgatttgctcaagtgtagttttcatcatactcgtaacttacagagctactggattctactaaggattatctttcttaagttttggacatttttaaatcattacttaattttgctttttctatattctctatttaatccttttgggattaaatttacaccaaatttatggttttgtactgtgttccaaatacatgttagattttattctgaatctctcaagctttcattctttattcttcaatctgggtgttttaaagctattttctagttctattattattctgc

SEQ ID NO: 751406 - DNA, 654 bp, Homo sapiens
atcagatgtatagtttgccaatcttttctctttttctttaagctgtcacctcactctgttgagtctcatttgctgtacagaagctttttagtatggtgcaattctatttgtctatttttgcatttgttgtctgtactttgaggtcatattccaaaaagtctttacccagactaaatgtcgtggagcttttcccctatgtttttcttcccctatacttttacaattycaggtcttatatttaagtctttgattcattttgagataatttatgtatatattagatcctatatatctaagatatataggatctaatttcattcttctgcatataggtaaccagttttgtcaacatcatttgttgaagaaacttttcctcatatgtattcttggtgcctttgtcgaaaatcagttggctgtaaatgcacagatttatttcttggctctctattctgttccattggtctacatgtctgcttttatgccagtaccatggtgtttgcacattttgaagttaggtagtgtgatttacttacaaattacccagcctcagccgggcgtggtgtcacgcctgtaatcccagcactttgggaggccaaggcgggcggatcacctgaggtcaggagttcaagaccagcctggccaacatggcgaaac

SEQ ID NO: 751407 - DNA, 537 bp, Homo sapiens
aaaccaggtaatgtacattcttttctttccatttttttgtgtccatccatcacagataattactctagaagactgaataaatgaaaaaaaaagtcaccgttatcaacaagttgaaatgatagctagttcaacaaatagcatgcaagtaaccttattgcaaagtagacttatatcatgcaatttatttttagccaacattttaaatatacaaatgctaaagaagtaaaattaactaaagaaaataattaaaaartaacactgtaataaatttttaagtggaaaatttcaaaatcacttataacttgatcatgtctattataaattctgaaaaatataattccgaaaaatagtctccaatttatttttattatatatagctatatgactgtcactacttaatatatatttatttaatatattacgttctttctctctcctccccccaggccccccatccttaaaatatttggaactcactcatgtcctttgcagggacatggatgaagctggaagccatcattctcaacaaacacacac

SEQ ID NO: 751408 - DNA, 537 bp, Homo sapiens
aaaccaggtaatgtacattcttttctttccatttttttgtgtccatccatcacagataattactctagaagactgaataaatgaaaaaaaaagtcaccgttatcaacaagttgaaatgatagctagttcaacaaatagcatgcaagtaaccttattgcaaagtagacttatatcatgcaatttatttttagccaacattttaaatatacaaatgctaaagaagtaaaattaactaaagaaaataattaaaaaataacactgtaataaatttttaagtggaaaatttcaaaatcayttataacttgatcatgtctattataaattctgaaaaatataattccgaaaaatagtctccaatttatttttattatatatagctatatgactgtcactacttaatatatatttatttaatatattacgttctttctctctcctccccccaggccccccatccttaaaatatttggaactcactcatgtcctttgcagggacatggatgaagctggaagccatcattctcaacaaacacacac

SEQ ID NO: 751409 - DNA, 587 bp, Homo sapiens
gagagggtcatgattgattgagcaagcagggggtatgtgactgggggctgcatgcaccagtaactagatcagaacaaaacaggatagggattttcacagtgcttttccatacaatgcctggaatctatagataacataaccagttaggtcaggggtcgatctttaactaccagtcccatggtgcggtgccaggctgtcttcctgtggatttcatttctgccttttagtttttacttcttctttctttggaggcagaaattgggtaaaggactatatgargggtggtctcctcccttattttaaataaaccagcatgctatagctaacttttcatgcactgaagttatccacaaacaagtgtacatgaaaagcatttgaattcattcccatatttctagcagttttaggaatatttcatttatataaacacttattttcttcaagtcaattaactagagatccttaacatatattaatgttggcaataccatttaaagatagaaaaatactctgtacatatgacatacaaacatacataaatactacaaggcatacatcaacatacacagaagcaggtcttgcagttt

SEQ ID NO: 751410 - DNA, 528 bp, Homo sapiens
tatagaaactacttcatatcaatgaaaatagatgtaccattctctatgcctaatttgggagtgcttattttcatgtgcacctcttagatggatgattttgtgcaattataacattcctcataaaagccattgtaattctaaattatgtttagtaaggttttgccatttttttttgtaaatatttacagcttccaggaacatacattttgagcataagagaagcaggtataccagaagatagagtactggatactttagaatgtaaagatcccattcttgtattgtgccttggstttcttggagctgagaaaaaaaaaagcccaagatggtagtgctacactgctgtgttgtgtgatattttatagtattcttcactgaatggaaatttttcttgaagctggcaagtggcaagtgcactagtgtcaagctaacccattctgtcaccaacttatcctaacacaggaatcctagttttaggtggcagacactttaacagtttttaagtgtttgatccatgcccatcagtca

SEQ ID NO: 751411 - DNA, 559 bp, Homo sapiens
aaccaagactttaactcatttgttttgattggccacagagtccacattctgaaacactgtgttatactttgtgaggggtgtttttggggagaagaatcaagagtgttgggaatttatatttaaggtgccaataaaatacacttaagaagaaacactgaataaagcattagactctggacttsagttcaggtgataacgccagagaaacaaatatcggagctattgggcatagacgctatttgcaactatagacatggataaaataacctatgaataaatatagatttcttaaaaaaagaaaagcctgggctgggcgcgttggctcacgcctgtaatcccaacactttgggaggcctaggtgggcgaatcacgaggtcaggagttctagaccagcctggccaacatggtgaaaccccatctctactaaaaaaaatacaaaaattagtaggtcgtggtggcgtgtccctctaatcccagttacttgggaggctgaggcagaagaattgcttgaaccgggagatggacattgcagtgagcagagatcatgccattgcactcc

SEQ ID NO: 751412 - DNA, 615 bp, Homo sapiens
ggatgagttctattcccctgccctctcttctgggaataacttctaattttcctttggggaccattcctctctgagtagcagtctttgaggtctgggtggggctccaacctggccatcacaatattgtattcccctgggtacaatgactggtttagagatagacacaggaccaaatggagccaatgatgtccactgagctctttcttgggattgcagccaaagataattttgttctttcccacygaccttgaacctgagcagctgtgaactctggagctgccacattaccaacactgaaggcaccaccagcactggggacacagagccaaaagatggcaaggaggaactgggccctgaggacactgtgtgagcccctgtatcagctgtgcctgaagcgaggctgttggtttcttggtcaaaatgaaccaatacatattctcctttgctgaggctagcatggattaggttttctgacatctgcaactgaaggagtcctaactgaactactgtgcaatatagtctcacctttgatagaaaccccaatgcctggaagtccatctctagcaatatgttgacagaaaaacttggctcaggaggaggccagagagggacctc

SEQ ID NO: 751413 - DNA, 669 bp, Homo sapiens
tggcccttcagtcaagctcctaggcattaatgataaatcagatatttgctcacatacactggcatggttggctaatcagtgaaatgatgtgttttattaggatagcccagagacctgagacatcaggtcagaacayattcttgaaaagtctccatcatgaacatttcatattgcccaaaggagtctgtccattctttaaaatctttgtttcaacactgatattgaacttgtgcatttcctcattagcaaaacacatcattccttactgctcaaagcctgtagagagaagtctgtgttctcttggattctgaaagacagtgcaggtacaaacggacccacaggctcagggaccagacagatcaggatgaaaattccagctctgccactggtggctggaaaagtgacacagtctctctgagccttatttcacagctccccatttgcaaaatggagatacaccaatgactttgcagaggctttgtttttttgtttgtttctttcccccagagaagattgtaaagctttattgaaagaatttaagtcacattttcaatataacaccaacatgtgtggcttcagcttgtcttctttttaacttatggctgcccagcacctgcttctgtaatttgagcattccctagattaggtggagtctcccctttcacatta

SEQ ID NO: 751414 - DNA, 548 bp, Homo sapiens
ttttgagacagcttgctctgtcgccctggctgaagtgcagtggtgcgatcttggcccactgcaatccccgcctcctaggctcaagccattcttgtgcctcagcctcccaagtagctggaattacaggcgtgtgccaccacgcctggctaatttttttttttttttttttttgtatttttagtggagaaggggtttcaccatgttggccaggctggtcttgaactcctgacctcaagtgatctacctgcctcggcctcccaaagtgttgggattacaggcatgagccactgtgcccagccacatgacaccttttttwaaaaaaaaaaaaaaacaaaaaacacagatctgattgtaatgccctcttggggaaaactctccagtggttccccattgctctggggatgcagcccagacttctcataaggatggttgataggaccctgtgagatcagggctgcctgcctttcccttcggatctccctctgcactgaactctatgccctgagccttgaagccttgcttagcccctccggatcacctagaatctt

SEQ ID NO: 751415 - DNA, 616 bp, Homo sapiens
tttgctaaagtcagtgatttgcccacacatagctccttgttggaaaagcagccatttgattgatgttatgtatgaattataatttacaaataaattattgaaagcatatgaggtccagtcagatgagatccacagggggaaaaatacacatatgagggaatccagggtttgacttttccatttaaccagtttttcattttaatattttaaacagttgcagagtttagctactaatggtccagatttttgagmtaggcataaacgagttagttgtccttggtcttactatttcagttcaacatacattatttaatgtagtataaataactacagcaatcataataaacatttattgagattgtaccatttatatttactatttcaatataccatgtatattcatgattttattttacagttgacccttgaacaacatgggtttgaactacgcgggtccacttataggtggattattttcaataatttgaaaaaaaaattcaaaaaattatttctaataattgaaataattttttcaatgtgttagaaaaatttttggacatctgtgacaatttgaaaaaacagatgacccaagtagcctagaaatactgaaaaattt

SEQ ID NO: 751416 - DNA, 616 bp, Homo sapiens
aaagagcaagtagaagaatgagttatttcatcatttatgtcatcgatttcctatccttttggcagttctgtgacatttttttgggcctgtacattttcctcttggaagctgctggtaagtggctcatcagaccctatatagtcacaacaatctatttgttcctttattgacaacttcaaaaggccacattttacctcagccacacacataggaccctttagttgaatgtgagtttcttggcatcattaggatttacataataattgatgtggcatttgaagttctccaccttaatygttccacataataatagtaacttgctcctttatgtattccaagtctgtatctccaccagcaacacaaggaaagaacagccttaatgtattattttagtatataaatatactattttaggctacccagatttcttcatctacttcacttttaccaccttcctcctttcctttttcaactttttctgctgtgtaataaatatatctcgagtttagtgcctcctggatggttctatagaactcttcaaccttcttggatttccattgtagtccaagctttgtctaaatttgctgtaactgtccatgatcttttaagcagctct

SEQ ID NO: 751417 - DNA, 616 bp, Homo sapiens
aaagagcaagtagaagaatgagttatttcatcatttatgtcatcgatttcctatccttttggcagttctgtgacatttttttgggcctgtacattttcctcttggaagctgctggtaagtggctcatcagaccctatatagtcacaacaatctatttgttcctttattgacaacttcaaaaggccacattttacctcagccacacacataggaccctttagttgaatgtgagtttcttggcatcattaggatttacataataattgatgtggcatttgaagttctccaccttaatcgttccacataataatagtaacttgctcctttatgtattccaagtctgtatctccaccagcaacacaaggaaagaacagcctyaatgtattattttagtatataaatatactattttaggctacccagatttcttcatctacttcacttttaccaccttcctcctttcctttttcaactttttctgctgtgtaataaatatatctcgagtttagtgcctcctggatggttctatagaactcttcaaccttcttggatttccattgtagtccaagctttgtctaaatttgctgtaactgtccatgatcttttaagcagctct

SEQ ID NO: 751418 - DNA, 618 bp, Homo sapiens
ggtcttcttgttcttttcatatgcttgttacaatgaacttgttcatttctatttttaaaaagtcttttggaatttttattgggtcttattgattctgtaaatcaatttgaggagaattggtatcttaatattgcaccttctaactcatggccaggtcaattctgtatttgttttgttcttctatcagtactgttttgtagctttcagtataaatgtctttcactaaaaatgccttctgcacatttcattagatttattcctataatttttgtttctttttagatttcaytgtaaatggtgtttaaacaattttatttcccaaccatttgttgattgttcatgtgtgtatgtatgtattacattgaccttgtgttctgtacccatgtcaaattcacttattaggtctgttattgtctttgtgaattcctttacatttattaaggtacacagtgctgtgatctatccattatttatgccttttatttattttcttttatattgtattcagcaagatctccagtacagcgttgaatagaaattgtttgagaaaacgcctttgtgttgttcccgatccttttagaaaagcatttgaattctcggaatcaagtatgatgttgg

SEQ ID NO: 751419 - DNA, 539 bp, Homo sapiens
ccaccaagatccagggcttatatatcatagacaagaaacgtgcagggcaactgaagtcaactccccaagaaaaggcaagaaagttatgtgaatctgcctgagggaaggacttgtggtcttatggtcaaggttgctttgacagaagcataggatttacggtaatagtacataaagtagaaagctgaaaagcattcccagaacagaggttaatcagaaatcaacatggtggattagcatccaaggacattccttagcctcacaaatataaatatgtgttgaattttatcaaatgyttttttagcatctattcaaataatatggtttttctctcttttttttgttaatggggtgattacattgactgaatttaaaatattcaatcttgcattttttgtttggttatagtgcattattccatatattccatagatatatttatgatatatatgtctgtagatactacgtgcttataattaaaaaaatttgtatctatgttcatgagtgatattggtatgtagttttttcttttatatctatat

SEQ ID NO: 751420 - DNA, 658 bp, Homo sapiens
ctagctattgttgtaaataataatcttcattaatgcaatgacaccgaacactaatcttttaatttatagtatgaggtacaagtaaagcataaagacagtaactcaatagaaaaaataaaagaaaaaatgtcttgacaatataaaaccttacctctaaggagaatctcacacattatttgagatacttagtattttcacaacatgcatgagtgctagatctttaaaaatctcatatagtaartggaattttaactctcttccttagttctttctctcagggactataaatcaactttttccaccaagtaatagaaaagagtcatttattttcttatgcaatttgtattgtacaactttataagaaatgtgaattaatcgcccttacacagcgaataaaaaaaaaaacttactggtaataaggaagagagttggcgatgttaacaaagactgtcctgatgtttgaatgtaattgttcaaagttcatgtgttgtgtcagtcatgcacttaactggttctgagtccacgattcagaaaaaattccctgtgggtctaaaaaatgcatattgtgggcaaatatagacgaataaaacatttatttggtgtcccagaatcatagaatttatgagtgaaaatggatcccagagatcattttagctaa

SEQ ID NO: 751421 - DNA, 599 bp, Homo sapiens
agagatcattttccctaccagtagccttgatatatatgattgagaagtaaattgtaagataatacaaaagcagtctgaatacaggaaattaacttgactagtaatgaccaagagagctgtgtgaaaatatattttaaaagttcccacaaactcaccaaaagtgggagctggaaatgcaaagacagttttgacaagacaaagttttttccaagctaaacaaaaaagattacagacttttagaaactacayttttaaagaaaaaaaaaaaagcagataaggcaaatgaagcctagaaaaattaagagatttatttagggtaacttagccagttaatggcaggattgagactaaaacacactgtaaaatccaagtatggtcttttatatctatgatataacctgtatatatgtaagaaatatagcacttgtaatttgttaatctccaaatgttcatgaagttgaagtaaatgcattcattgtttcaattattcttaaagagaaaaatgcccaaagacatcttaattgcatgggtatgtatacacgaaatacacatggagatgtcttcaaatataatatgtgcatgtcttcattccttccctc

SEQ ID NO: 751422 - DNA, 459 bp, Homo sapiens
agatgtcaagccggatggagtggagcgtggacaggggagagatggaagggaaataaaccaagcagggaaggtatctcctcgagcggggtgggagggattcggcaggatctccagggaggaaatgagcgaaggctgacctgacccgcaccaccggagtccaagccagcttttagggttaagggcgcaggtagccactgtgtgctccgccccggagggagcgcayccctacctggaagagcctcaggatgttggctaccatgatggagaccgaactccccgaagccccaatcactccaactactttctccggcttgacgaaaaccggcggttcgccgttggtgcagcgcacgtcggaggtgtccttctggatgagcgcctggacgaaagtaagcgactgttcgagcgcgtaagtgtccctggaacaagtgtccaggatccgcgcgcccagcgtcacgttgg

SEQ ID NO: 751423 - DNA, 577 bp, Homo sapiens
gatgggcagccaggtttgagaaccactgtatgaaatggcagaatgaggattccagctcatgtctgcctagtccccagtcctgtattgaaataaagcactgaggttcagcatttcacatgggacataatagtttttgttttatatttgttctgtatcaatatataacgttgttcatccttattgactacataggaaaaataccctccaaaagctgtattcttcttcataaagactgaaaatatatgataatttatgatgtatattacataaactcatcccaactttaatgataaagtaagaagatattgtgtgaaacaacagagccrattagggtaaatcagtaagtccgagccaggcgtggtggctcacgcctgtaatcccaacactttgggagaccaaagtgagccgatcatttgagcccaggagttggagatcagcctggcaacatggcaaaaccctgtctctacaaaacgcacaaaaaggagtagctaggcttggtggggcatgcctatagtcccagctgctctggaggctgagctgggaagatcacctgtgcccaggagtttgtggctgcagt

SEQ ID NO: 751424 - DNA, 586 bp, Homo sapiens
tgtttgccgcaactctattcacaaaacggaaaatatggaaccaacattaaggcctatcaaaaggagatttatgaaatcaatcctggtttatcccttgcatatagttctacagttattaaaatggtgatgttcaggggacactaactcaacccgaggggtggttgcatcggctttttgcaagaaacaggccaagctaatggctaagctgtttggggagcacctgctcattgtagaggagacacctgcctttcagtttccatcacatccttgtaagactacagactcaatatcaccagattatcctcttcgcaggagaagctgcaaaatgtcctggcttttaaaaygttgtgcaggtcttggagggtagaaagaaagtatctgtgggctgcattttagctaacattcaggagttttgcaaactttaatgtggaactaaaattattgtcaggtaataatgctcagtacttataatcagtcttaaaacataagattaaaacactatatttctatttaggtaaaattatgtacatatgtttgcatgtgtgtttatgtgatgttgacacaaatgaatgcacaaatgatatat

SEQ ID NO: 751425 - DNA, 583 bp, Homo sapiens
ctatccaggcattcgcttgtattttcagggtgtttgtttgtttgtttgtttgtttggttggtttgtttttgcctctattcacttctgctattaacaaaatgaagctatatcgggcacagaatgtctctgaaaaagtgtttggcttttaagagtacagccccagaacgaaaaacaggattaaaaaccagcttaacttctgtgtgtagacttttggcctgcatgccctgtaggtaagaatcgaggacgtaaggagttctatttttaatgtcttcttacagaagcaccatgaacttagcaatgcacaaaatttatgacacactcaatcttataacatgagggagagggactckgcagtgacttttccattgcatttcccatgaatctcagatcacttgtaaattgcagagcctgacatttaaactgtgccgtgttgatagttcaggcaccaccctttctccctgccgccctcccccgccccctactctgggagaccaaggctgaggcttcatttcataatacaccataatggtgagtcaacggtcaaatgcagcctgttaagtctaaagcaattaccttctgctgc

SEQ ID NO: 751426 - DNA, 509 bp, Homo sapiens
tgagaaagacgtttaccttccagacattgcaaatttcctaaaacattcattaactaatattttctttgctcaaacccgcatcccatttcttctttgacattcatattcattcccttagtttccctgcttctgattccaataccaagagtagattctctctccaaggaaataaacagcaataatgccagagagggagaagatttagaccatcttgtcatcctcatcaccgctggctcccactayccttattcctaccttacctcaaagaccttacagaaaaaaagaatctacctgtaggataatagattcactacctggcttattcagatgcaataccctgcctacgtcatagttattttacagttacaatgcctacatgtcatacaataccctgatctagaattatcaacatagaaaatacttattcataaccttgcttataccattatctttatactaacttggtgcaaaagtgactgcaatctttgccattacctttaaaagcaaaa

SEQ ID NO: 751427 - DNA, 574 bp, Homo sapiens
agggtgtcaaatgacctcccaactattctcaaaggcatccttagattggcacatagagaaagcttagctgatcagcctgaacttttagccacaggatgcaaaaggagcacaaatcctagcatatgcactgaagttcaccatccagcatgagacgtaggtgcagaacatccaaatcatgtcttgaaaagaatgaagaatcagagcagatctacaacactgaagttcttrtgctgatatcctaacttttatatttttcttttctttatttttttatttttatttttattttttggagataggctctcactctgtcacccaggctggagtgcagtggcatgatcacagctcactgaagcctccacctcctgggttcaagcgactcttgtgcctcagcctccccaatagttgggactacaggcacgcacctccatgcccagctaacttttgtatttttagtaaagacggggttttgccatgttggccaggctagtcttgaactcctggcctcaggtgatctgccctccttggcctcccaaagtgttcagatgacaggcatgagccaccgtgcccggcc

SEQ ID NO: 751428 - DNA, 541 bp, Homo sapiens
cagaggtcagcctgcctggagacttacacatctctctccacctggacgccaagctggcatgtttcagtttaacaggtccaaaaccaaactcctgctctttccccttaaacctgcttcaccctcagccttcctcatctgttgactgcaacaccatccttcctgttgtttgaacaactaaagattcatcatgcagtggcgtcatcagctcaccgcagcctggaactcctgggcttaagcgatcctcccatctcagcctcctgagtagctggaagcgcgcaccaccaaacctggstgagttttaaaacatttttttgtagagaaggggtcttgctatattatccaggctgatctcaaactcctggcctcgagtgatcctcccacctcggcctcccaaagttcttggatcacaggcgtgagccactgcacctggccaggattcatctttgactcttctctcccacacctgtcttttccactcacaattcctatcaactccaccttcaaatacatccaggatcctctccccatctctgtctggtgc

SEQ ID NO: 751429 - DNA, 585 bp, Homo sapiens
tctgacctaatcagttgagcccttaaaaggcctgagtccttttggaagtcagagatttaaagtgtgagaagaggccacattgcaaatataacagaatgatctctaggagctgggagtggtccctagtcaacagctatcaaaaccactggggccttagtcctacagttgcaaggatattagttctgacaacctgagggaaaccaggagtggatcttcccctagtggagcctccagatgaaggctgctggctgacaccttgatggcaaggtgagaccctgagcaaacaccccagytacactgtgcccaaacctcagacctatatgaattagctgatggccaggcacggtggctcatgcctgtaatcccagcacttcgggagccaaggtgggtggatcacctgagatcaagagtttgagacagcctgaccaaaaattagctgggcgtggtgatgggtgcctgtaatcccagctactcggtaggctgaggcaggagaattgcttgaactggggaggtgaatattgcagtgagcaaagattgcaccactgcactccagtctgagtgacagagtgagactcagtctcaaaa

SEQ ID NO: 751430 - DNA, 566 bp, Homo sapiens
cccttgagcccaggagttccaggctgcagcgagctatgatcgtaccacggcaccccagcctgggtgacgagagcaagaccttaacttaaaaaaagaaaaaggctggctgggtgcagtggctcacacctgtaatcccagcactttgggaggccaaggcaggtggatcacttgaggtcaggagttcgagaccagcctggtaaacatgatgaaaccccgtctctactaaaaataccaaaraaaaaaaaattagctgtgtgtggtggcatgcttgtagtcccagctacttgggaggccgaggcaggagaatcacttgaacccaggaggtagaggttgcagtgagccaagattgtgccactgtcctccagcctgggcaacaaagcgagatgccatctcaaaaaaaaaatttttttttttaaagaaagaggctgaccacggtggctcatgcctgtaatcccaggactttgggaggccaaggcgggcagatcacttgagatcaggagttcaagacccgcctgaccaacatggtgaaaccccttctctactaaaaatacaaaaattagccaggg

SEQ ID NO: 751431 - DNA, 590 bp, Homo sapiens
tatactaagtgtgagacagtgcataattgattttttttctctactctctcttttcacatgtaaaatgtggatttacatacactaattagagcttcatgagaatgtaaccatttaactcactgcctaccctccctatctttttttcccctcctgcttgctctttcccatttaaatattgaagttcacaaaaacccctttggaaaaagcatagattacaagtgttactgtaatttgtgtgtttttctttccaggtgcatcttcaatgttagctaaatacacctctawcgtattgaaggaaaaaattcaaaccagacagagaggactggaatatataactagcgcttcagtgcaaagacacagacctacatcatgagaaacaacagcccactaggaaccataacctcccccacccaaaaaaaaaaagtcactgaccatagcaagatagcaatatgtgagttctctgaccaagaatttaaaatagaagttttaagaatatgcagtgcatagcaattcacaaatttatgaaagtaatttaacaaataaattgaaataatttttaaaaatcaaatagacatcttaggaatcaaaaa

SEQ ID NO: 751432 - DNA, 590 bp, Homo sapiens
tatactaagtgtgagacagtgcataattgattttttttctctactctctcttttcacatgtaaaatgtggatttacatacactaattagagcttcatgagaatgtaaccatttaactcactgcctaccctccctatctttttttcccctcctgcttgctctttcccatttaaatattgaagttcacaaaaacccctttggaaaaagcatagattacaagtgttactgtaatttgtgtgtttttctttccaggtgcatcttcaatgttagctaaatacacctctaacgtattgaaggaaaaaattcaaaccagacagagaggactggaatatataactagckcttcagtgcaaagacacagacctacatcatgagaaacaacagcccactaggaaccataacctcccccacccaaaaaaaaaaagtcactgaccatagcaagatagcaatatgtgagttctctgaccaagaatttaaaatagaagttttaagaatatgcagtgcatagcaattcacaaatttatgaaagtaatttaacaaataaattgaaataatttttaaaaatcaaatagacatcttaggaatcaaaaa

SEQ ID NO: 751433 - DNA, 628 bp, Homo sapiens
ctagtctaccatgcacactttactcatacacttccacaggcaggcactaggagcagagatgtggaatgcatttgaaaaaaagttttattatggtttgtgtgctgctttaatttaatcccaattttccctgaaaccatgaaaatgtcaacatttcaatcaaaattttaggtcaagcactttaattgttaataaccagttgttaaccagtcagttatttggtgtgttaccgaattactgaaatcatggaaagcaacacttatctttttgttgtaaaaggaaatyggctttttgagggaaaacaattatatcgcttcccatagctccttcaggttctcgtataacttgttctactgcattatctcagcagtgactgttgataaaatggcaagcatcttcttaaaacccaagaagcatggttggcaaatgatactgctttagtgggacacagatgcccaatcttgatatttggccatttgatatatgtctgacatctgggctttgaccaatttaacacataattatatatctaaagttaggaaagagatactcaaaagtaagtcttgctcctgtttccaaacactcagaatcaagaatcaaggaccaggcatgtcccaacagactgtcactg

SEQ ID NO: 751434 - DNA, 627 bp, Homo sapiens
tggcttgatccaagttgtcagctactaaggtatctcgtaaagcaaaataaaaagcttggcgaattttctcatcttttacttttactaaatcaaataaacgaggagtattttcaggagtttgaatttcggtcatctttttcgcccatacagccatctaaaagtaaacaaacaaacaaacaaaaacaacagttaacaaaaaagaaaactcaaaaaaaaaaacaaaaaaaaacccataggaataaattcaacaaaagaaacaagaattatacacaaaaggttctaaaattagacctaaacggaagacatctcatgtktgtggttctaaagatttaataccgttaagatgcctatactatctaaactgatctacaaattcaatacaacctgtatcaaaatcccagttacttcctcgcctttttttgtggcagtaattgaccatctggatcttaaaagtcatatatacaaattatagggacccagaacagtcaatatgataaagaacaaaattagaggactcagacttcctgattttaaaacttattacaatgctgcaataatcaagacagtgtcctataccagcacaagtaataaaactgaaagcccagaaataaacctttacattaatgg

SEQ ID NO: 751435 - DNA, 603 bp, Homo sapiens
tcgccttctataagtgattctgaaagtttatcttgcagtgtttcccaaccctgagaaggttatatgtgtctcaccaaacctatggtcatttctaacctcttttctttccctgttgaacaccatctgtttgccagtgcgcacatatacatgaacacacacacacagtttggtaattgtctctgctaccaaaactagctattgaaaggtcaaggaggccgggcacagtggctcatgcctgtaatcccagcactttgggaggccgaggcaggtgaatcacctgaggtcaggagttcaggaccagtctggccaatgtgataaaaccccgtttctactaaaaataccacgccacactgggcgtggtggcgggcacctgtaatcccagatactcgggtggctgaggcaagagaatcacttsaacccaggaggcggaggttgcagtgagctgagatcgcgccattgcactgcagcctgggcagcaagagcgaaactccatcttgggaaaaaaaaaaggtcaaggattcccatgtccttttggcatcacagcataacttaaggcaagagaagtgcaagatatgaaaacaccaagcaactgtaccagagcca

SEQ ID NO: 751436 - DNA, 483 bp, Homo sapiens
acttgaacattaaatagaaataaaataccagcagaaagagatacacctgataatatttagagacctgcaacacagatattgtttttaggggtcccatactcctagtccacatgtcaaaaaatctgtttatttattcatttatttatttatttatttatttttgagacagagtctcattctgttgctcaggttggagcgcactagtgcaatctcggcttactgcaagctttgtctcctgggttcaatcagttcaaatctttcagcctcctgagtagcagtgtttacaggcatgtgccaccakgactggcatttttttttttttttaagtagagacagggtttcaccatgttatccaggctggtctcaaactcatggtctcaagtgatctgcccaccttggcctcccaaagtgctgggattacaggcttgaaccaccacgcccagcagaaacatcctttttaaggtaaatggcatgttgccctat

SEQ ID NO: 751437 - DNA, 483 bp, Homo sapiens
acttgaacattaaatagaaataaaataccagcagaaagagatacacctgataatatttagagacctgcaacacagatattgtttttaggggtcccatactcctagtccacatgtcaaaaaatctgtttatttattcatttatttatttatttatttatttttgagacagagtctcattctgttgctcaggttggagcgcactagtgcaatctcggcttactgcaagctttgtctcctgggttcaatcagttcaaatctttcagcctcctgagtagcagtgtttacaggcatgtgccaccaggmctggcatttttttttttttttaagtagagacagggtttcaccatgttatccaggctggtctcaaactcatggtctcaagtgatctgcccaccttggcctcccaaagtgctgggattacaggcttgaaccaccacgcccagcagaaacatcctttttaaggtaaatggcatgttgccctat

SEQ ID NO: 751438 - DNA, 606 bp, Homo sapiens
cgtcccattggaataggccctcaatctggccatgttatcagtgggtggctgctattttccccacggtctcagggtggaagataaggttttcatggagttacccagaaacggagcaagtagggcgtaaagggtggcacaaaagaggaatagaagacagaatgagtccacatagctttacatatttggaaatgaaaaatccaggaacgtaatgactcctgtgactctgaatggctctgtgtattagtctttcagttttcaaagggagtaaattatatgtgtgaactgaaactatatatcttctcccagttctcagaattgatcatttattttacatcgctcttcagtctctataccagtattttagaagttgtcataagtaattcctctaagtgctacctcgctggagtggtactggagcagcaaagtagcaaaagaatactagctgggarcacaaaattaatttttacaaatttctcagtggcacgttatttctaccagtcatataatcagtagactatatagaaacagaggtactctagggtaccgtacttgtgctctgaatagctgctagacatgcagtgcacggtgcgatgtgtggtatctcaa

SEQ ID NO: 751439 - DNA, 606 bp, Homo sapiens
cgtcccattggaataggccctcaatctggccatgttatcagtgggtggctgctattttccccacggtctcagggtggaagataaggttttcatggagttacccagaaacggagcaagtagggcgtaaagggtggcacaaaagaggaatagaagacagaatgagtccacatagctttacatatttggaaatgaaaaatccaggaacgtaatgactcctgtgactctgaatggctctgtgtattagtctttcagttttcaaagggagtaaattatatgtgtgaactgaaactatatatcttctcccagttctcagaattgatcatttattttacatcgctcttcagtctctataccagtattttagaagttgtcataagtaattcctctaagtgctacctcgctggagtggtactggagcagcaaagtagcaaaagaatactagctgggagcacaaaattaatttttacaaatttmtcagtggcacgttatttctaccagtcatataatcagtagactatatagaaacagaggtactctagggtaccgtacttgtgctctgaatagctgctagacatgcagtgcacggtgcgatgtgtggtatctcaa

SEQ ID NO: 751440 - DNA, 590 bp, Homo sapiens
acaggatatgctcagtactttggttgtggtgatgttatcacaggtggatccctagggccaaactcatcaagatatatatatacatattaaatgtgtccaacttttatacaccaatgatacctcaataaagctttcaaaagaataaaagaaagaactaactgcataaagatgcttagacaaatggtcactgtctaccctggcatggtacagtcaagggcaaaatactttctcaggttaccagaataggtatgaatatggtctgatggctgagccagagagacgggtagtcctttggacagagggacacagtagtggatgtcagaggggackaagaactagagccaagtagaagctcaaaagcttcggccagtgccagtgtcagagcaaccagtggagacctgcatggataaaggtgcagcagcagatgactaacaaccaggcccaccccagccccactaatgcttgatagaattgtatgctacctcaggaagaaggcaggatggacgtaggagtgggagggctctgaaattactgggtttaccttgagttgactagactttaacataatacagcaagaaaaattgactaag

SEQ ID NO: 751441 - DNA, 436 bp, Homo sapiens
ctctctccataaatgacagcagaagagttcccagcagcaagactggaggatgggcttatggtaaggggagatgagtgggaagtcacagacattaatggtgaataatttacacttttcatctttacatgattaaaaaaatcagttaaactactgaacacayggaacatggatttacttatttgatcagtgtgttagtttttttattgctgctgaaacaacttactacatatttactgtcttaaaacaatacaaatttactggaaagacgtcctgtgttcatgggctggaagatttaatattgttaaaatgtcagtactacttaaagcaatctaaaaattcaaaatcccacaacgtttttgcagaaatagaaaaatctcaactaaaatttatatggacattcaaggtacacaaaataatcaaagtaggcaaaataatc

SEQ ID NO: 751442 - DNA, 584 bp, Homo sapiens
ggtgaatttaatggagtaatactaagactttgaaggataagctgacatatccacagtcacagtggaaaacagtaacatcggcagagaaacaaaagactgtgtatggaagatttataaattaaaaagcaagtgtggtttaattgatgtatatagagagtggaatgatgattaccatgtgctgggaagggtagtgaagtggccgagggtggggaagtgggaatggttaatggatacaaaactataaatagaatgaataaggtccagtacttgatagcacaacagggtcacttcagttaacaatatttcattgtgcatttaaaaataactaaaagagtatacatggattgtttgcaacacaaaggataaatgcactagatgcctatatcaaaatatctcatgtaccccatatatatttatamgtacagaaattacaaataaaataataaataataataaaataaaatataaatataaaaaatatcactattttatgtaaatttctgtgtactcacagaaattacaaataaaataataatcctccaaagcaacaaacattatcatttttatcattcttttgatgctca

SEQ ID NO: 751443 - DNA, 494 bp, Homo sapiens
ttaatagaattatttgtttgtttgcttgttttgctgttgtattgagttctttgtatgttctggatattaatcctgtgaggataaatgatttccagacattctcactctacagattgtctctttgctctgttacttcctcagctgtgcatgagttttacagtttgatatagtctcatttgtctttttttgttttggttgcctttgcttttgaaggcagacctatacgaactttttttcaaaccgatgttattaaattattcccctatgtttttttccagtagtggtatagtttggagccttacatttaaatctttcatgcatttggagatgatttttstatatggtaagagataggggtctagttttgttcttctgcatatgaaaatccagttttcccagtaccattatttaaggaggctgtcctttccacaacgtatgttcttggcacctttattgaaaattatttggctataaatatgtggatttatttctag

SEQ ID NO: 751444 - DNA, 597 bp, Homo sapiens
cacatactaatttaaataggtggtgtttaataaagaattattgagaggattccgggaagatagcagactatgaagcactagaaatctatcttttcacctatacaataattgaactggcagagtgtgtctgatgtagctatttcagaactctagactattaaaggtttgcaacttccaagggaaatcttgaacagtarattctggttattttactcaatttcagcctgaagcacaatagtagctaccatttcccaccaccaatcccatagcaggcagctaaacaggcattcttggaacaacctccacatagcttgtgggagccagagagggcaaaaatagccctgtcctccaaacatcagggatctgtgctctaattactaatgcctacttttgattatagagatacagaaaaataggtggatggccattgtaggtgcacctcccctcattgttgcaacattgcccccacaagtgacttccaggaaatttaaaggaccagcatcctttcccctacatcattttttctcttttgtctttttttcccctttgtttgtgagccaggcatttaatactaagacactcaaactgcatgtatgg

SEQ ID NO: 751445 - DNA, 608 bp, Homo sapiens
atgccttagggcacacattgtataacactgtaattttgtgttaacaaaattacccaacgaccacaggtgaggtggcaacagagttattaaataagcagagcttttgtatgttattgaagttaagctgatataaaataaaattagagygttataactttaggatattaaatgcaatttccatggtaaccacaaagaaagtagctatggaatatgaacagaaggaaatgagaatagaatttaaatgtttcattataaaaataataaacacaaagaaatatagtaatgcagaaaatgagggacacaaaagctgtaaggcataaagaaaaccaatatcaggcagggcacagtggctcacacctgtggctcccagcactttgggaggccgaggcgggcagatcacttgaggtcaagagtttgggatcagcctggtgaaaatggtgaagccccgtctctactaaaaatacaaaaattagctaggctggttgcaggtgccctgtaatcacagctactcggaaagctgagggatgagaatcgcttgaactcgggaggcggaggtttcagtgagcagacatcgcgccgctgcactccagcctgggaaatagagtgag

SEQ ID NO: 751446 - DNA, 624 bp, Homo sapiens
tatcaatattaagtattatcagccttttatattataataattcaaggaggtatttaatggtatcttttactgtttctaatttgcattttactcaattctcataattttgagcagctttgcatgtttcttttttagaacatcttattcaatctagagtgcctgttcaagtcttttgctcattttatttttcttagaaattttctctttttattgctcatttgtagtttttaaaatgagctctgtataaacatattgttatatctgttgcaaatgtcttttttcattcagaggctaataytctcagtggggcattttaagaaatacaaggttttaactttagctccaatatatcaatattgtatttccttgttggtgctttctatgtcctatttattatttccctatccaaagttcataaagatagctacctacattatcctttataaccttcattggcgtttatgttcatatttagaactacaatccaccacctgaggttctctttttttttttttttttttaagttccaaagtacatgcaggatgtgcaggtttgttacacaggtaaatgtgtgccatggtggtttgctgcacctatgaacccgtcacctaggtattaagccga

SEQ ID NO: 751447 - DNA, 624 bp, Homo sapiens
tatcaatattaagtattatcagccttttatattataataattcaaggaggtatttaatggtatcttttactgtttctaatttgcattttactcaattctcataattttgagcagctttgcatgtttcttttttagaacatcttattcaatctagagtgcctgttcaagtcttttgctcattttatttttcttagaaattttctctttttattgctcatttgtagtttttaaaatgagctctgtataaacatattgttatatctgttgcaaatgtcttttttcattcagaggctaatactctcagtggggcattttaagaaatacaaggttttaactttagctccaatatatcaatattgtatttccttgttggtgctttctatgtcctatttattatttccctatccaaagttcataaagatagctacctacattatcctttataaccttcattggcgtttatgttcayatttagaactacaatccaccacctgaggttctctttttttttttttttttttaagttccaaagtacatgcaggatgtgcaggtttgttacacaggtaaatgtgtgccatggtggtttgctgcacctatgaacccgtcacctaggtattaagccga

SEQ ID NO: 751448 - DNA, 610 bp, Homo sapiens
cttccagaacaaaaatggacaaatgggatcgcgtgaagttaaaaagtttctgcacagcaaaggatacaatcaacaaagtgaagagacaacccacagaatgggataaaatatttgcaaactacccatctgacaagggattaataacaagaatatatgaggagctcaagcaattctatagraaaaaaattaatccaatcaataaatgggcaaaagatttgaatagacatttctcaaaataatatatacaaatatccaacaggcatatgaaaagatgctcaacttcattgatcataagagaaacgtaaatcaaaactacaaaaagatatctcaccccagcaaaatgacttatatctgaaagacaggcaataacatgctggcaaggatgtggagcaaaggaaatccttgtacactgttgatgggaatgtaaattagtacaaccactattgagaacagtttggaggttccttcaaaaactaaaaatagagctaccatatgatccagcaatgccatttctggatatgtagcaaaaagtgaggaaataggtatattgaagagatatctgcacttctatgcttgttgcagcactgcttacaatagctaagatttgaaa

SEQ ID NO: 751449 - DNA, 628 bp, Homo sapiens
atactgagaatctataaagaactcaaatcaacaagaaaaaaacaacccactaaaaagtgggcaaaagacatgaacagacacttctcaaaagaagatgtacacacagccaacaaacattttaaaaaatgctcaatatcattaatcatcagagaaatgcaaattaaaccacaatgagatacaatcttacaccagtcagaatggctattactaaaaagtcaaaaaataacagaggctgcagagaaaagggaacacttacacactgttggtgggaatgtaaattagttcaacccttatgaaaaacagtatggagatttctcaaagaacaaaaaatagaactaccatttgacctagtaatcccactactgggtttctatccatagggaaaaaaattactttataaaaaagacacctgcactcatatgyttatcacagcactatttacaatagcaaagttacagaatcaacctaagcgtccatcaggagtggactggataaacaaaatgtggtatatatacaccgtggtacacaatcataaagaagaatgaaatcatgtcctctgcagcaacatggatgcagtttgaggccattatctaccctaagtgaaataatgcagaaacagaaaatgaaa

SEQ ID NO: 751450 - DNA, 635 bp, Homo sapiens
accaaataatatactctagttttcttagctaatttttaagcgtctccccattcctccagatccaccaagaaaaattcatcctacaccacatttttacccctggacctaaagtgtattatatgttcttgaacaggaaaatttcatctcctgaaaaaaaaaaaatyactgatatttccatgagtacatattgattctggtttgactactattttgaaatagagtggatgtaaaaatctatgatgaaatcttaaaactagtaaaattatcattagaactagtattatacatggaactattagtctggtagcatagtctgttatactactcacactaaagcaaaataaaaagtactgtcttcacttggaactgttgtcttacaattctgtgcctgtcttcaccatttcatgaaaatattaattgttcttcttggcttactttttctttaatttatgttcttgccaggtcaaaatcaaaagtgatgatttaggacttgggcatttgtcgagataagttcatattgtcaccactttcccaattttgaagcttacaaaaaaaataggcaggattttagtttgccttcagttagggaaaggagaattcatttgccacaggagtaaaatcctacgttttataaa

SEQ ID NO: 751451 - DNA, 585 bp, Homo sapiens
attagagaaatgtgaatcaaaaccacaatgagataccatctcacaccagtcagaatggtgcttattaaaaagtcaggaaacaacaaatgctggtgaggctgtggagaaataggaacacttttacactgttggtgggaatgttcaaccattgtggaagacagtgtggcaattcctcaagaatctaaccagaaataccatttgacccagcaatcccattactgggtatatactgaaaggaatataaatcattctactataaagacacatgtgcatgtatgtttattgcagcactatttacaatagcaaagacatggaaccaacccaaatggcccatcagtgatagactggataaagaaaatgtggtgtatatacaccatggaatactatgcagycataaaaaggaatgagatcatgtgctttgtggggacttggatgaagctggaagccatcatgctcaacaaactagcaggaacaaaaaaccaaacactgcatgttctcactcataagtggtagttgaacaatgagaacacatggacaaagggaggggaacagcacacactggggcccgtgacggtgggaggaggg

SEQ ID NO: 751452 - DNA, 571 bp, Homo sapiens
tatgtaaatttcccttttgacttcttcattgacccatttgttgttcaagagtatattgtctgatttccatgtatttgtgaattttccaaaattccttctgttattgatttccagttttctaccattgtggtcagaaaaaatactttacacaatttcagccttttaaaatttgttaatagttgttttgtgctctaacatataatctgtcctggagaatgtttcatgtatgttggagaagactgtgtattctgttgctgttgaataaaatgttmtgtatatgtccattatcacttgatgaaaagtgttcaagtccagtgttttcttattagttttctgtcttgatgatctatccattattaaaagtggagtattaaagttccctgctacgattatattgcaatctatttctccttcagatcctttaatatttatttcatatatttagctgcccccaatgttgagtgcacatatatttactgctttatcattatatagtgttcttgtctttttttttttttttttttttgagaccgagtctcactctgttgtccaggcgctggagtgcagtggc

SEQ ID NO: 751453 - DNA, 584 bp, Homo sapiens
aggacacctgtgaagtcactggaaatctgtagcacaatgggattctgcataataaaaatgttagaatttacaaaatgtcatcaaatgctcgtggcccacttctataaaaaacatgaataattcacaatgctatatatggaattacattttgctgccccaattccatttaaataaatgtgtttatgagtcaccaatttcattttcctctacttctaagtggtgacctttcacttatgagctgaaaagcaatcaactctgggtatagaataagagaaaagaaaataaatttaaatatttatagtaaacatttatggtggtgtgtgcactaatgattctaaacgcatttttgtttagagaaaaaagatgtataaaatccmttcactccacaaatatttattgagaagttaccacatgcctattcaagcatgttatgtggtttcaatgaaaattagacaatacaatatgggacaaaatatagaaaataaaataatatccaaggcactttatcttctcatatttttaaagcatgaatttacacagagaatgataactgaaaatatgtagtgattcttccaaatttctac

SEQ ID NO: 751454 - DNA, 477 bp, Homo sapiens
aagatgccaatatttaactttattttatgcgactacaatgaagcacaaatctctctgtgtgtgtgtctttctcatcttctttctccctctgtctttttcttgccctctttttctctcattggtcaagataaggttgacaaggctgtgctggttccctcacacgagctttccagaatgcaattttataatttttaaaatatattaaaatgttcactataatataagaaaataatttttctaatgaccaagtaaaagtagtcagaaattcaaaccaatatattcaagccattaataatcayttacacatatataacacaggtaatattatttttaaaattagtatactcttttcctgtacagtttcatatactaatcttctccatgttttcctgaggcatttatctgtagggatgaggagggtacaggggaggaggctttgaaggacagggcataaggattgttagagcagagtttatt

SEQ ID NO: 751455 - DNA, 603 bp, Homo sapiens
tttccttatgcttaggacattgttcttccacactcccattctttacttggctaatttctgttcatcctgatgtcttagctgacatttgccttctttggcaaagccacatcagaaccaatcccctcactcattatgacctttctttattgtctcatcgtattatgtgcttgtcttcatagcgctagttaaaatgtttacatatttattttgagttttcataactaaattgtatgttttttgagagcaaagatcatgtttattttttttatataccaggtgttcagcaaagtccttgtcatttggtaggcctaaacttaaattggaaaagatttcatgaatttggtgagaaccgaggtagaagcacaaggaatatctggacygtgaaatgtactcaaactgatagaacaagaactctggagcctaatagctataaatttaagtaagttttaagaattagacaagtcatttaaatgagccacagttgtttcgtatgtgaaatagaggctatcatatgtgataaagtcaatgtgataacatttggaaaccttattcaattcctggaacaaagcaggtagtcaatacacaatatatgatagctattat

SEQ ID NO: 751456 - DNA, 585 bp, Homo sapiens
atacgcttttccttatgcttaggacattgttcttccacactcccattctttacttggctaatttctgttcatcctgatgtcttagctgacatttgccttctttggcaaagccacatcagaaccaatcccctcactcattatgacctttctttattgtctcatcgtattatgtgcttgtcttcatagcgctagttaaaatgtttacatatttattttgagttttcataactaaattgtatgttttttgagagcaaagatcatgtttattttttttatataccaggtgttcagcaaagtccttgtcatttggtaggcctaaacttaaattggaaaagatttcatgaatttggtgagaaccgaggtagaagcacaaggaatatctggactgtgaaatgtactcaaactgatagaacaagamctctggagcctaatagctataaatttaagtaagttttaagaattagacaagtcatttaaatgagccacagttgtttcgtatgtgaaatagaggctatcatatgtgataaagtcaatgtgataacatttggaaaccttattcaattcctggaacaaagcaggtagtca

SEQ ID NO: 751457 - DNA, 554 bp, Homo sapiens
tgtaattcaaggataatcaatatgtcaccagaaacaaataactaagatcagactcgttttaggggaggtgatagataaatatgaatatagggcatctcaaagagggtacaagggtaagtcctaaaaatatagaaaagagaggatgcatatgctaaaatttgttttattgaattataatttgctttgtattgaattttcatgaaaataatatggcttgatgcacttaacgtttttcgtaccatagaacaattcttcagtctatttaagcctatgaactcttttctcagaataaagtttctaaagacataaaataaaatacatcccactaccaagaaaatagttacattatagttatcaaagaactgaagaaaaaatctatgatgtagtaacatagttgcctyttattagtgtattaaatatgaaggcctgtcattaagttataataaataacataattacaaatggcattaagcataaataatattttgatacctctttaacaactgtaataaaatatgaaaatgtctgtcatttgtattagtgacaaggttatg

SEQ ID NO: 751458 - DNA, 554 bp, Homo sapiens
tgtaattcaaggataatcaatatgtcaccagaaacaaataactaagatcagactcgttttaggggaggtgatagataaatatgaatatagggcatctcaaagagggtacaagggtaagtcctaaaaatatagaaaagagaggatgcatatgctaaaatttgttttattgaattataatttgctttgtattgaattttcatgaaaataatatggcttgatgcacttaacgtttttcgtaccatagaacaattcttcagtctatttaagcctatgaactcttttctcagaataaagtttctaaagacataaaataaaatacatcccactaccaagaaaatagttacattatagttatcaaagaactgaagaaaaaatctatgatgtagtaacatagttgcctcttattaktgtattaaatatgaaggcctgtcattaagttataataaataacataattacaaatggcattaagcataaataatattttgatacctctttaacaactgtaataaaatatgaaaatgtctgtcatttgtattagtgacaaggttatg

SEQ ID NO: 751459 - DNA, 623 bp, Homo sapiens
aagcctggagcacaattttcctatctgtgtccttcttcagctctttgtgcatcttttaagacagttattttaaagtatttattaaatcaaattctgggattcctcagacatgacattttttgttccttcaggtgggctatacttttctgaggttttttaatgccttgtgattttttaaaattgaaaactgtctatttcaatcttacattgtgttaactctggaaattgtattcttcgtctgcttccagaacatgttgwcttttttattgttgaagggtatctctgtgctgaggatttgcctgaggtgaaagcttaaagtcatctcaggacttagttctgggtctacgtccttccatgggcttgcatggcggctttctaaatgccctgatatgtgtggttgtttttgaatattctaatctttaaatgcctgacttctaaaaggggaaaagggggtaaaaaacagtgggagttaagacagtgatatccgagatagtggtagctagcctctgtgcctgaacctgagtgatcagaaacaacagtcagcaatcagaactcggaaactgaatacacggaggacaaactcttgcttgtccatcttggctccagcaagacacaccaaaaac

SEQ ID NO: 751460 - DNA, 623 bp, Homo sapiens
aagcctggagcacaattttcctatctgtgtccttcttcagctctttgtgcatcttttaagacagttattttaaagtatttattaaatcaaattctgggattcctcagacatgacattttttgttccttcaggtgggctatacttttctgaggttttttaatgccttgtgattttttaaaattgaaaactgtctatttcaatcttacattgtgttaactctggaaattgtattcttcgtctgcttccagaacatgttgtcttttttattgttgaagggtatctctgtgctgaggrtttgcctgaggtgaaagcttaaagtcatctcaggacttagttctgggtctacgtccttccatgggcttgcatggcggctttctaaatgccctgatatgtgtggttgtttttgaatattctaatctttaaatgcctgacttctaaaaggggaaaagggggtaaaaaacagtgggagttaagacagtgatatccgagatagtggtagctagcctctgtgcctgaacctgagtgatcagaaacaacagtcagcaatcagaactcggaaactgaatacacggaggacaaactcttgcttgtccatcttggctccagcaagacacaccaaaaac

SEQ ID NO: 751461 - DNA, 573 bp, Homo sapiens
tgctatcagttttctgatttatttttataggagcttatttaaaacatgaaagataacctgtaagtagctagcttggataacattgtgaaagcccaaccctgggtggggaatgttccttgtttaggccctaatttttctcttgggaatagcttccttgtccattgttctatgtggtccctgactccactctgggaggggttcttcctttactgttttcctccgtggctttctctaatacaggtattagggaaacacaaccttcttacagggtgcacagctttctcagcctgcattctgctcatgataggtacgtgtctaagatccagtcagaaaactttcacatacagcttcatgatttctttgactaattctctcaaatcttaataggcttttaatccatttccttccaaaaagttttctgtgccagaratcttttagagagcggagttttcatgtaacttgtgctttttttctatttcgtcttcctattgcgctatctattccggaaatgctatgcctttattcttatatttgctttcaggtatcttaattcatttaagttttttaatacta

SEQ ID NO: 751462 - DNA, 530 bp, Homo sapiens
gaaaggggccatgagccaagaaatgtgggcagcctctagaagctggaagaggtaaggaaaaggattcctctctggatcttccagaaactatttcagccctgtcaaccccccgatattagcccagtgaagcccatgttagacatccaacgtgcagaactgtaagataataagtgtgtgttgttctaagccactaaatttatagtaatttgttatagcagcagcagtaaattaattccccaacctaggatagaagttgaagaaaacaaagcttaattgaggaggcggtgaattatagtaacagaagcagatggtaacttgaggaaggaacgataatttggggaaggaacagaagttaattctcatgtaggatccatcccakatgttggggaacaatagtgggtactatcagataattttattttttcctctttggcctcttgctcatgatagatctgagaagacacttccacattgcttatgctggctggatattaaaatatgttgcaagtgtctcattctccaattagtag

SEQ ID NO: 751463 - DNA, 589 bp, Homo sapiens
ctgggtgacagagtgagatttgatctcaaaataaataaataaataaaacagagaatatataacttaagctttgtggatgataaggtctgtcacagctgcacaactccagcaccacagtatgaaagataacataaacaatacatgaatgaatgagtgtagacgagttaaaaaagaacgtgatgaagaaatttgaatttcatatgattttcatgcatcatgaactttttttaaaaattattttttaccatttaaaaatgtacatacgattcggggataatggctcatgcctgtaatatcagcactttaggaggccaaggcaggaggatcacttgaggccaggagttcaataccaggctgggtgacatagcaagagcccatctgtattttaaaaattacaaaattagctaggtgtggtggtgcaggcctgtagtccaacctactytggaggctgaggtgggagaactgcttcagcccaagaggtggaggctgcagtgagctgaaattgcaccactgcactccagagtgggcgacagagcaggaccctgtctcaaaaaaaaaaaaaaaaaaggaaaataaaaaaagaaaaaga

SEQ ID NO: 751464 - DNA, 620 bp, Homo sapiens
attttggtatgttatagaaacaccaaaggtttctcatttctagtgggaacttcatcaaaaatagactccatgcggatgaactcctttccactatcctgttaccatcacagattgtcattattaagattgactctcatgcatataaaactgaacctgaacataaaacagaattctctagtaggtttttatgctcaatcgtttagtgctggaacggttagggtatgctttctgaatgaacctcctaagatcgatccaagtcaacttccttatgatgacctatttagaaaacagtataatgcacttgatttggagaaacaaaagtgatctctgaaaggacacaaattcattgttaaaaaaggatccaaattcattgttaagcatggactcacagagggcccagatggccacctggtccttcctgagtctttgamgcttctattgttaaaagctatgcacttcacaactcaacatggaaaagacaaagtgatacaagttatgaaaaaatattgttggggttactgtgctaacatttctaaaatggttcataaccaatattttggtttgtcaaacttataatcctgggaaaacaatcaaaacttcaggtagcatattcctaccat

SEQ ID NO: 751465 - DNA, 631 bp, Homo sapiens
ctttccactcaaaataatccctacatcaaagtggtatattttggggaggcagactctgctgtcctttaacgttaggcacagatcatttttggaaaagaccaagaagtatatgttctgaattctaataaaaatggaagaaaatacaattattaaaaatcaccgggagccaagatggctgaataggaacagctccagtctacagctcccagcgtgagtgacgcagaagatgagtgatttctgcatttccaactgaggtaccagattcatctcactggggagtgtcrgaaagtgggtgcaggacagtgggtgcagtgcatcgagcgtgagccgaagcagggcgaagcatcgcctcactcgggaagtgcaaggtgtcagggaattccctttcctagtcaaagaaaggagtgacagatggcatctggaaaattgggtcactcccaccctaatactgcacttttccaatggtcttagcaaatggcacaccagaagattatatcctgagcatggctcggagggtcctatgcccacggagtcttgctgattgctagcacagcagtctgagatcaaactgcaaggtggcagcgaggctgggggaggggtgcccaccattgctgaggcttgagtaggtaaa

SEQ ID NO: 751466 - DNA, 631 bp, Homo sapiens
ctttccactcaaaataatccctacatcaaagtggtatattttggggaggcagactctgctgtcctttaacgttaggcacagatcatttttggaaaagaccaagaagtatatgttctgaattctaataaaaatggaagaaaatacaattattaaaaatcaccgggagccaagatggctgaataggaacagctccagtctacagctcccagcgtgagtgacgcagaagatgagtgatttctgcatttccaactgaggtaccagattcatctcactggggagtgtcggaaagtgggtgcaggacagtgggtgcagtgcatcgagcgtgagccgaagcagggcgaagcatcgcctcactcgggaagtgcaaggtgtcagggaattccctttcctagtcaaagaaaggagtgacagatggcatctggaaaaytgggtcactcccaccctaatactgcacttttccaatggtcttagcaaatggcacaccagaagattatatcctgagcatggctcggagggtcctatgcccacggagtcttgctgattgctagcacagcagtctgagatcaaactgcaaggtggcagcgaggctgggggaggggtgcccaccattgctgaggcttgagtaggtaaa

SEQ ID NO: 751467 - DNA, 631 bp, Homo sapiens
ctttccactcaaaataatccctacatcaaagtggtatattttggggaggcagactctgctgtcctttaacgttaggcacagatcatttttggaaaagaccaagaagtatatgttctgaattctaataaaaatggaagaaaatacaattattaaaaatcaccgggagccaagatggctgaataggaacagctccagtctacagctcccagcgtgagtgacgcagaagatgagtgatttctgcatttccaactgaggtaccagattcatctcactggggagtgtcggaaagtgggtgcaggacagtgggtgcagtgcatcgagcgtgagccgaagcagggcgaagcatcgcctcactcgggaagtgcaaggtgtcagggaattccctttcctagtcaaagaaaggagtgacagatggcatctggaaaattgggtcactcccaccctaatactgcacttttccaatggtcttagcaaayggcacaccagaagattatatcctgagcatggctcggagggtcctatgcccacggagtcttgctgattgctagcacagcagtctgagatcaaactgcaaggtggcagcgaggctgggggaggggtgcccaccattgctgaggcttgagtaggtaaa

SEQ ID NO: 751468 - DNA, 621 bp, Homo sapiens
tttctgcatttccaactgaggtaccagattcatctcactggggagtgtcggaaagtgggtgcaggacagtgggtgcagtgcatcgagcgtgagccgaagcagggcgaagcatcgcctcactcgggaagtgcaaggtgtcagggaattccctttcctagtcaaagaaaggagtgacagatggcatctggaaaattgggtcactcccaccctaatactgcacttttccaatggtcttagcaaatggcacaccagragattatatcctgagcatggctcggagggtcctatgcccacggagtcttgctgattgctagcacagcagtctgagatcaaactgcaaggtggcagcgaggctgggggaggggtgcccaccattgctgaggcttgagtaggtaaacaacgtagccgggaagctcgaactgggtggagcccaccgcagctcaaggaggcctgcctgcctctgtagactccacctctgggggcagggcatagccaaacaaaaggcagcagaaacctctgcagacttaaatgtccctgtctgacagctttgaagagagtagtgattctcccagcatgcagctggagatctgagaatggagagattgcctcctcaagtgggtc

SEQ ID NO: 751469 - DNA, 542 bp, Homo sapiens
aaaaatcctgcttccgttatgtttctgctaactttcctctttcctacagagtttgagattttagaaataaaagtcaggtggggtgtggtggctcatgcctacaatcctagcactttgggagcctgaggcaggaggatagcttgaggctaggagttcaagaccaacctgggcaacatactgagaccctgtttctcaaaaaaaaaaaaaaaaaaattagccgggtgtggtgcctcgtrtctggtgcctgttgtcccagctactcgggaggctgaagtgtgatgatcacttgagcctaggggctgaagtgaccctatgatcacaccactgcaatccagcctgggcaacagagagagaccctgtctctgaacaaacaaaacaaaataaaaacaacaacaaaaaaaaaaaaagaaagaaaagtcaagatgattaacatgctattgctgctttcagccctgccatacccctcctctaagcaatgaacacaaagcctgctacctgcttgagtccagaagggaaagggtgaaaaaaaaaggagaaaagaa

SEQ ID NO: 751470 - DNA, 614 bp, Homo sapiens
acctttctcaggaatgtcaaagtcccaagaggatgccctgcagcctggatccactagagtggccaaaggctggagccaaggggtgggagaagttacttctacctccgaatactgctcctgcgtttcttcttcacgcaagctcatccacagtggtaagggtgcagggttccttcggcacgtggctccttggctgtggggttcattgggcatgaaaatatttgagtgtggggctctgtgggcatgagactctttggttgcagtgctgcttgggtgtaagactctttgggagtggggctttttgggtttggggctccttcggtgtgacagtctttgggtgtggggctccttggatgtgacattctctgggtgtgaggttccttgagcatgagactctggatgcagggcgctatgggtatgwgactctttgggtgctggactccttaggcatgggattgggtgcagggctccttgggtagggggcaggaggcccatagatccaaggatgaggctaagaagaaacccagggcagttggatatgatcagagctctgcagaggtgtctgggcaagatgacagagctgttagaagagcatggatataagctcagtgtaggag

SEQ ID NO: 751471 - DNA, 622 bp, Homo sapiens
tgagactctttggttgcagtgctgcttgggtgtaagactctttgggagtggggctttttgggtttggggctccttcggtgtgacagtctttgggtgtggggctccttggatgtgacattctctgggtgtgaggttccttgagcatgagactctggatgcagggcgctatgggtatgagactctttgggtgctggactccttaggcatgggattgggtgcagggctccttgggtagggggcaggaggcccatagatccaaggatgaggctaagaagaaacccagggcagttggatatgatcagagctctgcagaggtgtctgggcaagatgacagagctgttagaagagcatggatataagctcagtgtaggagagcatgagccctggtgtgcagtcaggcagtcagggagcagaggccrgaaaagtctgctgttggggtgtagggccacaggaccagattaagcactttcatcggaactatttgggctctgcctttgccttccagagaaagacagatttcctcagcccaggcctccagcactgcagcgggactctagctcaggcccacacacctcacacatacagccacacgctccacaggtacactttctgcacacacacc

SEQ ID NO: 751472 - DNA, 603 bp, Homo sapiens
gacatttcacagacattggtaccttgttaaagattacatttccaagatcaaaatggacaacgatgaaacatgctcaggaatagaaagcaagagggttttactaacagtagccctctagaatttataaatggtactgaatgactgacaggaagataagtagcatattaccgttcagggaattctgttactttcaaaccacgtggggtagcagggaggtagtgggggtgtctgccacgattagtcttccttcttacaccttggttgtgaaacacaattcagtgttaatctaaatgtagacataggtgtgtgtgcacgtacacacacacacacacacacgtacgcatacatatggagaaagggaaacctttcatacagtctgtgcttgacagaactgaaggtcttttatcaatgtgactggaggcttcctttacaccctggaattcattccacaggaatatttyaccttcctcaaaagtgaagctaaagagtcttccaggagtggcttcctcccctgaggtaggcctaagttttcttctcttaaaataaaaacaaggtaaatattttagaaagccaagagacttagaccagtctatacactaaaat

SEQ ID NO: 751473 - DNA, 599 bp, Homo sapiens
atagcaatgctactaatttttgtatgttaattttagatcttgcaaatttactgaattcttttgtcagttcgaagagtttttggttgagtctttaggttttcctatatataagattatgtcatctgcaaagagggatgatgtggcatcctcctttccaacttgaatgtcctttatttctctccctcataattgctctgactaggacttccagaactatgttgaataaaaatcgtgaaagtgggcatccttatcttttcccagttttgttttgttttttgctttctggtaattttttgttttktgttttgtgtttgtgtttttgtttttgtttttccgagacagggtcttagtctctcatatgggatggagtgcagtggcatgatcatagctcacaaagcttcaaattctgagctcaagtggtcctccaacctcaacctcccaggtaactgggactacaggagcatgtcacaatgccagaccaagttttttaaaaaatatttttgtagagatgatgtctcatcactttgttgcccgggctggtcttgactccaggcttcaagtgatccttccatttcagcttcccgaagtgctgcaattac

SEQ ID NO: 751474 - DNA, 599 bp, Homo sapiens
atagcaatgctactaatttttgtatgttaattttagatcttgcaaatttactgaattcttttgtcagttcgaagagtttttggttgagtctttaggttttcctatatataagattatgtcatctgcaaagagggatgatgtggcatcctcctttccaacttgaatgtcctttatttctctccctcataattgctctgactaggacttccagaactatgttgaataaaaatcgtgaaagtgggcatccttatcttttcccagttttgttttgttttttgctttctggtaattttttgttttgtgttttktgtttgtgtttttgtttttgtttttccgagacagggtcttagtctctcatatgggatggagtgcagtggcatgatcatagctcacaaagcttcaaattctgagctcaagtggtcctccaacctcaacctcccaggtaactgggactacaggagcatgtcacaatgccagaccaagttttttaaaaaatatttttgtagagatgatgtctcatcactttgttgcccgggctggtcttgactccaggcttcaagtgatccttccatttcagcttcccgaagtgctgcaattac

SEQ ID NO: 751475 - DNA, 624 bp, Homo sapiens
tattgatccctttattgttatataatgagcttctttgtctttttttctactgttcttgacttaaagtcgttttatgtgatataaatatatctactcttgcttgcttttggtttccatttgtagggagtatctttttccattccttactttcagtctatatgtgtctttactagtaaggtgaatttcttgtaagcagtatatatttgaattatgtttttttcaatcaatgtacccattctatatcttgtcagtggataatttaattcaattatgttgaagattattgatatgtgagtctttgttcttgtcatattgttrattgttttttggttgttttatatagtctttgttcctttctttttctcttattgattgttgtggtttagacgatttctgtaatggcaccatttgagttctttctattcctccttttgtgactgctttaccaatgagttttatatttttatgtgttttcatgatgggaaatgtcatcctttactttccagatataggacttccttgaatacttccttgaatatttcttttagggttggtctagtgagaatgaattccatcggcatttgtttgtctggaaaagactctttttttcctctttcatttatg

SEQ ID NO: 751476 - DNA, 624 bp, Homo sapiens
tggaatgtctctcagtttggatctgtgatgttttctcatgattaggttgaggttatgccttttttctaagaacaccatggatgtgatcttgtgtcctcagtgcatcctatcatagatacaggatgtcaataacgtcttattattagtgaggataaycttgattatttggttaagatgattcagcatcccactgaaactagtgctgggttccttcactagtaaagtgactattttttcctttgtaatcgataactgtcttggcaggagaaggaggtacttatgcttatatcctgtttgtccttaaacattcatccactaattttagcatccactgctaaagaggcactaatttttttaaaaactgagatattacatactataaaatccacccttataaagtatacaaatcagtggtttttagtatattaacaagagtatacaaccattagcactgtgtaattccagaacattttcctcaccctgaaaagaaaccctgtacctatcagcagccactcattctatccaccccgtggcactcactgctctgctctgtctctatggattttcctatgctggacgtttcacgtgtgtatggagacattagaatatatggccttttgtgtc

SEQ ID NO: 751477 - DNA, 684 bp, Homo sapiens
atttagaactaggatccgttccccatgtaagacagtttcttggatttagaacagaggtatacttaggaaagacaaaataagcaagaggtaattgacaaatagggtaatgtttagatgaagaatttcctcttctttcagtttcagattagaggtgtaaacagtcattttgtgaaagcagaagagagggagagaggaagaccacctgttagggtcgacatgggagccacagtgaagaaggccactattcctactcctgcatacagaaaacagaaatgaagggcaagaagcacccacacccagcgaaggacagaggaggatcagatgaggttccttggctcagccagctgtacacagcaggctgataccacaattggttttcatatttcccatcaaaagacaagaatgttttgctctaagaaacttctayaaagcagtttagtggctatagcaaaacataagcaacagaagaaactgttttgttacaaacatttttcttgaaagcatacaccaatggctagataaataaaaatggtactttttctaacagaacatatggccgtcaatatcatggcctgttttcttgctgtttggctcttcgactaccataagaaactttataaaaatgaaatctctaccttctccaccctcaaccatgatgaacaaaaaaacttaagaagtattttc

SEQ ID NO: 751478 - DNA, 633 bp, Homo sapiens
ataagatcactcttccattttttaaagaagagaaacggacctacaaaaagttcagtgacttgatcagggttaaaaagtagggaggtcttaatttactttaaaaattatgaattcactataaatgtctttgctgataataatggcctaaatatgacccaactactagatgaggaggccgcagttcccacccccaaaaatgtttggtctaatgagggaagaggacagtgaagaatagccataaaacaacccggaagtccagggctcaaaatctacatggagtctagcgggagcatctgagagggctaccctagggcagagcaacccatgacctttaaaaacgccaggtaaggagcaggaaaacagcaagaggcagccgcagccttgccaatgagaagagccatggggaaagcagactttccagcttctggaggccacctgcaygtcttggctgatggtccctgtctctcttctcaaggcctggcgtagcatcctcagacctttctgactctgacactactgactccctttatgaagacccttgtgataactgcacagataatccaggaaaatcttcccagctcaagatcaggactgagggttgatgccttctaagatcttgataaatttgtgttg

SEQ ID NO: 751479 - DNA, 656 bp, Homo sapiens
ggaggatcacttgaggccaggaattcaagaccagtcggggaaacatagcgagaccctgtctctaccaaaaattttgaaaatttaaataaataagaaagtgtattaacttttttagaacctgcttaatcattgctctaactayaaattctgattagcaactaggtaaaatacaacacagaggaaactgatacatacctctagtttcagagaggtcattaaactaaaccatttgacatggattattctgaacagtgcaaaaccattccaaacacgaaagccaaacataaagaactctggaaaagccattttataattgttgaagcataagtataatttaaaatttatccctttctcaaaatttataattgacattgacaatctttgagaaaaaaatcatttgaattagaaacactttcagcagctgtctatacttcctactatatatccctggattccacaggcataccaaggaactataataactacttctatcaagctacctacagaacaagaagtgttttggcttaggaaagtaactaagacatggacatttattttaccattttgatatcctttttggctctgtgagaatcagctttggcctggtcataggttaatgctttacttcgtgcacaccacatactcagattatgtaa

SEQ ID NO: 751480 - DNA, 548 bp, Homo sapiens
cttgatgcattgtttctttacgagttttgtaattttgaattatgagctcatctttagcaaagtttatgtgtggaaattttttaaaaccttggtagaggttctgggttagttttttccaaaactgcagggatagtatgagcctggatccttccatattttatgttaatttctcatcttgggagctaccaaatgacctaacatacacatttgaacctcagactataatgagaataggaagggaggtctttaattaaatcctttttcctttttctttttctttctttttttttttttttttgagacagggtcttgctctgaagtgcagtggcatgatcatagctcactgcagcctcaagctcctgggctcaagcgatcctcccacctcagcctcccaaagtactgagattacasatatgagccaccgcacccatcctttaattaaattattgaaatgaactttgttttgtctgactcaacactcaagccaaaacaaatggatttccttattgtctcccatagctagctgctctggatagctgcagcatcag

SEQ ID NO: 751481 - DNA, 592 bp, Homo sapiens
atgaacatctgaagagaaactaattcctccttaaaaataaaagtatcttcaaaatagaaaaaaaaaattcagaatcgtttcatagtttaattgcaatatgtcactaacagatggtgattcttctcttggtaaagatttaagtaaaaactttgatataaaaccaaggtaaaacatacagtgttcatgtagatgtacacatggtattacatatagacattaaattatacttatcattaagctaatttttaaattaaaatcaaagattttaaaaagtgaagaagtaaagactttcttagacaaaaaaaaaaaaattttgagggaatttgttgctagtagacctgccttgaacaagaaatattaaaagaagttttgtttttyttttagagagaaagaaaatgatatatgtcagaaactcagatatccgtaaagaaagaaagcattgggaaaagaataaatgaaggtatcattaagtattttttctaatatttaattgatttaacaggtaacagttctgaataagaatagcaacaatatattcaatgacatgcttatatataaatatatgcttatatgtaagagaaattaatgataa

SEQ ID NO: 751482 - DNA, 571 bp, Homo sapiens
accatggaatactatagtcataaaaataaatgagatcatgtcctttgcagggacatggatggagctggaagccattatcctcagcaaactaacacgggaacagaaagccaaacaccacatgttctcacttacaagtgggagctaaacaatgaaaacacgtggacacattggaggggaaaaacagatactggggcctgtccgtcawggggtgggaggatggagagcatcaggataaatagctaatgcatgctgggcttaatacctacgtgatgggttgacaggtgcaggaaaccaccatggcacacatttacctatataacaaacctgcacgtcctgcacatgtaacccggaacttaaaatgaaacaaaatatttaaaaaataaatttcaatttctagggtctgaaggacgttggccctcttctcacagctccactaggcagcgccccagtggggactctgtgcgggggtgtgcaccccacattttccttctgtactgccctttgcagcagcccctgccatctcagacccagaggcctaggaggagatttcaattctcagatcaagatctgt

SEQ ID NO: 751483 - DNA, 534 bp, Homo sapiens
ttaggtgtagaactgggcctgcttcacaagaatcgcttgaacccaggaggcggaggttgcagtgagctgagattgcgccactgcactccagcctggctggcagagagagactctgtctcaaaacaaacaaacaaacaaaaaacttgacccacctagagacctatatgctcctttctcattaagaagtgttggaggctccacaaggttcttttctaatgaaacgttcttagagatataaactaacaagtcattttatctgtctttcatttaaaactgttgtcatttttacctcttaataacttttggtaaattatttaaatgttgaaacaacaaaaagaatattgaaaagtacaggggatgrtttagagagtatttataagtaatctccttatatagtttccttgaactctaagtaggaaatgtaaaaaagtgatgacatccaaagtcggcttcttttagctactgcgtaagagtgaaaggatacactgctgattttcaacattagagtttaccctaactccattttgactttaa

SEQ ID NO: 751484 - DNA, 619 bp, Homo sapiens
aaagcttcccctttgccatccctcgcggagacaggtcatatatgacattgcaaatagaaccacctgagggctttcctccactttctaatggttgcttgactcacagaattttatctgtaattaaatctattccagctaacttaggaacagactctgataaagattatggctttagtgtaaaagccagatagagttgtttttttttcccagttatagacatttcagacctgtataatcttttactctcactttgtttaggttttccaactagacttttggcacttgcttgaatttgtttttcaattttttaatttcccaaagggcaggcaatttcaaaatctttgaaaatggatacatgtatattttaaaataaatmttttataacgtatcttttataaagtatttaaaattgactgaattataatgaaatggattggcttaatatcagtgccataacatttagttaacctcaaattcactaaatatgatgtataaaaagttagcataattctacacaaaaaattgtgttttacacctcattagatttcattgatctcaatcatagttatatatgctacagatgagcttaaacaggatttagacctttaggtgtttcaag

SEQ ID NO: 751485 - DNA, 590 bp, Homo sapiens
gagcttaaacaggatttagacctttaggtgtttcaagctttatattccttagactcttagaatatctttataattacttgcttccagatagattaaaaatcattatacattgaagagattaaacattactgtgttttgaagagattagtttctgagagagagaaaatggtgtgattgaaaaatgaaatcttatcatcctgcctgaaatgtaatcctgtgcacaaaagagtgaggcagagagggcagagtttaatgaatgtgccccgatggtattttcttgcattctatcatgttggaaaatagaacttacagttaatttttttaacastcacatctagttttagtgagttagagtctgatatggagggaatctcagaatctacctccacatcagatttcgctagctcagaactcacggactgaaagtcaaccagccgttccatgttgcaccccaacctcaaggcagccagagaagtctcttttcacaggacactacagtagcaatgacttagtcaccacttgcctttggtgtcttcacagtccaggatcttaataaaatcatttatattcttgtagtacactggatgtct

SEQ ID NO: 751486 - DNA, 590 bp, Homo sapiens
gagcttaaacaggatttagacctttaggtgtttcaagctttatattccttagactcttagaatatctttataattacttgcttccagatagattaaaaatcattatacattgaagagattaaacattactgtgttttgaagagattagtttctgagagagagaaaatggtgtgattgaaaaatgaaatcttatcatcctgcctgaaatgtaatcctgtgcacaaaagagtgaggcagagagggcagagtttaatgaatgtgccccgatggtattttcttgcattctatcatgttggaaaatagaacttacagttaatttttttaacagtcacatctagttttagtgagttagagtctgatatggagggaatctcagaatctacctccacatcagatttcgctagctcagaactcacggactgaaagwcaaccagccgttccatgttgcaccccaacctcaaggcagccagagaagtctcttttcacaggacactacagtagcaatgacttagtcaccacttgcctttggtgtcttcacagtccaggatcttaataaaatcatttatattcttgtagtacactggatgtct

SEQ ID NO: 751487 - DNA, 620 bp, Homo sapiens
aggcttctctttccatcattctggtacacagctctgtgccactcatctcctctctccatggcttttctggagcaaatgtgtatatatcgtacagatgccaccagggctctgttcctacatcctcagaccttaccattatgtgcatgtagacccagctcctgatcccagctctcatctctttgcctaagatagataggtaggtaggtagatagatagacagacagacagacagacagacagacagttattcccatggaagagcagctccatctgttttttgtagtcctcggtgtaatcaacctactagcctgaaaggcaggattyttacacacttctctccatacctattttaacctaggttcccctagaagcagatcctgattttgaaggattcagtgcgaatagtttatttggaaggtgaacctagaactcatagaagagacagggaagggtggggagtgaagaaagtatgcaatatcaagttgcccctttaggtgactggagtggaatcttgctaggctttctggtagtcggtgtagaacacacgttagaattattttaccaatggttgagcacttggttgaggcacttactggttgagggctgctccttggtggtgg

SEQ ID NO: 751488 - DNA, 540 bp, Homo sapiens
tcttgaacccgggaggttaaggctgcggcaagctatgatcacaccactgcactctagcctgggcaacatagtgaaatcctgtctcaaaataaataaataaataaaataaaatagaaatagaaataaatttaacaaagaaatataaagcattgctgaatgttacttgagaaaatrtaagtggaagacactccaagttcatggataagaagatttaatattgttaagatggtaatatgccccaaattaatctacagattccatgcaattcatatcaaattttcagctaggcttttacagatatagacaagctgatcttgaaaatcatatggaaactcaaagaacctggaatagccaaaaacaatctagaaaagaataaacaaaattggagaactctgattttccaatttccaaatgtcatacaaagccacagtaatcaaaactgaatggcactgacacaagggtagtgaaatgattttcatcaagagtgccaagacaattcaatggtgaaagaatagtcttttcaacaaatgatactaggac

SEQ ID NO: 751489 - DNA, 614 bp, Homo sapiens
tacccaacatctagagcaatgtgttgcacataatgtgtgaaaaaccccaaaaaagtttggttatttattttggattctaaaattttttaatttgttaaaattgagaaataatttatatacagtgagtaaaatgcacaaattttaagtatatgattcaataagttttgacaagtgtttatatctatgtaaatatcactgcaatcwatatatagaacatttttattaccacaaaatgtgttatcatactctcttcctgtcaatcaacactattcaaaggaaatcagagttttcatttttaccaccatacattaattttgacttttctagaacttcatataagcaaagctatatacattttcttttctgtctggcttcttttgttcatcataattttgagattcatcctgtgtatcagaaatttatcctttcgtttttattgcagagaagtgttctattgtatgaatatattacagcttgtttatcctttctcatgttggcgtatgtcttagtctgttcaagctgctataacaaaataccacgggctgggtaattaataaacaacaaaaatttattggttacagttttggaagctgaggtgtccaagatcaaggcac

SEQ ID NO: 751490 - DNA, 614 bp, Homo sapiens
tacccaacatctagagcaatgtgttgcacataatgtgtgaaaaaccccaaaaaagtttggttatttattttggattctaaaattttttaatttgttaaaattgagaaataatttatatacagtgagtaaaatgcacaaattttaagtatatgattcaataagttttgacaagtgtttatatctatgtaaatatcactgcaatcaatatatagaacatttttattaccacaaaatgtgttmtcatactctcttcctgtcaatcaacactattcaaaggaaatcagagttttcatttttaccaccatacattaattttgacttttctagaacttcatataagcaaagctatatacattttcttttctgtctggcttcttttgttcatcataattttgagattcatcctgtgtatcagaaatttatcctttcgtttttattgcagagaagtgttctattgtatgaatatattacagcttgtttatcctttctcatgttggcgtatgtcttagtctgttcaagctgctataacaaaataccacgggctgggtaattaataaacaacaaaaatttattggttacagttttggaagctgaggtgtccaagatcaaggcac

SEQ ID NO: 751491 - DNA, 613 bp, Homo sapiens
gagaagctcaaagaccacctgggaaattcattgcaaaaagatcattacccaggcacatagtcatcaggttatctaaagttaagatgaaggaaagaatcttaagacctgtgaggcaaaagcagcaggtaacctataagggaaaaatctatcagattaacagcagatttctcagcagaaaccttataagacagaagggattgaggtcctacctttagcctccacaaataaaatagttgctagccaagaattttgtatccagcaaaactaaacttcataaatgaaggagagaaataaagtctttttcagacgaacgcatgctgagagaatttgccactaccragccatcattacaagaaatgctaggctgggtgcagtggctcatgcctgtaatcccagcattttgggaggcctaggtgggtggatcatgaggtcaggagatcgagaccatcctggctaacacagtgaaaccccttctgtactaaaaatacaaaaattagcggggcttggtggtgggtgcctatagtcccagctactcgggaagctgaggcaggagaatggtgtgaacctgggaggtagagcttgcagtgagccgagatcgcaccactgcactcca

SEQ ID NO: 751492 - DNA, 535 bp, Homo sapiens
ttcagaagctaagacctgcaaagagctaattagctgctctgacagcaggaagatgtggcaacagaaggcacagtttctgaatgactgcaaggtatttaatttgaataaaaggagaattaaacagcagcaatgtgcaaacatagcagtagatagagaatgcctatattaaagactcttacttgccttcaaaatcgaccactggaaatgtataktgcagtgaatgttttaaagcacaagacagccttgcagagcagacagcagagacagaagagtttgtgttggtgcagctcatgcagcagaaactcaagtctcccctttgagcaccttgcctgcactgcggatcagtgtctggaacatgaatgagcattcttggtgcttagtgttgtggtcagaccgctaagcttttcctaagcatgtgtaactgagttaagtggctgccgcatcttgaccaatttgagagatgcatgcataatctaatatgttccttcttcattcatttgcaactcttttcagtcactgaatggacttattcttc

SEQ ID NO: 751493 - DNA, 621 bp, Homo sapiens
acaagtgggtcattgagtggtggtaaaaggagccagtcttacttctatcttttggtttcaagacacaagtagtctaactaaagggacgtaggactatatactggccattgattcagtgcatgcactgcattctggaagtcaacaccttgaccccacagagtactcattttaagcttatactttaactgagattgtagcaggcaatttcatctgtctcttaggctgactgcatgtgggtgattgggtacctgaattccatgtacatgtaattattggtaaacttcctttgccgtaaattatgtcttttccagtgaagcaatgctatgtgcaatatcacattgatagttaaggtatatctttgcaaagtcatgctacatggtctctcccacccargaaagaactctggaagaagggattactttcgataaggagaaatcacagctctccaggttgtaaaagttctgatgtaacttacctgccagtaaatggccagatggtattctcaagtaatgctgtcatagagagggctcaatgtaagtttttgctgctaataggttgtacattcagtagtgacaaatagataaatcttgtagagaaggagtctgtgttactaagtgtact

SEQ ID NO: 751494 - DNA, 683 bp, Homo sapiens
cctacaaggacatgttgaatataatctacatttataaactatagaaactacttcttccttttgcaggtacagatgattcattataataattttattaagaattattattattattattattattttgagacagagtctcgctctgtcgcccaggctggagtgcagtggcgcgatctcggctcacggcaagctctgcctcccgggttcacgccattctcctgcctcagcctcccgagtagctgggactacaggtgcctgccaccatgcccagctaattttttgtatttttagtagagatggggtttcaccgtgttagccagatggtcttgatctcctgacctcgtgatcctcctgcctcagcctcccaaagtgctgggattacaggcgtgagccaccacgcctggcctaagaattatttcttttcatactcctgaataatgagtccccttttttctgcaccctcactgccrtgtctaaggtcttgatcttagcctttctgggaaaatttgggggctcataaagacatctgctccactctttgccttccagccgtctaccatctacaattcatactcattaaggattcaatagctgtattcagtcaatatgtttcttcctctaaaataatggcattttagtttcttatagttttgtgagggtgaagaagccctagatgttttctc

SEQ ID NO: 751495 - DNA, 536 bp, Homo sapiens
gccctgaataatcagcagtgatacccaagcagtgctcaccatgggccataggtgagacccagagatgtgcttgctttcggtgtgacctaacacattctcagctatggtggccatgggaagaaactactgattgaggaaaggacagggaaaagtacacagtattttgtcttacagcataggtaagagctcaggcacagtagggtatagcactgtattaatccatactcacactgctataaggacatgcctgagattgggtaatatataaaggaaagargtttaattgacttatggttctgcagggcaggggaggctccatgaaacttaaaatcatggtgaaggaagaagcaaacgtgtcctttccttcttttcatggtgacaggaaggagaagaatgagagccaagcaaatgcataagccccttgtaaaaccaccagatcttatgaaaacttactcattatcatgagaatagcatgggggaaaccaccccagtgattcaaatacctcctaccggctccatccaaggacatgttggta

SEQ ID NO: 751496 - DNA, 618 bp, Homo sapiens
tttgtttatctactcaagcctcagcagtggcaggcgcccctcccctagcctcgctgctgacttgcagttcgatctcacactgctgtgctagcaccgagcgaggctctgtgggtgtgggaccctcctagccacgcacgggatgtaatctcctggtgtgccgtttgctaagaccactggaaaagcacagtattagggtgggagtgaccaaattttccaggtgccatctgtcacagcttcccttggctaggaaagggaattccctgaccccttgcacttccctggtgaggtgatgccttgccctgctttgsgttacgctcagtgggctgcacccactgtcatgcacccactgtctgacaagccccagtgagatgaacccagtacctcagttggaaatgcagaaatcacccgtcttctgtgtcactcatgctgggagctgtagactggagctgttcctattcggccatcttgaaaccctatttccaattataagtcttaacagagtaacactgaaggcccaaatactgtgtcttaacttggtaactctcactacaaaaaagaggagcttgtctacaggatgcaagctcttaatggttacctatcatgaatctcagtccctca

SEQ ID NO: 751497 - DNA, 618 bp, Homo sapiens
tttgtttatctactcaagcctcagcagtggcaggcgcccctcccctagcctcgctgctgacttgcagttcgatctcacactgctgtgctagcaccgagcgaggctctgtgggtgtgggaccctcctagccacgcacgggatgtaatctcctggtgtgccgtttgctaagaccactggaaaagcacagtattagggtgggagtgaccaaattttccaggtgccatctgtcacagcttcccttggctaggaaagggaattccctgaccccttgcacttccctggtgaggtgatgccttgccctgctttgcsttacgctcagtgggctgcacccactgtcatgcacccactgtctgacaagccccagtgagatgaacccagtacctcagttggaaatgcagaaatcacccgtcttctgtgtcactcatgctgggagctgtagactggagctgttcctattcggccatcttgaaaccctatttccaattataagtcttaacagagtaacactgaaggcccaaatactgtgtcttaacttggtaactctcactacaaaaaagaggagcttgtctacaggatgcaagctcttaatggttacctatcatgaatctcagtccctca

SEQ ID NO: 751498 - DNA, 534 bp, Homo sapiens
tatgtagaaaacccaaagaatctaaaaaaaaaccctttctgaaacaagtaattataatcactttgccatttaccaacaatagagaattggaatcagaaattaaaaagcaaaaatatttacaatcacacagaaatacttaggtataagtctaataagatatgtatggaatccatatgcagaaaactacaaaacgctgatcaagggaaatttaaataaatggagcagtattttctgttcctggaatggaagactcactattgttaagatgtcaattctttctaacttgatttatagactcaatgcaattccactaaaaatcccagcaagttttttgtagacagcaacatactgactctgatatggtataacaaagatcttagaatagccartgcaatactgactaagaacaaagtttgaagactcatactatgtgatttaaaggcttaatataaagctatagtaatcaagacattatagtgttagtgaaagaaagaacaaatagaatggcgaataagatgcccagaaataggctca

SEQ ID NO: 751499 - DNA, 593 bp, Homo sapiens
caatattcataaaagcttacaatcatcacactatttccactttaattcaattctcagttttccatgtctttcctacaagaaaacacccacatttgcccaataatttatgttcagtgatgttgatatcaattttattagtcatagcaaaaaatggaaaacaacttacatgtccatcaggaggagaatttttaaatcaattatgacacatacacattttagaattgtaggaagtagttaaaagaatgagacatrtctataggtgctctcacagaatgattcagcatttatttcattaagtgacaagtgcaagaggcaaaagaatatgtacatctttgtccaggtacattaaaaacatacaatgtattttgtctagtatatcgatttaaggaaaagcctaaaatatattttaaaataatatgtacaagaatttgaattgtggttatttctgaggggaactgaattttggaggaatgcagtaaggaaaggggttgtgatttagccatattgtcagatttttttttgtatcatgaatgtatgcactattatttttgtaattaaaatgtttcaataagacagaaatagtacctgtgtat

SEQ ID NO: 751500 - DNA, 589 bp, Homo sapiens
tcggtgcatggaatgcaagagtgaaggaggtttggaatctttcccctagatttcagaggatgtatgaggaagcctaggtgcccaggaagaagccttccacagaggcagaaccctcacagggagactctactaggaaagtgcagaaaggaaatgtggagttggagtccccacaaagagttctccccaccagtgcactgcctagtgaagctgtgaaaagggggctgctgccctccagactccagaatggcatagccatgggcagcttgcatcctgagcctggaaaagttacaggtactcaactccaacccgtgatagcagtcacaggggctgcaacctgcaaagccacagggatagggctgcccaaggccttaggaatccaacccttgccccagtatgccctggatatgggacrtggagtcaaggagattattttggagctttaagatttaatgccgatcctgctgggtttcagacttgcatggggcctatagcctttttcttttggccagtttcttactttcagaatggtagtgtttatccaatgcctgtaccaccattgtatcttgtgaataaataacttgttttgatt

SEQ ID NO: 751501 - DNA, 659 bp, Homo sapiens
tggatgtggaaatgctatgaccactttatccaatacagtattataaattgctagacattttccaggtttgtaatttgtatagcaaaggctaggaaatgggagtttagtagggagattatatcaggcattgattaaatcaaggtttgcatattttagtgatgattccccagttggaatattttattattggtgaactgagaagagtagaaaaatacctggaaattctggaactttttgactcatagattaacttaaaaaaattcatgtaattgtgaaataacaaaaataaagatggagagtttcatctataactattcagtttcttacaatatatttactcaataggttcattctgtaaactgtattctaaagaatgtcttcagtaagattacttgcagtcatcacatgaattgaggctggaaattttattcctggggagcattttaaatattacgaagattctacatccttttcagttaactataaaagagatcaagsctttgcagatgtgaattaaatacgcccttttctttgcttgccacaacctctaacagtgtcttttttatcttatctgctcagtgtattaaggattcataatatttagtctgtaagattatttttaagattcttaaaatacaaataccacctatggaatgttt

SEQ ID NO: 751502 - DNA, 616 bp, Homo sapiens
ctcacgatactggggtttatggtacagattatttgtcacctaggtactaagtctggtatccggtaggtagtttttctgctcctctcaatcctcctaccctctaccctgaagtaagccccagggtctgttgctaccttctttatgtccaagagttctcgtcatttagctcccaattttaagtgagaatatgcactatttgtttttccttttctgcagtagtttgctaaggataatggccttcagctccatccatgttgccacaaaagacatgatctggttcttttttatggctgcatagtattccatggtgtatatgtaacacattttaaaaaatataatctatcattgatgggcatttaagttgattctgtatcttcattattatgaatagcactgcaatgaacattcatgtacatgtgtctttatggtagaattatttatatttctctagktatatacccagtaatagggttgctgggttaaatgatagttctgtttttagctctttgatgaatcaccacactgctttccatagtgattgaactaatttacactctcacctacagtgtataattgctcccttttccctacaacctcggcagcatctgttagtttt

SEQ ID NO: 751503 - DNA, 584 bp, Homo sapiens
ctccttatatgttgatttttaagcaatctgttactttgtctcttacaagcatttcaatctgacaatatcctgagaaaaattccaacatttgacaacagaaacagaaggatcttcactttaagtgtctgactctcctcccaactatagtgccctagatatttctagaaatatagacagataatacacatacacacatacatgtatatgaatatatatgtgtatatatgtatgtgtgtacacatgattaatctcagtatatatttgcatcttatccattttagaaaatcaatttaagaaatcataacttcctctgaactctcagatatcaagtcttatgaagtcttcataagttaagatgaaagagaaatttgataactttaaaataaaatgaataaatcatgaaaatgaakaaagtgagaaatatcctcacttatattcataaaagctgagtttcctggaatattttaatcacattttgggcataaaatttggcagtggaaaatgaaaaataaagactttcataccacaacatattaaatagatatgaaatactactctttgcttacaatcccatttgaacatcc

SEQ ID NO: 751504 - DNA, 616 bp, Homo sapiens
tgacttttattcttgttcttatgatcaaaacaaggcataaaagctaaaaacatttcatagttaaaacaagtcagagagctgaagtggttagaccctcccctgagtgcaaacttagccaccctccaaagtcagaaagcaaagcaggggagatgactccaacagaggtccctgggatttcagagaccataagtgtttacagaaactttcctcctctaatttcwtttatacaaatatacaattaagaaaataaatgggcaaagatacaaaggacaaaaacctgttttcataacatatgtctgtcaaggaacttatgttaaaaatattaaaaaaactcttaaaaatgagcaagaaagagacaatccaccaaaagaaaaaagaaagcagggaaaagacttgaataatagatatttcataaatgaagacatacctgtcgcatttttgcacatataaaaggtactcaaccggctggacgtggtggctcacgcctgtaatcccagcacttttggaggtcaaggtgggtgcatcatgtggggtcacgaatccaagaccagcctggccaatatggcgaaaccccatctctactaaaaatacaaataataataataataataataat

SEQ ID NO: 751505 - DNA, 616 bp, Homo sapiens
tgacttttattcttgttcttatgatcaaaacaaggcataaaagctaaaaacatttcatagttaaaacaagtcagagagctgaagtggttagaccctcccctgagtgcaaacttagccaccctccaaagtcagaaagcaaagcaggggagatgactccaacagaggtccctgggatttcagagaccataagtgtttacagaaactttcctcctctaatttcttttatacaaatatacaattaagaaaataaatgggcaaagatacaaaggacaaaaacctgttttcataacatatgtctgtcaaggaacttatgttaaaaatattaaaaaaactcttaaaaatgagcaagaaagagacaatccaccaaaagaaaaaagaaagcagggaaaagacttgaataatagatatttcataaatgaagacatacctgtcgcatttwtgcacatataaaaggtactcaaccggctggacgtggtggctcacgcctgtaatcccagcacttttggaggtcaaggtgggtgcatcatgtggggtcacgaatccaagaccagcctggccaatatggcgaaaccccatctctactaaaaatacaaataataataataataataataat

SEQ ID NO: 751506 - DNA, 601 bp, Homo sapiens
aaaattggaaagcttggagggatgtagtagaggagggagcacagaatgtaaaattgaaacagttatacaagtgggatgagggcgcatgtgtgtgtgtgtgtgtgtgtgtgtgtgactcacacagcagaaagaaggttttgctgcgtggctttattcctgtggagttcctctattgtaaagtacaaggggagcaaaactggaattatgagtttcagaatagccccagaaaataacactctacgagacttttccaaatttgacaacttagtggaaactaacatagataagaccatcaagcccttcattgcaacatcttgagagggctgatttagaaaagcttcatctttytggggagatgataggagcaaagaaaaggcaatgagtatatgagcagggagaagaccaacagagcagcactttaaggccattagaaaagtattgacaaagcaccacctcaaaagctatgatacaaattgaattactgtggtattagagagaatactgcagtaggataatcaacgtaaccatcagagtttccagaaataacgttttcaggaacaatctagaagaagcagatttcattccaattataaaaatttct

SEQ ID NO: 751507 - DNA, 654 bp, Homo sapiens
ttaccagcagcatgagaacagactaatacaccagggttgggaagaaaatctgtaacacagggaccctaggacttcccagctatatggcaaattttgtgagaacaggcaccatatcttcatacttcatccttagcacctactgaagagtctggcatatagtggattctcagtaactgtttgttgactgaatgacagaatgaaatgaacatgtagtttattagtccattctcacactgctataaagaaatactcaagactgggtgatttataaagaaaagaggtttaattgactaacagttcagcatggctagggaggcctcagggaacttacagtcacggcagaaggtaaagcagaagcaaacaccttcttcwcaaggcgataggagagagagtgagtgccagcaggggaaatgccagacacttgtaaaaccatcagatctagtgagaactcactcactatcatgagaacagaatgggggaaaccgccaccatgatccaatcacttcccaccaggtgcatcccacaacatgtggggattatggggattacaattcaagatgagatttgtgtgaggatacagccaaatcatgtcacataggttccaagtgtttcctccatgcacgatggatcctatagtaacatggaaaaatactt

SEQ ID NO: 751508 - DNA, 537 bp, Homo sapiens
agattgagaaacatttgtaaataacggatcctttaaatatctctgaactttcttctaaaacttatacggagaaatagtaattgctttatataaccagtgataccattttagcatttgatgaagatgttaatttatgggtggttagcagtttatggctgccattagtttttcggtttggtccacattagaaatctatttttcttttttattttaatctcagacaatttatataaagatatggttatgttttatctaaaatgtatcattcttctwtagcatttcaaattattcacagatcatagttcttatatgtgcatatatgaatttaaaaatacagcaataaaatgcttgaaacagaccataaatttgcttcatattttattgcatctctgaatcaggttgaggagacaagggcaactgtggtctttgggaaagaattaactctttcccaagctgagaaggagaataacacattgtgcataattaaagccaactccccatccaagcatggtggtgacttgtgagccttgtccatca

SEQ ID NO: 751509 - DNA, 570 bp, Homo sapiens
agggacgctcttttaacatcaggcattcaaagatcttttttctgagcgctaagaggtttcgaatccctacaggtcaagacgaatggaagagaggaccgcccttcctttcctgtcgccgggagtggacaagggcagaaggcggccttagtgattactgtctgcagatgccttacagaaaaagtttcagacgccaccaaaagtttggtcacggggcctctctcttcccggctcccgtggagtgctctcattcacttcgccagctgtaaaggcaactggaagcccctcctrgggaagcgggcaagagggcaggccaatgggaaacggggtcgaggaagacccgggcgcccctcggaacccgcgcccttcccgggtggagccgctcgcgcgctcgggcgcggctgtggggacctggcccgttggctttcttcccgactcgccacgagcagagtccggcctcccgccactcgccggcggccggtgtgcggctgcgacaatgtggccattgtttgggagctgcaaaccaggccggcgcgcaggtgggagggccgcagccgcgggcccggggcgctc

SEQ ID NO: 751510 - DNA, 588 bp, Homo sapiens
ggtaattgtactgtactaaaaacccaggattaaattagcatgggatttggtttgaaaaacagtttcttcacgagagttcatccgtgttgacatcatcctattaaaatataaatattcaagtggttttaggatcacagccttggcatcaaaggagcagaaccagagggaatatagagcacctcatctcgcccccaactgtgcaggccaaggaagccatggggcccgcagtgtcctgcactgccactttcagtcccaaaactccacctcagcccatttcctgcctcccagcctgtctccgatgcaggcygggcccctgtatgtgacctcctgactcattttcccttctcagcctccactcagcttcagcttcctcatatgccagagttcccaggacctgttgtccctcctgtgagtatgaattgagttatctctcagcccatcattgcccacctccccaggcccagacaagccccagtgacccctaggtgaccttcgcccaggaagcatggtttcatcaacttcatcccagcaagcaaaaaggccccagccacttaacactgcccctagaaacttcctggaccttcacac

SEQ ID NO: 751511 - DNA, 617 bp, Homo sapiens
atcttgaatcagtcctgtagagcaggcatttctccttcttatggagtgacgactggggctcagaaagtttgaacaacatccagttactcagttattgaaaggtagaggtgaaatttgaactcatatctaactggatcctgaagtccattatgacctstactctagtgatagcagactcccgctgagaaccaccagtaaagctagaaaaatggaaagtaaacatctgtggagaaggctttggagcactcccaagcagtggggaattgtagttccaagatctgggagtgcagagaagcccagggtgctgtttcctgcatgtggttgcttttgtccaggagcccctgaagaaactgaggacagagatgagaggctgacttgggctttcagcagattcacagggatctggaacaaatattggaattcagggcccactggtaaatatagtaggcctccagttgaaacccaaaagggccataccctaagaataagagtgaaccaaatacatttcccactctcactgagtctgaagcccaacattagattggattcaggtgatctagaattgtgggaccccccccagcctagtaggttgctagaatcaagcataaatcctctct

SEQ ID NO: 751512 - DNA, 605 bp, Homo sapiens
catgtgtcagaatttccttctttccaaggctgaattatattccattgtatggagaggtcacattgtatttatccactcatccgttgatgggcactttggttgctgtaccttttggttattgtgaataatgctgctatgaacttcagtgtacaaacatctcttctatctctgctttcaattctttkgggtatattctcagaagcgcaattgctggatcctatggtaattctatttttatttatttatttatttattttttgagacgggattcttctctgttgcccaggctggagtgcagtggcatcatcacagctcactgtagcctctgccttctgggctcaggtgatcctcccacctcagcctcttgggtagctgggactacaggcatgcatcataatgcttgactaattttctgtacttttagtagagacagggtttcaccgtatttctcaggctggtctcgaatttctgggctcaagtgatccacccacctcggcctcccaaaatgttgagattacagatgtgagccaccatgcctgacggtaattctatgtttaatattttgaggaatagccatatggtttccatagcaactgcaccatttt

SEQ ID NO: 751513 - DNA, 476 bp, Homo sapiens
ctttgcaagtaagagaaaattaacaaacagtatccgcccccaaaaacaaacataacagatgtgtatgaatgtagtatttagaattattctagcacagcaagactttttactgtaacttcactataaatatagacataaatgcaaagtttgagacatcaagaaccaatttttaaaggtacatttcctggaattagagccactacytaccaaaaattcattttggaattcatatgtagaaatattttaaaccttaaaatttaaaaatctatccctattaaaactaaatacattattaagtgggttagtttaacaggcctccttccactctgtgcaaaaaaatagggatttttgtctggatatgtaattttgtttatccatatttgagaacgttcacctcagaaaatggcatttaaaggacttcagtaacatagttttattcttgttcagctatttctgaacaagaatctataaaatct

SEQ ID NO: 751514 - DNA, 630 bp, Homo sapiens
caattaatatgtctaattttaactaagctctcattactgcccagaaattattatattcaggtacagtcaactctcaaccttccatgtagccctcctgtccttcagctcccaccctatttctggtaatttctcagaatataccaatcactttctcatttcccagtaagattcaagatatcagatgtagactttgtgcagcttcattctctccatctcagtatatcttgttaattttagtctgttcgcccctttcctttactcatgcctctaatgatgatggaagtcctccctttacgaggttcaacctgggctctrttcccattcttcttcacttcctttaggatcttattccaccaagggcctctcttgatggtgttttaatttgctctctgtttgagtttctaaaaatattctctctccttataaatatccttcctttgacttgctgccctctcaagttactgccctctgttgtttcttctcttctttggaaaacatctttaaaaagtaggctaccatcatagcttccatttttcctaccacccactcattcctcagatccttggaattttaactccacccttggttctctttctaaaactattctctcaaaggtcaccaattacccca

SEQ ID NO: 751515 - DNA, 630 bp, Homo sapiens
caattaatatgtctaattttaactaagctctcattactgcccagaaattattatattcaggtacagtcaactctcaaccttccatgtagccctcctgtccttcagctcccaccctatttctggtaatttctcagaatataccaatcactttctcatttcccagtaagattcaagatatcagatgtagactttgtgcagcttcattctctccatctcagtatatcttgttaattttagtctgttcgcccctttcctttactcatgcctctaatgatgatggaagtcctccctttacgaggttcaacctgggctctgttcccattcttcttcacttcctttaggatcttattccaccaagggcctctcttgatggtgttttaatttgctctctgtttgagtttctaaaaatattctctctccttataaatatcctycctttgacttgctgccctctcaagttactgccctctgttgtttcttctcttctttggaaaacatctttaaaaagtaggctaccatcatagcttccatttttcctaccacccactcattcctcagatccttggaattttaactccacccttggttctctttctaaaactattctctcaaaggtcaccaattacccca

SEQ ID NO: 751516 - DNA, 518 bp, Homo sapiens
cagagatatctaaactggagtgtggaacaattactagcaccgttttacccataagggaatttcacacctaatggcaaagcaagggtatgttttctcaagattcccactgtgtaatgtagcagcatttcagtgatgcctgcaatgcatggcaagataaaataatgggaagtgcagtaaacttatccaatatctgcgtacaacttatgcgtgggaattaactccctatgcactctcagtctatgcagctaatttcctaggcagctaattccacttctagctctgaagcatattatgtgatacagacatggccaaacagagtatcattttatacggtgctcattactaactcacaagcaggycaatcatagtaacgagactcacactgttagaggcatcaaggtagcagactcctttcctgctggactcaaaccagaaagattgtgaatatgaggcttttgcagctctctcatcaccacaaggagtcgtagaatgaagcctgagcatatctcacatagatg

SEQ ID NO: 751517 - DNA, 586 bp, Homo sapiens
ctttaacaacatatagaaaagaaagttgttacaaataagaacagttttcttttactcctgacatttatcttaatgagccaaaattatcactgatccaagtgaaaacaaaagaccaattactggccaggtgtggaggctcacacctgtaatcccaacactttgggaggtcgaggtggaggatcacctgggcttaggagtttgagaccagcctgagcaacaaagccagaccttgtctctataaaaaacaaaaacaaaagatctattttcaaaattattttttctaaacttcgtttaaaaagaatagcaaggtggtatatgaaacttcttcctctgccatcacatttttatatatagagtacaatttttttctttcaacccagaggccagaattttgtaagtacacaaaaaatsaacagtaagttatctgttattactaaatctgtcaacaaccaaatgactgtgctattgtctcatgctccctacactgcagttttaaattagtgcacttgtcccataacttttaagcataaaatattaaccaaaaaaataactctctcttttagagggaggacaaaacatacttttt

SEQ ID NO: 751518 - DNA, 557 bp, Homo sapiens
agatttatggtaacatctgcacgaactcgggttggccagttttcacctatgttgggtttggccacttcaacgacagtgaaagccacaatgggctgggccattcgcgcccaaccaccaaacactacaccgccatattcagattgcctgaaaccaaagaaatggatgattactcaaacaaaaaataatttatccccaacttttagacaagttaaaactagtaagtaggaatactgttcagctagtatttaagtcctaatattagtaactcttatttcttaacttaaaaaaaagaaaacctttaactctcaaagtatgcaaagtatataagatagcatgaaacagggatatgatagcatgaaacaggcaaacatggtccagaaaagaaagagaagtagagraatatctcctctccaacctaagaaaaaagctaaccctatgtacataagagcattctggggctgagccattttatcaaagaaataaataatccagcacacttagttttatttcagctttattgacgtatacttgacaaataaaaattgtatatagttaag

SEQ ID NO: 751519 - DNA, 550 bp, Homo sapiens
aaaatagtatgctggtcctgtttaatggaactctatgtagttatttaaaataatgaaatgaatctatgtgttattaattatattaaatcctcatatgagaatgaacaaccaaaccaacctcagtttattacattttaaatagtcaaggaactaaacataatttatcccaagagctgggagatgatacagtatagtagttaaaagttagggcttggaaatcacactatccgggtttaaattgtatctctgccacttacttgctgtgtaacctaggcaaattacttaactattctatgccccagataccttatacgtaaaatggtacctacttctagcatgaatgttttcagagttgtttacacacttaacagaacgtctatcacataktaaataaatgtatgccattattattactattttcaaaaggatatattagcagatagctaactgccagaggatattactaattttataaattttaaacatgcaaaaatttccctaagtcacacctctaatatcacacataatgaatctttattggtttttgtca

SEQ ID NO: 751520 - DNA, 539 bp, Homo sapiens
aaagttaagtgcatttgcagcttccttattcaaggcagcatgtatacttctacatgatcaactatctgtcaccatcatcttatagaaagagtcatactattggggcacagttcatttaaaattaatgctcatcagctactwtatttcacataaaatcaaaacttgtgaacatgtgtgactgtattccccaaatcataatttagtccaataataaaaatcatacataattaacaaaaagttatataattactagaggcaacctatataagaatacattcattttatatattaagacatgactttaaaataactaggagtttgtgttatgccctgatactcccagttgtgtggcaaagaaaagatcaatttagaaagtaaaacaataaatacgttcagatacatcaatattcacctgggaaaaaagatggccatcctcttctctacgaacaagattggaaaggtaacagtgaaccagaaggtgggaatcatccaggatggtattaaaccagcgccttgtgggtagcagggcctgggaaaaa

SEQ ID NO: 751521 - DNA, 634 bp, Homo sapiens
agttattctggagatcaagaaagaattcagtatgcttaatgcaaagtaactgctggggtccttgtgtgttaaatattcttatgcgaggaaactgtcttcatgttttatatttgccttcattttcttttattatttccagaccacctctattggttatgctaagtaatccttttctctttttggagtttaaactttttaaggaaacaaaaactaaagaacagaaagccagacacattggaaatacaaactcttcttttactgcataagaaatgagaagaaaaacttagtgtgaaattctggagtctaaaattaaaatgtaaacagagaatgctcagtgaccttttcttaggaggctcacatgaaggaatgtcatggtacattgaccaaacttttattcatttgcattttcaggatgttgygattaataccacatgacactcaataaattacactacgacattttgtacaaatcacttcacttctggtttcctcttcggctgttacttcaccctctggttacctgtagggaaaaaaaatgtattttggggctttatctttaaagggcgattcacagttctagccaatgtaaagatattggttcccaaggaaatagctacctaagttatgttttttt

SEQ ID NO: 751522 - DNA, 617 bp, Homo sapiens
gagaaaatatttgcaaactacgcatctgacaaaggtctcatatccagtatctataaggaacttaaacaaatttacaagagaaaaacaaccctattaaaaagtgggcaaaggacgcccgggcgcggtggctcacgcctgcaatcccagcactttgtaaggctgaggcaggtgaatcatgaggtgaggagatcgagaccatcctggctaacatggtgaaaccatgtctctaataaaaatacaaaaaattagccgggtgtagtggtggatgcctgtagtcccagctaatcgggaggctgagtcaggagtatggcatgaaccsgggaggcggagcttgcagtgagccaagatcacaccactgcacttcagcctgggcaacagagcaaaactctgtctcaaaaaaaaaaaaaaaaaaaaatgggcaaaggacatgaacacactttttaaaagaagacatacatgtggccaagaagcatatgaaaaaacttaaatatcatttatcattagagaaatgcaaagcaaaaccccaatgagatatcatcacacaccagtcagaatggccatcattaaaaagtcaaaaaataacggatgctggtgaggttgtggagaaaaaggaacac

SEQ ID NO: 751523 - DNA, 617 bp, Homo sapiens
gagaaaatatttgcaaactacgcatctgacaaaggtctcatatccagtatctataaggaacttaaacaaatttacaagagaaaaacaaccctattaaaaagtgggcaaaggacgcccgggcgcggtggctcacgcctgcaatcccagcactttgtaaggctgaggcaggtgaatcatgaggtgaggagatcgagaccatcctggctaacatggtgaaaccatgtctctaataaaaatacaaaaaattagccgggtgtagtggtggatgcctgtagtcccagctaatcgggaggctgagtcaggagtatggcatgaaccggggaggmggagcttgcagtgagccaagatcacaccactgcacttcagcctgggcaacagagcaaaactctgtctcaaaaaaaaaaaaaaaaaaaaatgggcaaaggacatgaacacactttttaaaagaagacatacatgtggccaagaagcatatgaaaaaacttaaatatcatttatcattagagaaatgcaaagcaaaaccccaatgagatatcatcacacaccagtcagaatggccatcattaaaaagtcaaaaaataacggatgctggtgaggttgtggagaaaaaggaacac

SEQ ID NO: 751524 - DNA, 579 bp, Homo sapiens
cttccaggtcaagcacagaggaacttaaatcccaccgggacccggtgagggttaccttctgtccctggttttcctaaatttcgagatgggagggatggtgagtcccttcccttccagctccctcaacacgctggccctccagagacgctctcctggtttagaacatttattcatctagaacattattaacaatggaaagaacagtggsttgcactgttttttaaattaatagaatttatttttaagagcaggtttaggttcacagaagcattgagctgaaattacagagttcccacctactctttttgcctgtattccatttctctgctgttagcgtctcacatgaggtggcacattggttaccgttgaggaaccagtattgatccatgattattgatggaagcccacagcttatatcacatccagccttggtgttgcacattctggggatttttggcacatgtggaatggcgtatgcccaccctggcagcatcacacagaggagttttgctgccctaaaaaccctctgttctctgcctgttcctccctccctctcctctaaccccagcaaacactgat

SEQ ID NO: 751525 - DNA, 590 bp, Homo sapiens
tattttgcatttctttggtgagaagtggtgtggagtgtcttttcagatgtttgttgccctctacatatgttccttggtgaggtgtctcttcagatctttgtgtattttttaattggattgtttttcttattgttgggttttaagagttattcatatattttgaatatccaccttttataagatttgtgttttacaaatattttctctcagtctatgccttgtctcagtctattttaataggagtgtgtgtgctgttttaaaatgtattagtgccttaagttcttctgcattattttgtttaaactatttttcaaaaaaaattaaagtcagattagcagcctttattggttgcttactgagaaacagatggtatcktaagagctcatgtggccctataagctcccttattctatgttttgtggtttcgtcatacagctatgctccccaacaaaggaataagttctaatggtcatgtgtttatcttaggaacatttatggactgtgaacgatgaataggaactctccgaggtgctggagacacagagacaattaaaatatgattcatagattggacgaggttataatccagt

SEQ ID NO: 751526 - DNA, 504 bp, Homo sapiens
tttcacgtggatcctctacaggggcatcgcgtaacacaaatgtcagctctccagcaagggcagggcatcgtctcacagccccggttcctagtgaccaaggccaagcgtgggacatgagctttgctttttaattcttcacgggctgaaggcagagccccagcctttcggagaggcaggggagaasagtagccattctctgtttctaaatcttcctttcttgattttaggaagtaaccagatcttacggggggtttgaagtcattttaacttttatgacgttcgagtttgtgttgaccttttagtgcccaaatttatgctcttgagcattttgagctgagcttattcattccacacagtatacatttataaatattttaagtatgaatttagtaacaaccttttccctcataattatgctaactgatgtagtgaaatgttgagagaatcagatattaatggttggctgagctggggcaattaggtggcatttatgagtcttttgtt

SEQ ID NO: 751527 - DNA, 597 bp, Homo sapiens
ggttgttgttgttgttgttattattatttagtacaaaagctgaatgtagggaaaattcttttcatcgaggactcttattgatggagattttgtccaaaagtctgtttagactcacatgaaaatcattttctataatttctatgatttcagtttaaacttagtattccagtggcttggagtacttagctawactgattactttgaagaacatctcccattctttggaattctaacctcatcagaacgttaccttcagcttgagggacgtggtgtttgtcagtcagcactctgggtctgaaaggcagtcttgccccgtctgcgcacagggctccgggcagcctgcagcgcccagacccatctcgagcagtggagagccagaagcacacagcccaccccggttctctctgggagcctgtgcatctcttcctggtcatgtaaacgtcacttcgtgaagtactggaagcacccggtcagtcccactgggccactgaaattccagagcggatactcgaaggtgaggcctgtgaggattaaatctgccggcaccttgtctgtaaaaactgtacaaaaatgttcagaagcgtctgctgagcattg

SEQ ID NO: 751528 - DNA, 629 bp, Homo sapiens
tcacacacatgtacatacgtgtacacacatgcacaggcagtcacacacatacatatgtgttcacggatatgcaggcagtcacagccacgtgtgcctatagtttcagagcagaaactttgtatgcctacagttttaaccagcttttaaatattcattataaattgtaaataccgacagtccccgatttaaccatggtttgacacacaattttttgactttaggatggttcaaacatgatacaggtttcctgaatgccatrcgagtgcccctctgcttctgtttttcactttcaggatagtactcaatgttgcatgagatatatatccaacactttagtataaaacaggccttgtgcgaggtggcttttgcccactgtaagctgatgcgtgtgttctgtgcacattcacgctgggcaaagctgagccgtgatgttatgtggattaggtgtattaaatgcatttttgacttacggcattttcagctcatgatgggtttattaggaagtaaccccattataagccaaggagcgcctgtccctgaatgcaggaacttggtgttcttagactacaggaatagctaattgcatcccatgtacatgggataattcttccaacccagtctcctcatct

SEQ ID NO: 751529 - DNA, 629 bp, Homo sapiens
tcacacacatgtacatacgtgtacacacatgcacaggcagtcacacacatacatatgtgttcacggatatgcaggcagtcacagccacgtgtgcctatagtttcagagcagaaactttgtatgcctacagttttaaccagcttttaaatattcattataaattgtaaataccgacagtccccgatttaaccatggtttgacacacaattttttgactttaggatggttcaaacatgatacaggtttcctgaatgccatgcgagtgcccctctgcttctgtttttcactttcaggatagtactcaatgttgcatgagatatatatccaacactttagtataaaacaggccttgtgcgaggtggcttttgcccactgtaagctgatgcgtgtgttctgtgcacattcacrctgggcaaagctgagccgtgatgttatgtggattaggtgtattaaatgcatttttgacttacggcattttcagctcatgatgggtttattaggaagtaaccccattataagccaaggagcgcctgtccctgaatgcaggaacttggtgttcttagactacaggaatagctaattgcatcccatgtacatgggataattcttccaacccagtctcctcatct

SEQ ID NO: 751530 - DNA, 612 bp, Homo sapiens
ctgctctggggctctgtgacagctctctttgggccctggatcctcttggcttcacttatagggagaggctccatcaccagctgggcctcatcccctgcccactcacccctcgggtacccagcatactccatccccgagggcctcctgggacccctgcatcccctgggyatggactctccctgccttctccgtggaggcatgaggggtggcatattccttaggaacacagctctggagccgcactcctgagcccgaaggcttgggctcctccctcagctctgtgcctcagtttctccctccatgagacagagaccccaggagctccagcctcgggctgcaagaggattgaatgagcagagcacgtggtgtgtggcgagtgtgggctgttcagtgcccattgcctcccctccattaggctgtgagcttcccggaggcaggggtgtgttcatggcttttgttctggtttgctccctcctgtgtccccaccacttcacaaatgcctggtgaatgcttgtgggtagatatgctgtggtcagcctccttggaccaaggcgccctctttgctgtgggaaggctgaggggcgtgaggcaggtgagggaattccacgtctg

SEQ ID NO: 751531 - DNA, 584 bp, Homo sapiens
cacgacattcaggtttgttacatagggaaatgtgtgccatggtggtttgctgcacccatcaaccttggtattaagccccacatgcattagctatttatcctgatgctctccctcccccttgccccctgacaggcccctgtgtgtgttgttctcctccctcctgtgtccatacsttctcattgttcagctcccacttataagtgagaacatgtagtgttttgttttcttttcctgtgttagtttgctgaggataatggcttccagcttcatctatgcgcctgcaaaggacatggtcccattccttttcatggctgcatagtattccatggtgcaccgcattttttttatccagtctatcattgatggacatttgcgttgattctgtgtctttgctcttgtgaacagtgcttcactgaacatacgtgcgcatgcatctttataacagaatgcccatggtttaaactgagctatttatttttctgctatttaattatataagttctttataaattttggatattacccccttattagatatatgactcagcaattcctcttccatatataccatatatatgcatata

SEQ ID NO: 751532 - DNA, 590 bp, Homo sapiens
agagccggctgagacgtcatgtgattctagagccttttcaggaagagcctgcacttctggacccttccttttctcaaatagccaagaccctgaggaacaggctgcccgtcgcctcaggggctatccccgacccctcctggttggacacacctcctcgacatcagctataaaactatcactttactgaggcagagcattgacttcttaacctacagttacaaaaaataaaaacaaaactggttttctcttaggagaggaaaaaacgcgatggacctttccaggacaagggacgtsagatgcagaaattcccacctggcccctccttgacggacaggaaacacaggaaacccaaccacattccggttccccatgatgcagagaccagccctaatgactgcaattacggctccgtttaacagacaactgactggatgttacaatggagctgtcagccccactgaattaatcctgctggaggaccattttcatctgttgctcctgttccaggcaaacagccctggtcagctctgggaccaagtccaggctctggagagggccggtgttcaaggccatctgtaatttagttcagc

SEQ ID NO: 751533 - DNA, 590 bp, Homo sapiens
agagccggctgagacgtcatgtgattctagagccttttcaggaagagcctgcacttctggacccttccttttctcaaatagccaagaccctgaggaacaggctgcccgtcgcctcaggggctatccccgacccctcctggttggacacacctcctcgacatcagctataaaactatcactttactgaggcagagcattgacttcttaacctacagttacaaaaaataaaaacaaaactggttttctcttaggagaggaaaaaacgcgatggacctttccaggacaagggacgtgagatgcagaaattcccacctggcccctccttgacggacaggaaacacaggaaacccaaccacattccggttccccatgatgcagagaccrgccctaatgactgcaattacggctccgtttaacagacaactgactggatgttacaatggagctgtcagccccactgaattaatcctgctggaggaccattttcatctgttgctcctgttccaggcaaacagccctggtcagctctgggaccaagtccaggctctggagagggccggtgttcaaggccatctgtaatttagttcagc

SEQ ID NO: 751534 - DNA, 633 bp, Homo sapiens
ttgaaaaaaaaaattagccaggcatggtggcacatacgtgggaggttgaagagggaggatctcctgagcccaggagttcaaggctagagtgagccaagattgagccactgcactccagcctgggcaacagagtgagaccctgccccttacaaaaaaacaattaggacagagcctgagtccctgaagtacggacatgccttcctggatatcagagcccctgtaygaagttgactgagctgtctgtagttaccactcaatgtctagagtaattgagacctcagttcacgtgagacctgaagaccccaatgtgacatggttaagcgcagctattagtcccctgcagatgtgtgcaaacatgcgaacacacactcccctgtctagacacaccctttacaactgagaaaacagaacctcctttcacaaattagaagtaattcaaacttggagccaaccaatgcacagatgcaccagaaagctcctcccaagcactgcatgagcctagacgtctccaggtgatgtgcctaatgaacccatcgaggtacctggacgtctccaggtgatgcacccaaatgaacccatccaggtacctggacgtctccaggtaatgcacccaaatgaacccatggaggtacc

SEQ ID NO: 751535 - DNA, 633 bp, Homo sapiens
ttgaaaaaaaaaattagccaggcatggtggcacatacgtgggaggttgaagagggaggatctcctgagcccaggagttcaaggctagagtgagccaagattgagccactgcactccagcctgggcaacagagtgagaccctgccccttacaaaaaaacaattaggacagagcctgagtccctgaagtacggacatgccttcctggatatcagagcccctgtatgaagttgwctgagctgtctgtagttaccactcaatgtctagagtaattgagacctcagttcacgtgagacctgaagaccccaatgtgacatggttaagcgcagctattagtcccctgcagatgtgtgcaaacatgcgaacacacactcccctgtctagacacaccctttacaactgagaaaacagaacctcctttcacaaattagaagtaattcaaacttggagccaaccaatgcacagatgcaccagaaagctcctcccaagcactgcatgagcctagacgtctccaggtgatgtgcctaatgaacccatcgaggtacctggacgtctccaggtgatgcacccaaatgaacccatccaggtacctggacgtctccaggtaatgcacccaaatgaacccatggaggtacc

SEQ ID NO: 751536 - DNA, 626 bp, Homo sapiens
gggcattaatctactcatgaaggatccatccacatgacccaaacacctcccattaggccccacctccaacattggggatcaaatttcaacatgatgtttggaaggaacaaatatccaaattatatcagatggggaggcttaaacaataaatatttatttctcacagtttctggagtctggaagtccaagatcagggaggggaccagcatagtcaggttctggtaaggaccctctttcagggtgcagacaactgacttctsatattctcagatggtgaaagtacggtgaaagagctatctgatgtatcttttataaaggcacttaccccattgatgagggcttcattctcatgacctaattccctcccaaatcaccttctaaaaccatcatattggggattagaatttcagcatgtgaattttggggggccataaacattcagtccatttcaggatgttaattcgccccccaactaataaatagattcgatgcagttgcatattaaaatcccagcaaatatcattgtaaaacttgacaagatgattctaatatctgaatgtaattgcaaagtgtcaagagtagccaagatgatcttgaagaagagaacaagtttgtcagaaatgtgt

SEQ ID NO: 751537 - DNA, 614 bp, Homo sapiens
ggttatataactctctacttatgtattcccatgctatagtcaaaataattttcatttgagtgaaataaagttacatgctatagagtgtacatttggttttaccagtgtttggactgccatggaaataagggttatgtctggggcaagagtggacattgccacattcttcccttcccggtttttctcaacattatgtatgtttggaattataatagagtcccttaagagattactgcagttattgcctttctccacttacacayttccagtcttttaataactgggagccaaaattccctgaccagtagttttaatttgcattaaaaacagatttattctttacagaagcacaaagaatttatgggactcagagctgcagctccagcttggatctcgcctaatcgtacccatggaatcaattaacagttcatctgtgaaatgtgataaaatcttatgagatacatattgcccaataaccgagaatgagatgaaagtatgctccataatagtaacggagcttcagggttttacaatcgccattgaatagagttccattagaaaatcagtattcaggatggccacacacaaaaaaaaaaccactgtgtctgaacaga

SEQ ID NO: 751538 - DNA, 654 bp, Homo sapiens
atggtgtggtatgagttctgcagtgacttcaagacaatttggaaacgggagagtaaaaacatatctaaagaaaggtaaggttcaaaaaaagattttaatgcctccttcaggagcctaggaaactgcactcttaaacctatcaaagtgtgtctatttcacacctgtcgatgttttctttcggatgaagtggtcatmggggaaggactttttgcctcagggatcgtagggaaattcggggaaagcttgctgtccacacaggcagatatgctcacatgatctgataagttacactttcttaaccccttccaattactagctagtaaatgaaaggagggttgtgctaatttgcaacagattgcttctctgtgtattttcatgttggcccaggctaaatgaggcagccttctgtcgcagacagtatagacaaataaaagtgaatgcttttcccattaatatactgaacttgcatcaaaggaaaatctctgtgactcaggccacacttcacacagcgtggaagccccgcattggatttacagcgccacttctgactccctgtatcctgctgcggacatcaaactgcgtgccgctcagcctcgttgcagcccccgattttattagctgggggtagaagaaaaacctcaactctgaatatag

SEQ ID NO: 751539 - DNA, 660 bp, Homo sapiens
gagctgtattggcctctgtctactgtactgcaggccacctagctttttgttctcagcagtctccaggcatctagagtatgctgtgtcccatcagcactccaagtcgggcaagacagaaatcagtctcttgggcggccctctgaaaagccagagcattggacggatgctccgactttttccttctccaaggagaagccaggatttggaggtttactctcacttactctgccctgagcaagggtgaggggcaattgcamtgaatgcatactaattcatatcatcatctttcttctcagtggttcccaacctggcatctttccctgttagctcttagattcacacacaacagaaaccagtcttcaaagtacctccccaaaagtctgaacattagacataagatccagtcttctctctccctcccaaaggagaagccaggaggtagttttctctaaatcaatgtattgtgccagaaagggagtcagatgagtgagtgccatgaattttcctattagcttcaatacaactggtttcatgctcacctggggtttaggagcctcttaactgatttctgaatttctcacaaagggaactggcccgtgtattattaaattggcatctccatggggcaacaaggatccggtattttctattccaccatct

SEQ ID NO: 751540 - DNA, 639 bp, Homo sapiens
ctcaaaaaaacttggtatttttcagtttttttttttttgacagtggccattctgacacgtgtgaggggttatctcattgtgattttgaattgcatttccctggtgattagtgatgttgagcatcttttccttatacatattggccatttgtataccttttttggagaaatgtttggataagtctttagcccatttttatcagacatatggtttgcaaatattttttcccattctgtaagttgtctttttactccgttgattgtttcctttgctgagcagaagctttttcatttaacatagtcccctttgtgcatctgttatttttgctttttttgggggggggcggtctatgcttttcatgytatatccaggaaacaactgccaaaatcaattttagaggacttttccctattttttaaaaaagttttatagtttcaagtctcacatttaagtttctaatctattttgagttgatttttgtatatgttccaagataagggtccaatttcattcttttgtgtgtggatagccagttctcctagcactatctgttggagagactatcctttccacattgtacagtcttggcacccttgtcaaagaacatttgcctgtatatgcttgggtttatttctgggt

SEQ ID NO: 751541 - DNA, 572 bp, Homo sapiens
  misc_feature 14, 31, 32, 33, 37, 59, 84, 113: n = A,T,C or G
ccttctcttgccanccacatcagtcgtctcnnngctncccgcgctccccaaaaaggcancaatgaacctaaaggaaaccagcanggtgggaatttcacgacaacctgcagcanatcgctctttcttggcaagggatgtwactgaatggcattcagactctcactgcagggccacagctgatcaataattttcaggagccccttctgactgtgtcggaagcaaaaaccagggaatgtcaccaaatcagttaaaaatagcaccctgacagagaattccagagcagtcaaaagataaattgtaacatttggttatattactatgtgctaaggctctttcttgacaggagacatttggttcccattttaaggttgcagagggcattaactaagcatggagatagggctgtgatgaaggagtgtttcaaatagctacattaagaaactgaggttgtcaaatctccccttgtgattttgaggacgagaaacgaccattcaggtatatactaaaagattccattagaaaattattttaaatgctgttatcctggtaaagcctcccctgatgaaatggaa

SEQ ID NO: 751542 - DNA, 572 bp, Homo sapiens
  misc_feature 14, 31, 32, 33, 37, 59, 84, 113: n = A,T,C or G
ccttctcttgccanccacatcagtcgtctcnnngctncccgcgctccccaaaaaggcancaatgaacctaaaggaaaccagcanggtgggaatttcacgacaacctgcagcanatcgctctttcttggcaagggatgtaactgaatggcattcagactctcactgcagggccacagctgatcaataattttcaggagccccttctgactgtgtcggaagcaaaaaccagggaatgtcaccaaatcagttaraaatagcaccctgacagagaattccagagcagtcaaaagataaattgtaacatttggttatattactatgtgctaaggctctttcttgacaggagacatttggttcccattttaaggttgcagagggcattaactaagcatggagatagggctgtgatgaaggagtgtttcaaatagctacattaagaaactgaggttgtcaaatctccccttgtgattttgaggacgagaaacgaccattcaggtatatactaaaagattccattagaaaattattttaaatgctgttatcctggtaaagcctcccctgatgaaatggaa

SEQ ID NO: 751543 - DNA, 621 bp, Homo sapiens
cactttgtacacattcatagactatgatgtcactgggcagaatttagatcatgctataaaactgttcttatgtattcgtccttgtgtttgccttcccaattagattacatgacccgcaagggtaagagcaattccttttatttctttttctattttaccttacctacagcctctcacccaatgtcaagttcaacagacatcaggcctaccaccatcttgtttgcttagggagttaaaaaaaaaggttaaacaaggagctgaactcttctattctagttaaatataacgttgaatttcagttatacataaatataaccttgaatttaggacgcatagagactggattagcctttctgaagcatggaaaaattttcgtaatcctcccaaggatggtatataactaatcccattctagctacatataagtaaatgtgttacatacaatgagcattggggcttaattatcagaatttcttgagagtctcatctagattgttctttcagattactttcaacaatctcataaaatmattaacagataggaaaatgtctttcctctttcatggtctttctggctttggtgatgtggcaaccttcatccaggaatataaaatgccaacc

SEQ ID NO: 751544 - DNA, 515 bp, Homo sapiens
tgctcaaattctaaaatctaccaggtttaactaacatatgagagcttagacagtagccaattaaatcatctagtatgagattaagaagataaagtggaaaaagcagcactactgtaggagaacttcctgagcgggaagtggcagcaaagtgatcacaagaactgctatgaccaccagccwtcccacactatccaaccaaactccacgtgcctcccgaggccatggtctgaggggtttgtgcaagaggactgcggaagacagagggataccagcagcctactctgcatgccaaggaaaagccaaggatagacttttgcacgtttaatcgtatttcttcatttgtccaccagtaaatgtgaaggaaaaagttgtcccagatcccccataggaaattcttacttataattggattaaaccttaagtttgagaacgactcacagtattgcagaggaagagggaaaaggtaataaaaattcaaaatgcaatgaagcctaatatatactctttcttgcaaa

SEQ ID NO: 751545 - DNA, 576 bp, Homo sapiens
aaagtcaaggcaagatgcttcccatcttcactagtctttaacaggggattggggatttttgccaatgtaattagaacagaacaattaaaggtagcatatgaactgaaaaggactatctcgcgcatgtgcatgtgcgtgtctgtatacaaaagagagagaaaagaagtaaatatgtacaaaattaagatggaggttatatagatgctcaccgacataaggaactcaagaggtgcacatgattgttctaggcatacagagtgtatattaaaagtaggcttgatctatgccctgtagatacctataatctaataaaatatgcaaaaaacagaccaaatatacaatcaacaaagcaawgtaattataatttttaaaaatacctctttcaagaagctgaggtgtaattacagatgttccaaatacaaaaaccttctgagaagaggcaaagcatgaaggaaattgtaagaacacgtatgaagtggcaagcaggagtaaaaaagaaatgtagacatgaggactagtttgggaagaatgcagctatttgtgtgaaaagtactgggtagcagagttggtagcttg

SEQ ID NO: 751546 - DNA, 602 bp, Homo sapiens
tgcacggactcctggaattggactttcctgaaaggtagcctatgagagctctagcattctccatttaacctactattgcctgtgatctcacaaactcccctgggatcaattccaaatatcagattagaagctttgtgagggtagggattttgtcttttatatatttacatcttcaaatgcatattgtttagttgcttgcgcagaattgtaagaaacataaagaataaacccatgaccctctgatctccacttaactatttttcaaaggaaataatcatgatttttcagcagaagagatatagagatatagctataaatayagatcatcaaactgaaagtagaagaaaaatcaacgtggatgtctcaagtattcaaaaagactttggcacacaaaatatttaagcaaagtatgactaagcttatttcagggagggagaaatgtgaactacaggatgaattgattgactcatgcagtgaacaagcattttgagcataaattcgtgccagacactataccagggtatgatgacttaccaaggaacaagacactggtctctgctctcggggagtcaagactctttctgaggagttggcaattgaca

SEQ ID NO: 751547 - DNA, 631 bp, Homo sapiens
gggttttgctctaaaccccgtggttgcaaatcacggatggttttaatcaggaatcaacaattttatttttatttcaatagttttcagggtgaacaggtggttttggttacatggataagttctttagcggtgatttctgagatttgggtgcacccatcacccgagcagtgttcactctacccaacgtgtagtcttttatccctcaccctcgtcccacccatccccccgagtccycaaaatccatgacatcattcttatgcccctttaagtcctcacagcttagctcctacttataagggagaacaaacaatatttgatttcccattcatgagttacttcacttagaataatggtcttcaaccccacccaggttgctacccataggaaaagaagccattatgtgaaaaagatacttacacacgcacgtttatagcagcacaatttgcaattgcaaaaatatggaaccaacccaaatgaccatcaaccaaagagtggataagtcaaatgcagtatatgcaatatacaccgtggaatactactcagctataaatgaaggaaccaacaatttcgatttgtatgctttgaaagattttcattgctgatcagagaagactgtagagggcataggttg

SEQ ID NO: 751548 - DNA, 711 bp, Homo sapiens
cttcaggaggcttgaggcaggcggatccggaactcaggagatcgagactatcctggctaacaggataccccatctctgctaaaaatacaaaaatcagccgggcgtggaggcgggcgcctgtagtggaggcgggggcctgtagtcccagctactcaggaggctgaggaaggagagtggcgtgaacccgggaggcggagcttgcagtgagccgagatcgcgccactgcactctagcctgggcaaaagagcgagactccatctcaaaaaaaaaaaaaaaaaaaaaaaaaagaaagtggcttacatcatttctgtctgttgcactaagacttaagtcatataacatcattcaggtttcaggggatactgggaaaggcagacttccggtgtgttcaaaaagaggagawgggctgggcacagtggctcatgctgttaatctcagcactttgggaggccaaggcagaaggattgcttgagcccaggagttcgaggccagcctggaaagcataggggaactccatctctacaataaaatttaaaaaattagccaggtgtgatggcaaacacctgtcgccccaacttcttaggaggctgaggcagaggattgcttgaatccaggaattagaggctgcagtgagctatgattgcaccactgtactccagtctgggcaacagagcaagaccctgtctcaaaaaaaaaaggcaaataagaagg

SEQ ID NO: 751549 - DNA, 598 bp, Homo sapiens
  misc_feature 219: n = A,T,C or G
acgtgaggaagaggatgaagagcagtgtggttggagggaggtaggcaagggcaggatgcacagtcagaggtgcttcctcccgtggactttgtctatcaccttacctggggccccaaaggtgccactaaatccatctatgttctctcaacagtttcgaggtgagtttctagacctaggaatgcattaggacttgattctcaaagcagggtccctggacangccacatcggcatcacttgttagaatgcaaattcttgagttccacccaaacctgctgaacagaagctctgggggtggggcccagccayggcaagcctgctgggtagatgagtcacatgtaggccaatgttggagaagcactgaactcagtggagaccagaaggtttttgtctctgtgtttgtttctttgcaatctcacagatggtggctgggactcacacacctgcctctcacccacagttaccagctgagttcatcagtgcagctgtgaaatctgtaggtaaaagctcaagcaagacacacaaggtgaggatgagaccaaagctgctcatcagattgtctgctgtgtctggctggttatggtttaagaaaaaaaagtt

SEQ ID NO: 751550 - DNA, 426 bp, Homo sapiens
attccaacctggtcttaaagccaatcacagtgctaggcatatggcacttaacaaattcttgagcatttaaaactgcagagacctcagcaaagtgcacatatttgttaataatcagcaattcattcattcattcaagaaatctaaggatgtctctgcctttaagaacagccccttctctgagcttgttccactgttctaggcccccyggctgactgttgtgggctgttaggtaaccaagggaatgctacacctttactgggttccagccttccattcggatctgaagaccagagctctttggaaacggactccctgtggtgaaaagcaacgaaagaataactggtgagggtgtgaaagaagagccccagttcttatcttcctccaggcccatggcaggtaagtagagactgggatgcgtctgagcct

SEQ ID NO: 751551 - DNA, 617 bp, Homo sapiens
tatgagagatccttggagaaaaaccttctccatgtaatcatgtggcacattttacctttctctttgcaaagaaagaagttgcatggaatttagagattttagccattattctcaaattaggaaaaacaaaatcactgtttgggggctctttaaaaaagtggcctatacattcaaaagggaggagaactgtaacgtttacacatctcctgcatggcgtttttggtgaaggaaatyatcattgctcgactatttcatttctatttttaaaaaaatagagagaagtttgctaactgagtttaaatggaggtaaggagactgtaattagatgtatcaacgactcactagagcaatcttcaaaaaatcaagttgtgattgcggagcacagccctccttggaagggcagcccaagcctacagctcaggccactggcctctggaccttttgggcaagtgaagaatcccacctttaagggctgtatgaatgggaaccagctttagcttagaaccagatttggtagaaaaagaatgtgctaatggagggaaatttaaacccttttgaaatgctttttctatcttgacattctacaattacaagaattttttttttttttttttttt

SEQ ID NO: 751552 - DNA, 617 bp, Homo sapiens
tatgagagatccttggagaaaaaccttctccatgtaatcatgtggcacattttacctttctctttgcaaagaaagaagttgcatggaatttagagattttagccattattctcaaattaggaaaaacaaaatcactgtttgggggctctttaaaaaagtggcctatacattcaaaagggaggagaactgtaacgtttacacatctcctgcatggcgtttttggtgaaggaaattatcattgctcgactatttcatttctatttttaaaaaaatagagagaagtttgctaactgagtttaaatggaggtaaggagrctgtaattagatgtatcaacgactcactagagcaatcttcaaaaaatcaagttgtgattgcggagcacagccctccttggaagggcagcccaagcctacagctcaggccactggcctctggaccttttgggcaagtgaagaatcccacctttaagggctgtatgaatgggaaccagctttagcttagaaccagatttggtagaaaaagaatgtgctaatggagggaaatttaaacccttttgaaatgctttttctatcttgacattctacaattacaagaattttttttttttttttttttt

SEQ ID NO: 751553 - DNA, 617 bp, Homo sapiens
tatgagagatccttggagaaaaaccttctccatgtaatcatgtggcacattttacctttctctttgcaaagaaagaagttgcatggaatttagagattttagccattattctcaaattaggaaaaacaaaatcactgtttgggggctctttaaaaaagtggcctatacattcaaaagggaggagaactgtaacgtttacacatctcctgcatggcgtttttggtgaaggaaattatcattgctcgactatttcatttctatttttaaaaaaatagagagaagtttgctaactgagtttaaatggaggtaaggagactgtaattagatgtatcaacgactcactagagcaatcttcaaaaaatcaagttgtgattgcggagcacagccctccttgraagggcagcccaagcctacagctcaggccactggcctctggaccttttgggcaagtgaagaatcccacctttaagggctgtatgaatgggaaccagctttagcttagaaccagatttggtagaaaaagaatgtgctaatggagggaaatttaaacccttttgaaatgctttttctatcttgacattctacaattacaagaattttttttttttttttttttt

SEQ ID NO: 751554 - DNA, 536 bp, Homo sapiens
agagtccctctcaccatgtaagctaacatgttcacaggtttcaaggattagggcacgagcatatttttttggttgtagggggatgcattagtccattctcatgctgctaataaagacctacctgaaactggcaaatttataaaggaaagaggtttaattgactcagttcagcatggctggggaggcctcaggaaacttacaaccatggcagaaggggaagcaaacacgttcttcttcacatggtggcgggaaggagaagtgctgagtaaaagggggaaaagccccttataaaaccatcagatctcctgtgaactcacttactatcrtgcgaacagcagcatgggggtaactgccactatgattaaattatctcccattgggtccctcccacagcacgtggggagtatgggaactgcaattcaagatgaaaagtggatggagacacggccaaatatatcagggaagtattattccatttgccacaatcattaggaacaagttgggaattttccagtactacagaggctgtgtggaca

SEQ ID NO: 751555 - DNA, 616 bp, Homo sapiens
agataacaaaagcaaaaacatatatgagactatgtcaaactaaacacattttttcacagtaaagaaaacaatcaatacagtgaagagacaatctgttgaatgggagaaaatatttgcaaactatacattggacaaaatactaatattctagatagacaaggaactcaaacaactcaacagccaaaagcaaataatctgattttaaaatgggcaaaygctgtgagtagacatttctcaaaaaaatcatacaaatgaccaagtaaattttaaaattttaacatcactaatcttcagagaaatgcaaataaaatatcaccttaccttagctagcacagctatcaccaaaaagacaaaacaaaacaaaaaaaccaacaacaacaagaaatcccccaaatgctagtaaggatacagagaaaaagaaactcttacacactgttggtgggaatgtaaattagtatagccattatggaaaacagtatgtaggtttctcaaaaactaaaagtagaaatagaaatccagcaattcccctactgtatatttattcaaaggttaggaaataagtacatggaagatatatgtacattcttatgtttatggcaatactattcacaatagc

SEQ ID NO: 751556 - DNA, 616 bp, Homo sapiens
agataacaaaagcaaaaacatatatgagactatgtcaaactaaacacattttttcacagtaaagaaaacaatcaatacagtgaagagacaatctgttgaatgggagaaaatatttgcaaactatacattggacaaaatactaatattctagatagacaaggaactcaaacaactcaacagccaaaagcaaataatctgattttaaaatgggcaaatgctgtgagtagacatttctcaaaaaaatcatacaaatgaccaagtaaattttaaaattttaacatcactaatcttcagagaaatgcaaataaaatatcaccttaccttagctagcacagctatcaccaaaaagacaaaacaaaacaaaaaaaccaacaacaacaagaaatcccccaaatgctagtaaggatacagagaaaaagaaactcttacacactgttggtgggaatgtaaattagtatagccattatggaaaacagyatgtaggtttctcaaaaactaaaagtagaaatagaaatccagcaattcccctactgtatatttattcaaaggttaggaaataagtacatggaagatatatgtacattcttatgtttatggcaatactattcacaatagc

SEQ ID NO: 751557 - DNA, 607 bp, Homo sapiens
tttcacttttattaacttcttattcaaaatattctttttccttctttggttatactccattagcacaggtgttcaaatggggcaggtccttggttgatgactctattttggaataatttatgccataaaatcttcagctgtactggctaagacrgagcatttgatacaggaatgcaaagctgcttcaacattggaaaattaattaacataagtcacccatctaacaaactgaaaaagaaaaactatattaacatctcaacagatgcagaaaatgtattttacaaaattcattttccattcatgataaatagtggcaaaatatattaataaaatggaacttctttaacctgatagaacatctacaaaaagaaaaaagaaaaaatcttacctatagtttaatcaatggtaaaagactaaatgttttctccataagatcaggaacaaagtaaaggttttctctctcagcattcctttaaaatatcatactggaatttctagccagtgaaataaggtaagaaaataaataaaaggcatgcaggataaaaataaaaaatcaaaattgtgaatattcttatatgacataattacttagatacaaaatacaaaa

SEQ ID NO: 751558 - DNA, 570 bp, Homo sapiens
atggttattatggaggactgactgtctttgaaagttggggtgtgaaaagggaaagataatttataaacttgttttgtgtctcagaaggcagaggtatttttgatattcttagcatatcagggcctcatctagttatccatcttctgttctagtataggaataatgtgcagaaactgacttgtactgatgagaggctgtatcttatcatctctgtgttttacacttgtgagtgtgtgtgtgtgtgtgtgtgtgtgtgtgcaggtatatacacacagaaatattaatatatgtcattgggagtattacctcaaatcccactgaaggtataattaaatatataatatattwacataattacctttctaaatcccccgaattctgaattcggaaacacatcaggccccaagcatttctaaaaaaggcttgtagaccagtgttagggttcctgctttttcttatttctgtttcatgactaagcctgggatatggctttagaaacatacaggtatgaaggagatatgagggaaactaaaacagatgtttcccatttaaactctgtaaggagaaggc

SEQ ID NO: 751559 - DNA, 661 bp, Homo sapiens
ctttaaaaaataaatatcaaaaaagaaatatattaatatatcagtaaatataataaaaatagattatattctccaccaataaaaataaaaaataagagaatccatagaatcttcaaaatagcttctacaattaacaagttgagtaaaggtgtaggatgtaaagtcaacagacaaaaatcaattgtatttctgtgtactattagagttgctagtaccatttacaatagcacaaaacatgatatgcatagatataaatctaactgaatatgtgcaagagctatctgctgaaaactacaaagcactyttgaaagaaatcagagaagacctaaatagagaaatatactgtgttaatggattggaagagtcaatgttgagatgttcagatttctccacattggtctggagtttcagtgtaatcccaatcaaaatatcaggaatattttctgtgaaatcaagaaactggttttaaactttatgtggaaatgggaaggaactagaatagctaaaacaattctgaaaaagaaaagctgaaagaatcacagtaatgatttcaagacttaccataaattacagcaatcaagaatgttttattggtaagtggaaagaagcatagatcaatggaccagaatagagaatctagaaagagatctacaaacatatg

SEQ ID NO: 751560 - DNA, 622 bp, Homo sapiens
tgtctaaacctagtaataaaaatatatcacttttatttcaatttctatatatttaactatgaggtcaagtatcttaccctctgtttttattcattacatagacttcttctgtgacaagcacatcaatgtcctttgttactctttcttagtgtgtgyctataaaaatcttattaatttgtaagtactcattatatgtaagcaatatttaaaatttttttctatgtgttgaaaatatttttttcccggtttgttgttgactttggtttattgtgtcttttccatgtgaaaatggaaagactttcatggattaacatttactaatatttatctttataagtcttagttttggtatgagagatacagtatgcgtgtataaataggaattcaattttgtctctaatttttaatgaagtagcataacataatatgctaggtgtatttttttaaatttagatctctctcaaaatacttgttatacaccatatcagttaaagtacttagaaactgctcatcatatttcactttagttctttccttgaatgtatacctaggtgaattctggcagagataaatttggggcagagcctaggatctaaagaatgtgaaaaaagttccctatgtc

SEQ ID NO: 751561 - DNA, 625 bp, Homo sapiens
aagacaccattggtccaagggtgtatgctggctttttttttttaattttgtcagaaaatttcaagctctagagccccttatctatagtgcacaactgaattgggtatcttcttccttttttttgtgaagatgacatatctatgtgtatgtatatatacaaatgtgtatacaattctgggtgataacagatagtgtgtatcatctatctatggataaatgtgcaaacatgaacaaattttaaagaagtagttctgggttcctyttgtgaattctgcatcagctttgttaggagataatctatttaaaattacggtagtagtgactgtttgttttataaacactgtgaactattggatcttcctcaggaaggacaatccaggaatgctcatggttctcagtgctgttgaaactggattgtaacaggactgacagctaccttctgcttcaaagataactttatactttgttttctggtgtctgggctgaggatgagaacaaggattaacccagattaatccccatctagcccctgatgaagctgggcatgtcataacactataatttataattcctaaatgtttacatttcagacaaaatagaaaaatgaaaacccttttcatcaaaa

SEQ ID NO: 751562 - DNA, 608 bp, Homo sapiens
aatattggtggggtaaggtattttagggggagtgactagacccaaagttctctggttttggcatccgacatcatttttactacatcatatgcaagttcaataaattcctcagctgggcgcgctggctcacatctgtaatctcagcactttgggaggccgaggcaggtggatcacaaggtcaggagttcgagaccagcctggccaatatggtgaaaccccatctctactaaaaatataaaattatctgggtgtgatgggcacctataatcccagctacttgggaggctgaggcaggagaatcacttgaacccaggaggctgagattgcagtgagccaagatcgcaccactgcactccagcctggttgacaaagcgagactcyatctcaaataaataaataaataaataaataaataaataaatccctcaaatctgtagactaaggattatcaagatgacataaatagaagttcctattcccaacctcttcccatttctggatcaggggtaacgagtttctgctttgcaccaaaggctccacatccatcctttggctctctctgaaaaggaaactttctgtagattctaggctatgtggctcgtgtctta

SEQ ID NO: 751563 - DNA, 634 bp, Homo sapiens
ccagatcgtttctatttacccaaatatgagtaactggctgtaatgagaataaaagaaacattggaggcaggcatttaaaattgttgctgatatggcacaactaattattaacttatcctccttggcaactgacaaaaaaagaacatggtgacttgagaatataactactcacagaagatgaatgttttaaaaggagattatatttgacatatatgtcaacgggctgttggagcaactgggaaacttcagctatagggtcttagaaaactaagtaaatattaaaawtgaggcaataactttaggaaaaaatgttaacataaagatgtgatcatagtgatttgactcaacgtaaacaatatttgtaatcaaaacaaaaataagcactatgcatgtaattaaaactgcgatataattatattgaagaatagggatgctctgggaggtacaaaaagatatattataatctaccataataataaagaagtagtactttgacatacacacagaaacatatgatttaggaatattacataaaaacagctgaagaaaaaaaaaactcagaaatggggtagagagggtggcccaagagactgtaagattttatataaatatacacacacatatatatatacac

SEQ ID NO: 751564 - DNA, 609 bp, Homo sapiens
aattttccagatgcaagtagaataattaaagaatttttcatgttgccctttgcgttttttgaaccctcaatggaggagagggaagagcctctatcccaggagaaagcaggaatctcagctctcaccattccagaagagggatcaggaaggcaatctagyagtccatggggccctgagacactcgggatcagaagaaatcaggaattcctttcatgggttccagtggtgcagaagcaaaggcatgtccaggctatcccacggagaaagagccaggggtcttgttctatgaagccatattaatttcttattgctgccataaccaattaccacaatcccagtggcttaaaataatacacgtttattatcttgaagttctgtaggttgcaagctgaacatggatctcactaggctaaagtcaaggtgtcaagagagctgtgttcctctctcaacatcctagagaggaatccaatttccttgccttttccagcttccagaggttgcccatatttcttggttctgggacccttccaacttcaaagtcagcaatgctccctccctctcagatctttcttccacagtcacatttccttccgtctcttctattctgca

SEQ ID NO: 751565 - DNA, 638 bp, Homo sapiens
aattactccagtgcctccctcgctaacctgttgttcatcactccctcagttggcaggaattaaatcactgctgctcagaaattgccaggacatctgcttaccatcactgtccccagggaaccaggctctctgacattgcagccaccwctctccttagccagggcccttgaatgcttttggagacatttagaaaaggagttggcacagaagcataatgctggatgaaaactgccattcagaagacttcgccattcaagactgctgagcctaagggtttcaaacacgtctccccacccgccagtcattgcttgtcctgattcaaagagacttgaatccatccaaggagctggatagagagcagcttgtcgttggtcagacgtggtcttttttgcagtccaggcactgggacagaagcccgccaagcaaactgatctcaaaggtaaagtggtaacatatgggcttcctagggggacgtgtgtctcaaacactgacagagttggccacattctgcaaagcagaggacaaaatccatttgccacaacagactgttagaggtgttggttgagtcacctggactcacccaccttccagatcgggggctttttacctgattgtgggaacttggccagttaagagtg

SEQ ID NO: 751566 - DNA, 638 bp, Homo sapiens
aattactccagtgcctccctcgctaacctgttgttcatcactccctcagttggcaggaattaaatcactgctgctcagaaattgccaggacatctgcttaccatcactgtccccagggaaccaggctctctgacattgcagccaccactctccttagccagggcccttgaatgcttttggagacatttagaaaaggagttggcacagaagcataatgctggatgaaaactgccattcagaagacttcgccattcaagmctgctgagcctaagggtttcaaacacgtctccccacccgccagtcattgcttgtcctgattcaaagagacttgaatccatccaaggagctggatagagagcagcttgtcgttggtcagacgtggtcttttttgcagtccaggcactgggacagaagcccgccaagcaaactgatctcaaaggtaaagtggtaacatatgggcttcctagggggacgtgtgtctcaaacactgacagagttggccacattctgcaaagcagaggacaaaatccatttgccacaacagactgttagaggtgttggttgagtcacctggactcacccaccttccagatcgggggctttttacctgattgtgggaacttggccagttaagagtg

SEQ ID NO: 751567 - DNA, 642 bp, Homo sapiens
taaacaccatctattattattgctaccactaaatattaattaacacaagattgccgtgctgaacactactgggtttttcctctcttctatttctgctataacatgtcactttttattgctttctctgtcttcctacattttaagattttactttattttacgcacaattcaaaggcctcatagaagggacacatcttgacttgtctgttgggggccatgtttgtacctggtaacccagtgtactggractaggggttgacccatgactcatcataaatcaggttgagctaatcagattctctctctcaggagtttggaatcaagaatatgagatactgagagaagatggttgcttgacctgaggtctcctagaattggataaatcaaagccacctttacaccagagctacggtggaacagagaagccaccactttgccaggagagatgcagaagaatgaagcagatgtgggcagagaagagaggtcattcaaggtgagggagtagcttcaatcttcagagttcagttccatgaaaaataggtgaattctaagagcttgcctggagtaaacttcagctaacttccatttcacttgagctagtttgagtttgagtgcgtctctctttcttgcaataaacctaac

SEQ ID NO: 751568 - DNA, 642 bp, Homo sapiens
taaacaccatctattattattgctaccactaaatattaattaacacaagattgccgtgctgaacactactgggtttttcctctcttctatttctgctataacatgtcactttttattgctttctctgtcttcctacattttaagattttactttattttacgcacaattcaaaggcctcatagaagggacacatcttgacttgtctgttgggggccatgtttgtacctggtaacccagtgtactgggactaggggttgacccatgactcatcataaatcaggttgagctaatcagattctctctctcaggagtttggaatcaagaatatgagatactgagagaagatggttgcttgacctgaggtctcctagaattggataaatcaaagccacctttacaccagagctacggtggaacagagaagccaccactttgccaggagagatgcagaagaatgaagcagatgtgggcagagaagagaggycattcaaggtgagggagtagcttcaatcttcagagttcagttccatgaaaaataggtgaattctaagagcttgcctggagtaaacttcagctaacttccatttcacttgagctagtttgagtttgagtgcgtctctctttcttgcaataaacctaac

SEQ ID NO: 751569 - DNA, 591 bp, Homo sapiens
tttcatctaggttacataatttgttggaatccagttgtttatgatatttccttgtatagttatttctgcagtcagtaataatgatcactcctttatttttgattttttgcaatttgtcttttctcttttgcttggtaattctagctaaaggtttatcaattaaattgatcttttaaaagaactaactgctaatattactgattttcttattgcttttctatttagaatttctttaaactctgcttaaattattaatrttttctttttttcctgcttgctttggatttgatttgtcatcttattctagttttctaaggtggaaagttctgttatggatttgattttttcttttttaatatctatattttcagctataaattgttcctctaagcattgttttagtttcctcccataagttttagtgtgttatgctttcatttgccttcatctcaacgtagtttataatttctcttctgatttcttatttgacttgtttagtatttaaagtgtctggtttattttcacacgtatttaaattttccatatttccttctgccattgatttctaatgccattaaaccaaggtcagtg

SEQ ID NO: 751570 - DNA, 793 bp, Homo sapiens
  misc_feature 356: n = A,T,C or G
agtgcagaagggaaatgtgtggttggatcccccacacagtgtccctactagggcatcacctagtggagctgtgagaagagggccaccatcatccagacaccagaatgatagaatccaccaacagcttgtactgtgtgcctgtaaaacccacagactcttgacagcagccagtgaaagcagccaggagggcggctataccctgcaaagccacagggacagagctgcccaaggctatggaagcacacctcttgcatcagtgtgaccttatgtgagacatggagtcaaaggagatcattttgatgttttaagatttgactgctctgatggattttggcttttcatggggcctgtcctantgttctggccaatttctmccatttggaacagctatatttacctaatgtctgtaccccctttgtatctaggaagtaactaacttgctttggattttacaggcttataggtggaaggaatttgctttgtctcagatgagatgttggactgtggacttttgagttaatgctgaaatgagttaagactttgggggactgttgggaaggcatattggtttggttttgaaatgtaaggacatgagatttaggaggagccgaggtggaataatatgatttggctgtatctccacacaaatctcatcttgaattgtaactccacaattcccaggtgttgtgggagaaacccagtgggaggtgattgaattatgggggcaggtctttcctgcactgttctcgtgatagtgaatgaatctcatgagatctgatggttttaaaaatga

SEQ ID NO: 751571 - DNA, 793 bp, Homo sapiens
  misc_feature 356: n = A,T,C or G
agtgcagaagggaaatgtgtggttggatcccccacacagtgtccctactagggcatcacctagtggagctgtgagaagagggccaccatcatccagacaccagaatgatagaatccaccaacagcttgtactgtgtgcctgtaaaacccacagactcttgacagcagccagtgaaagcagccaggagggcggctataccctgcaaagccacagggacagagctgcccaaggctatggaagcacacctcttgcatcagtgtgaccttatgtgagacatggagtcaaaggagatcattttgatgttttaagatttgactgctctgatggattttggcttttcatggggcctgtcctantgttctggccaatttctcccatttggaacagctatatttayctaatgtctgtaccccctttgtatctaggaagtaactaacttgctttggattttacaggcttataggtggaaggaatttgctttgtctcagatgagatgttggactgtggacttttgagttaatgctgaaatgagttaagactttgggggactgttgggaaggcatattggtttggttttgaaatgtaaggacatgagatttaggaggagccgaggtggaataatatgatttggctgtatctccacacaaatctcatcttgaattgtaactccacaattcccaggtgttgtgggagaaacccagtgggaggtgattgaattatgggggcaggtctttcctgcactgttctcgtgatagtgaatgaatctcatgagatctgatggttttaaaaatga

SEQ ID NO: 751572 - DNA, 583 bp, Homo sapiens
gacactaaaacagtattgtatgcattggcaaaatgcataaaatacattatgtctgtggatataatgcattggcataatatatgttttaaaaagtgggggcaagcgtgaacatgttcaggagatatgtgaaaaatataaaaagaaccaaatctaacttttagagatacaataaacaatgtctgagattttaaaattccactgaatcttattaaagccctattagaccaggtgtggtagttcatgactgtaataccagcacattgggaggctgaggcaggaggattgcttgagggcaagaatttgagcaccctaggcaacayagtgagacctgcctctacaaaaaataaaatataaaatataaagaataaaagcatagtagacactacagaataagaaatacttaaaattaaggacatataaaaagaaattaatagaaaatatctaaaataaagcaaagggagaaaaaacactcatactttttcagtgggctacaggacagcttagagtgacaaaataaaaattactgaagttctcaaaacagaaaagggagagagaaggacagacaaatatttgaataaataat

SEQ ID NO: 751573 - DNA, 601 bp, Homo sapiens
tcctacatatccatggttttgctttccacatttcagttactagaggtaaaccgtgttccaaaaatattacatgcaataagatatgttgtgcatgcacacatgaggggagagagagagagagagagagagagaccacattcamttaacttctattaaagtttacagttgagccttgaacaatgctggtttgaacacagctccatttacacacagtttttgctctatctctgccacccttgaaacagcaagaccaactcgtctttttcctccccctcctcagcctactcaacatgaaaatgccgaggatgaagacctttacgatgatccacttccacttaaagaagagtaaatatatcttttcttccttatattcttaataacattttattctgtagcttaatttattgttagaattcagtatataataaataacttacaaaatatgtgtatatagacggtttatgttatcagtaaggcttctggtcaacagcaggctactaggagttaagtgtttggggagtcgaaagttgtacacagatttttttattacgtgagggattggccccccccattattctttagtcaaggatcaactgtattt

SEQ ID NO: 751574 - DNA, 632 bp, Homo sapiens
aaaatgatgtataacataaccacatttatttaagactgtattccaatatcaaatggcaaattccaaccatgccaaaaccacaattacttttgtaccaacctaatagaaattctaaaactgaagaacttactgaatgaaaaaaatatgtattaaatatgtatttgaaagcttccccaatagatcaagcagaagaaaaaaatttcagaaygtgaagacagatcctttgaaataacccagtcagacaaatattaaaacaaaagaataaaaaggaatgaataaagactacatgacaaatggcactccacaaagtgaccaaatattcaaattttcagtgtccatgagggtaaaaagcaaacaaaagggatacaaaacttttaaacaaaataacagctaaaaatttcccaactctaacaagaggtttagatattcagacacaggaagctcagagatccccaaatggatacaattcagaaaggtctccatagcaccttatagtcagactgtcaaaggtcaaaggcaaaaacagaattctaaaaacagaaagagaaaagcatcttgtcacttataagggaaactccatcagactaacagcatatttctcagcagaaaccttacaggtcaggagataattg

SEQ ID NO: 751575 - DNA, 561 bp, Homo sapiens
aaacccgaaaaactgaattccaggagggaggtcagacactcccattatacatcctccctgtggagtgcagccacgactggccagcactaactccaaaatgaataagaacagaccctccgtgggaaccaaactccaaacctgactctggagcagaaccacatgacatagcaggtcctgaaggacatcaaagtatttcactccaaaatatgtttctttgacatattttgaaatggccctgcagagccttttgtgggggaaatttccatctgtasctagtctccactcatactgccaggtctttcccagatccaggagagttgaatcgagcctgacacctttgaggtaggaaaggagattttcaccatccttctctcggaaggctactacctggaaacttcatctacacaagaacctcggcttccacaaccccccttatcttaacccaagcatctctttctgctgacttcctctttagacaaagctttattctttctaccagctgccaatcaggaaatctttggatccccctctgacctggacgccccccttcaagatgtccca

SEQ ID NO: 751576 - DNA, 563 bp, Homo sapiens
tgtttttaaaaaaatattttttaatttttttaaaatttggagatggggtctatgttgcccaacctgctctcaaactcctaggctcacatgatcctcccatcttggcctcccaaaatgttgggattacaggcatgagccactgtacccggctcccagtttcatttttattatttaagaaattaacctatctggaatctacctttgcttaaatgttgtaatgtaggaccagttttatccacattgtgattttctaaataccrctggccaaactgtcattctcccattgtcctgtaatgtcctcttcatcatttacgtggatctactttgaaccctcctttcccttcatctacgaagatgttcctacatcagtactatagttaatttttaaaaattcatcattaaaattttaatatataacagaagagagtagtataaataacccatgtgtccgtctgcagcctcaacgataatcggtctctaatcttttgatgccatggctgtgtactgtggcttgttattggtaggttattttcctgccttgatctccaatgaaagagttacta

SEQ ID NO: 751577 - DNA, 563 bp, Homo sapiens
tgtttttaaaaaaatattttttaatttttttaaaatttggagatggggtctatgttgcccaacctgctctcaaactcctaggctcacatgatcctcccatcttggcctcccaaaatgttgggattacaggcatgagccactgtacccggctcccagtttcatttttattatttaagaaattaacctatctggaatctacctttgcttaaatgttgtaatgtaggaccagttttatccacattgtgattttctaaataccgytggccaaactgtcattctcccattgtcctgtaatgtcctcttcatcatttacgtggatctactttgaaccctcctttcccttcatctacgaagatgttcctacatcagtactatagttaatttttaaaaattcatcattaaaattttaatatataacagaagagagtagtataaataacccatgtgtccgtctgcagcctcaacgataatcggtctctaatcttttgatgccatggctgtgtactgtggcttgttattggtaggttattttcctgccttgatctccaatgaaagagttacta

SEQ ID NO: 751578 - DNA, 506 bp, Homo sapiens
ccattttattttccctccagagctactctcttggtagactatctcatataaagtcatgactttgagccaggtgcagtggctcacacctgtaatcccagcattttgggaggtggagttcaggagttcgaaaccagccttgtcaacatggtgaaaccctgtctctactaaaaatacaaaaattagatgggcayggtggcatgtgcctataatcccagctactcgggaggctgaggcaggaggatcagtgggacctgggaggtggaggctgcagtgagccaagattgtaccattgcactcctgcctggatgacagagcgagactctctcaaaaaattatgtatatatacatacacacatatatatgtgtgtgtgtgtgtgtgtgtgtgtgggtgtgtgtgtgtgtgtgtatgccagaggcacttggcatattatttttatggaaaaatgcaccagaaaggatctgaagacgtcctcaagtcaagcacttgtcaaccattgcttcaatat

SEQ ID NO: 751579 - DNA, 610 bp, Homo sapiens
tgtcatggcgtgtgctgtaatcccagctactcaggaggctgaggcagagaattgcttgaacctgggagacagaggcttcagtgagctgacatcccagcactgcacttcaggctgagcaatgaagcaagactccatccagaaaaaaaaaagaaagaaaagaaaaaagaaaaatgggtgaatctcagtaacaacagcaagcattgtggcgttctaagtggccctctttttatctcctttttccctcttcattgtagccttaaaaaccaacagtctgcaaacaactgaataatagctacygaagaggggtaagaagttgggcctcctgaacttacctgttcccagagaaccatcattgttcaacgagtctgccatatccccacacccatcttcaaagtagtctttattatgtatgacttgaagcttacctaatgagaataaacttttccaatggtgcattttcaagaacaatcaaaggaaatagtttaagactgtgagtgcccaaggaaggaaatgatggttggagacaacaagaggttaaaggaaacacttaaaataaaaatcaaaaatctggtgaaatgagatgtctgtagagaacttcagaatgctccaa

SEQ ID NO: 751580 - DNA, 628 bp, Homo sapiens
ttgcttcccacttgcattttagatctagcatggaatggacttccatctctaggcttatcctgacccagtaactcctttcaatctactgccagtgattttgaacctacagttatgaccatgtcagtcacctgcttaataaccttcaagggctttcaaccaccttcgaaataaataaagtttgtgtaggaagaagatgttaaatcaaaacatttgtgtttcaggtaattcctagttcctaactgatttaaggctttttaactcatcagataaaaggtatgcctcatggggatggctgaatttgattgattatgaggaagttaatgcttctctgtgaacatcaaaatagtgtcggggttgagtattaaaagtacaggtgagaaaataggttccaacaaatgatcttgatgttttacgrttctttggtaaagacatttcccccccaaaatggaattttcccgttaagatccaagcctaattgtctaagatcattgagagttttgttggtggttttggtgtttgttttgctttgttttgtttgctgttttagtctataaagcagctggaaaggctttagagagtgttttgctgaaaaataaaaggtaaatgcttatctattttttttttttgt

SEQ ID NO: 751581 - DNA, 628 bp, Homo sapiens
ttgcttcccacttgcattttagatctagcatggaatggacttccatctctaggcttatcctgacccagtaactcctttcaatctactgccagtgattttgaacctacagttatgaccatgtcagtcacctgcttaataaccttcaagggctttcaaccaccttcgaaataaataaagtttgtgtaggaagaagatgttaaatcaaaacatttgtgtttcaggtaattcctagttcctaactgatttaaggctttttaactcatcagataaaaggtatgcctcatggggatggctgaatttgattgattatgaggaagttaatgcttctctgtgaacatcaaaatagtgtcggggttgagtattaaaagtacaggtgagaaaataggttccaacaaatgatcttgatgttttacgattctttggtaaagacatttcycccccaaaatggaattttcccgttaagatccaagcctaattgtctaagatcattgagagttttgttggtggttttggtgtttgttttgctttgttttgtttgctgttttagtctataaagcagctggaaaggctttagagagtgttttgctgaaaaataaaaggtaaatgcttatctattttttttttttgt

SEQ ID NO: 751582 - DNA, 628 bp, Homo sapiens
ttgcttcccacttgcattttagatctagcatggaatggacttccatctctaggcttatcctgacccagtaactcctttcaatctactgccagtgattttgaacctacagttatgaccatgtcagtcacctgcttaataaccttcaagggctttcaaccaccttcgaaataaataaagtttgtgtaggaagaagatgttaaatcaaaacatttgtgtttcaggtaattcctagttcctaactgatttaaggctttttaactcatcagataaaaggtatgcctcatggggatggctgaatttgattgattatgaggaagttaatgcttctctgtgaacatcaaaatagtgtcggggttgagtattaaaagtacaggtgagaaaataggttccaacaaatgatcttgatgttttacgattctttggtaaagacatttcccmcccaaaatggaattttcccgttaagatccaagcctaattgtctaagatcattgagagttttgttggtggttttggtgtttgttttgctttgttttgtttgctgttttagtctataaagcagctggaaaggctttagagagtgttttgctgaaaaataaaaggtaaatgcttatctattttttttttttgt

SEQ ID NO: 751583 - DNA, 509 bp, Homo sapiens
cataatagaatatacagtttaactgtttcccatatgttattgtcccattccagtggcctgctgaacaggttttaggatttattctacatgcatctaaaccaaaaatgtttacaatgatccttctaaacagctgctgttactgacgactgtttcttcctgtcctrctgcttccatttgtttgttttttgtttgtttcttttaacttaattagctattttatttgtttatttaatttttccataggttattagtgtacaggaggtgtttggttacataagttctttagtgatgatttatgagattttgtacactcatcacccgagcagtatacgctgcacactatttgcttttagccctcaccaccttctcacctttccccaccaagtccccaaagtccattgtatcattcttatgcctttgtgtcctcatagctgagcttccacgtatcactgagaacatatgatgtttggttttccatttctgaattacttcacttagagtataatctc

SEQ ID NO: 751584 - DNA, 658 bp, Homo sapiens
gtggtaacctgaatgcatgggaacaaatgaagatgacctgtaatgataaagaataatgctaattgtctttgtccatttgttttgctacgaaggaatacctgaggctgggtgatttataaagaaaagatgtttatttggctcacaggtctgcaggttttatgagaagcatagagctgctatctgcattgggtaaagacatcaggctgctttcactcatgsgggaaggcaaacaggaggcagtgtatgcagagatcacaccgtgagtgaatataaggctggagggaggtgccagcctctttttaacaaccggctttcatgggaaccaatagagcaggaactcattcattactgtaaggactgcaccaagccattcaagagggatctaccccttcacaggctttccattaggccccacctccaacatggattatcagatttcaacatatggtttgtgggacaaacaaccaaactatagctataatataacacattgatatagtttggctccgtgtccccactcaattcttatcttgaatggcactcccataattcctttgcattgtgggagggacctggtgggagataatggaatcatgggggcagtttctcccatactgttctcatggtagtgactaagtcttatgagagctgattattt

SEQ ID NO: 751585 - DNA, 610 bp, Homo sapiens
gtgggttgcttaagattaagtgtgggctagctagtgtaagaatatggaatgccggggaactgaagatacaaagagaattagcactacactatggactgtatgttcacaaggaatattaagggacagggtagaaaactagagaaagcatttcttactgtgtagaccttggggaggraaatagctgccactgtgaaacaagcacaaactccacccaggtcattctcccatgtgatataaaagactcaacctacaggaagaaaggcagtaaaccatgttgcctcaagggcacaggtgcagatccctggagaaagaaaactttcctctgagggaggactgggaaatgatagcatttttgtagaagttcaaaacaactgtgaaagatccagccagatacccaaggtcatggatctgactaaagctatggctaagctaggacaatgtagactacctacccaatgcccctcataccactagcaagacctaagcaagaagtaatatgaggcataaactgagggtggaaaagaaatattgaagaaaaaccttctggcaatgaacagccacccaaaacataaggtaatgatgaaaaaacatgaaactagcaatgcactga

SEQ ID NO: 751586 - DNA, 610 bp, Homo sapiens
gtgggttgcttaagattaagtgtgggctagctagtgtaagaatatggaatgccggggaactgaagatacaaagagaattagcactacactatggactgtatgttcacaaggaatattaagggacagggtagaaaactagagaaagcatttcttactgtgtagaccttggggaggaaaatagctgccactgtgaaacaagcacaaactccacccaggtcattctcccatgtgatataaaagactcaacctacaggaagaaaggcagtaaaccatgttgcctcaagggcacaggtgcagatccctggagaaagaaaactttcctctgagggaggactgggaaatgatagcatttttgtagaagttcaaaacaactgtgaaagatccagccagatacccaaggtcatggatctgactaaagctatggctaagctaggacaatgtagactacctacccaatgcccctcayaccactagcaagacctaagcaagaagtaatatgaggcataaactgagggtggaaaagaaatattgaagaaaaaccttctggcaatgaacagccacccaaaacataaggtaatgatgaaaaaacatgaaactagcaatgcactga

SEQ ID NO: 751587 - DNA, 522 bp, Homo sapiens
gtttttttctttctaattgatactagtaatccatagtggcatcatctttcaagttcaaaagatgacaatatgtgaaaagaaaaaaagtggtagaagtgagcattaattattcatatagcagatagtcttgaaggagcagagyataaatagaaaaaagaaaaatcaaagagatgttcttcagagttttctatgttccaacaggttttgtgtgtaaggggccacttgtatccaatgattatacccgtagaaaaatagagtaccctttgctcttattggaagataatggtgctgagaaacctagtttggtgatcaagacctgttcgcacaacctactaaatatgtatcccttaactctttgcaatttctaattataaggcaacaatgaatgatgtaaggaaggttagtgtgacataacttaagagtcttttccttactttaacttgtattaggtattaccttaagccagcagtccccaatcgttttggcaccaggcaccggtttcgtggaagacaagttttccac

SEQ ID NO: 751588 - DNA, 465 bp, Homo sapiens
taggccagacacagtggctcctgtcttgtaatcccagtgctttgggaggctgagatgggaagattgtttaaggccaagagtttgagaccagactggataatatagtgagaccctgtctccacaaaatcgaataaaaatgtttattttgtatygtagcttactttctatatctttgtctatgctacaaatctacatgcctttgggagcaaataatcatatggattcagagttataaagtaccttgaacacacttagtaggacttctaatttcataaactgaggtagggaccatgtcaattttgtcttgatatcctagatgtatccaggaggtaacatcgattgaataaaggagtgaatttactgaaatgaagagagaaaaggaaataacaaagaaaataaattgagaaaaagtaagaaatacaataaagaaaatttttgcattttggggaagggagaagaacaggt

SEQ ID NO: 751589 - DNA, 586 bp, Homo sapiens
tagtacttctggtactatgttaaaaagaagtgaaaaagtcttttccttgtatcagatcatagaggaaatgatttcagtttttcccaattttttatgctgttagcaataagctctatataaatggcctttattatgtcaagaaaattgtcatatacattttttagagtttttattataaaaagttgttaaattttgtcattsttttttctgcatctgttgacattatgtgatttttgtctttattcttctaatatgatgtatcacattgattgatttgcatagttaaaccaaccttgcatgccagagataaatcctacttgtcatggtatataatctagctatagattggaagaaagtatttgtaaaccatgtatctgttaagaggttaacattcaaaattaataaggaactcacaaaactcaatagcaaaaataaaacataatccaatttaaaaaatggacaaaggacctgaattgacatttttcgaaagaagaaataaaaatggtcaagtatgtgaggaagtgctcaacatcactaataatcaggacaatgcaaattaaattaaaatcacaatagatatcatttc

SEQ ID NO: 751590 - DNA, 628 bp, Homo sapiens
tactcatgatctctattggacaatgagggaaggcagacacggtgctaacagctgcgcttttccagattcattaataggtaagtaggaaactcagaattccagagtctcagagaccataaagagactatatgtccccacttacagtagggatgaaagaatgttccaaagcccacacccttcgagactgttggtttctcacactgttttcctcattcctcccattactctctgtagagcagggtttctcaaccttggcactacagacattctgagtggaataattcttggttgtggggctgttccgtgtgctgtaggttgtttagcagcayccttgacttgtacctactagatgtcaataacaccctcacccactgtgacaagcaaaagtgtctttagacaatgccagatatccctgggagagcaagactgtccccggttgagaacaagtgctccaggataataatgaaataactggataataatgaaaaataggaccatgatgatagctatcattcatgggtacttcaaccgctttaagtacattatcttcttgtaattattcaaataacccataatagttgctgccattattatttttatgtgatacatgaagaaacggaagtgcagg

SEQ ID NO: 751591 - DNA, 533 bp, Homo sapiens
atgccctgatctgctttgcgcctttgagttatcctctttccctgtcagcctcttcctcttcccagtagatcctgctggactcagcttgtcataacacactctaggcaagtgccagccaatcctaagtgcatcatactaacttacagaagccagagcaatgagaagtgagatgaccccctgtaggctacctgatttctaatctaatgccagttggtttatttataaaataagtggcatttgttgaaaatatctgttcttcttacttgaaacattgcttctttaatctcattcgccattctcctcmctatgtggaaagtattttctttcttttaacttgtattttaagttcaggggtacgtgtgcaggttcgttagataggtaagcttgtggcatgggggttcactgtatagattattttatcatccaagtattaagcctactacttcttatttattttttctgattctcttccttcacccttcagcaccctctacccttcaactggcccatgtgtgttgttcccctccatgtgt

SEQ ID NO: 751592 - DNA, 626 bp, Homo sapiens
aatgcacttctttgaaaaaaagatatggagtttgaatacaggtaatgtttgatgatgaggttagactggaataggatgtagggtgtttggagctagaggtgttagctaaagtaggtgctaaggtttcagtctggggttggggttgaaagcaggagctgggctcacggggtggggggttgattaggtcagaagctgagttggtgatgggctgagagaacacttagaagcaaactgaygagtcagggctcaggcctcccttaaaactacacagtttccttatcaccctcattgaagtgttcctttcctgagagttccttgtgcagggtcaggcaccatccttggatcaagcttgtggtccagtttggtggttcaggcatttcttttattttataaagaaaaatctctcttttcccttgacttccagatagccacttttccccatgtccatagggaaggtccagctttttccatttctccttgtagtttctgtttttcctgtgatcttggtgaagaaaattaatttagtgctttcagttatcttagagtctttgatccttacttaaatactgtgatgaaatatgattattttcctcctttaacagagatagaaataaagcttcagatat

SEQ ID NO: 751593 - DNA, 625 bp, Homo sapiens
ttacttaaagtttccctgatctctgatatagtttggatgtgtgttccctgcccaaatctcattttgaaacataatccccagtgttggaggtggggcctggtgggaggtgattggatcatgggggtggatttctcatgaatggttgggcaccatgcctttggtgctgtactggcaagagcgagttctcacaaagtctagttgtttaaagcgtgtggcaccttgctctgtctctcttcctcctgcttttgccacgtgacatgcaagctccctcttcaccttccaccatgattgtggcttcctgaggcttccccagaagcagaagccagtgctgtgtttcctgttcagcctgcagaaccatgagccaattacacctttttttaaaataaattacccagtctcaagtatttctttatagggatgtgagaatggactaagctctcctttcagagacgttgagaattacrgtagcagaagcccaggagaaaccgcttgtcctaacatgcgggaatgctgttgatggagatacacccacacttgtctgtggtgtggctgaggattgaagccaccacacaccctggatgcaccaggtcaaataggagacccagacgccctcatcgtagagtat

SEQ ID NO: 751594 - DNA, 632 bp, Homo sapiens
gagggatgtaggcttcctcaggctttctccctgtcatagggactctcttatccactggctgatagcctctctcaggttccagagataatcattatacacatggttcagtgggacatgatcaggaactttgaatgactacacgccttgccatgagagaagtcatgcctatgagttaaacttctggtttatcattggcattaaattacgaaaaaaagcaggactaaatactgggctctttctgaagcaagaatcttaaatttcagtttgaatcatttttcttttgtctagagtatgccagacaattttatrgtttctggatctatcttcaaattcatacagttttaaagatttttagtgtgtggttatgattgactggttggctgcttgtttttcacatgtgagaaagacttaaaactcaatcaccttgtgcatcaattttagccaccagaaacttgctttgttccttttcccaatatgggctgggctcctgtttggctgtgtgtctaaatgccattgtggccatccacagatgtccaggcattgtcctgtatttgaaatttatggccatcaagatctcctttatagctaacatggagagagatgagaaatgataatgtgtccggaattggtgg

SEQ ID NO: 751595 - DNA, 633 bp, Homo sapiens
ccatcttccacatatccagtccctggtgccaagaagcttggggaccactggtctaaagcaatgactcatctgtctactgatggtggtggttctaacactcaggatcaaattgcatgtaactgcacacgcacacacacatcacacacatacaaatatatgcatgaaaaactggtaacaactgaataaagactgtagtccagttaaccatattgtgccaatgccagtttcccagctttgatcttattccagattaatgtaagatgtcctyattgggagaaactgggtgaatggctcaagggacttcatagactgtttttgagatgtcctgtgggtctataattattaaaaaacaaaatgttaaaaagtaaatatagcaaaaagtaacaagccaaatggttattcaaatacaaagaacacatgcatatattttaactttagtaattcaagggatagagattgcaagagttttttaaataaaatacatatttgctaattcccacttgccaataaataagtaaaaaaattggagaaaagatgaatcaacttaaacataaaactaaagaaagagcatcatggaaattatggttatagaacagaaataattattaaatatgacaatggagaaataggaat

SEQ ID NO: 751596 - DNA, 566 bp, Homo sapiens
tttacatttgctttcttttctaagatcaggaagaaagccaagatgcctactcttctcagtatgatactggaggccccaactcatgtaataattcaaggaagaaaggagaggcacaaatctcaagaaaaaaaaaagaaaagaaaagaaaagaaaaactgcctctacttgcaggtaaaaagattaagtaggaaaggctagaagtctaacttaaaaattactaaamttattaagtgaatttattcaactggtagataaaagttcaataaatcaattgtatttttatgtactagtaataaacaatttgaaaaaaattttttcaaattactatttacattggcatcaaacataaaatatttaataagtttaacaaaagatgtgtgaaatctgtacacagaaaaataacaaaacactccataaagagattagaaaaaatcaaagtgagccaggcacagtggctcatgcctgtaatcccagcactttgggaggctgaggtgggtggatcacaaggtcaggagattgagacaatcctggccaatgtggtaaaaccccgtctctactaaaaatac

SEQ ID NO: 751597 - DNA, 664 bp, Homo sapiens
gggaggtctaaagtaagagaataatgagtttccaggaagccagactttacccatttttcatcacagaggggaagagcttctacaagagcatgccagtacccttaagtaccagctttttttctcttacattgaaaccaaaagattagacaaaataattgtctgagtacattattaatgaataaattcacttatttcattgccataacaaacatgtattaaactawcacaagtcttcaagcactgagctggatactaggcatacaaataagactaaaatattgtcctgtcctgaaatatcaccattttgttagggatattgatacattatataaagcaatacttttccttataatgtataaaaattaaaacataatattaatagaaattttgagtttattgatataataaatatatataaatataaaaattaggggaaatccccaaatgaataataggaaatcaaagattacaagatgtttaatgcatctggtggtgctagctggattacatattaatcctacatggaacacattaaggcaatgctacctgcaaatctggtgcattgttgagcctgtttgttgtttctttcttaatttttaatggaatgaaaacttacatatccactttagtccatctaaatatattgtgtatagtaataatagca

SEQ ID NO: 751598 - DNA, 617 bp, Homo sapiens
aatatagggaaactccatctctgtaaaaaatacaaaaattagctgggagtagtggcacacacctatggtgccagctattagggaggctgggatgagaggatttcttgggcctgggaggtcaagactgcagtgagctgtgagcatgtcactgtactccagcctcagcaacagagcaagaccctgtctcaaaaaaaaaaaaaaaaraaagaagaagatcaagaagtcaataccgatcttgcaaaaactcctggcatagaatgggaataatggatgttgagatcacatattatactcagactctaaatggcagaattgaaggggatttggagggcctcaaaggccgttgctcttttaacacctggagaagaaaattgaggccataaaatgggttgttttgccctaggttggccagcaaagaagtggcagaaccagattagaaaccacactaacttcctataccacgtcctatggcaaggctatagttgggtgatctggatcagcctatgcaaccgggctccctggcattactaactcttactttccaaggcaacaaagcaagggctgtggggtgaggaagcagggcttccatcaggggttttttgtctattaatgacaaa

SEQ ID NO: 751599 - DNA, 611 bp, Homo sapiens
gttgaaaagttgcccaaaagacatttagcaagcaaatgtagctagcaaaaaatcattttatgatggcaggttaatacaattataatttgagctcacatttttgatacatgttgtaaatcgctgtaaagtaatacagaaggaagaaaaacttayttccactaatattttctttcaggcatttgacattatcacagactgacatggcagcattaacaggaggaaaggtagtacattctctaatattagacaatttgatcatcacaaaaataataacggttcttaaatgaacaacttttgcttttgacagggatttcccttcttgtttcaacatattcgtgatggcatcaatataagacaaacttgtaatctgattttcagcctgtgtcgatacaataatcgacttgcagaacatgtaagtgctaaggaacagtcttaaagatttttggaaattttaaaaaagaataccctgaaatctggccgagtgcggtggctcatgcctgtaatcccagcactttgggaggccaaggcgggaggatcgcttgagcctaggagtttgagaccagcctaggcaacatagtgagaacccgtctctacacaaaatagaaaaatct

SEQ ID NO: 751600 - DNA, 636 bp, Homo sapiens
ttctttataacaagtatattttaccatatctgtatgttattacaaagtaaattatcattatttttcaattaagaagaaaactaagactgtagaacattgaatgatttgacctcctcaggtaccttttggtaggtcttctgactgcaaatgctgggttccctctgttaaatcatactacttcctgagaagaaataaaagataaagtgggaaaattctgcatcttaggcaagctaaagaamagtggtttaaaaattattgccacttcaaaaataacaatggcagaatagaaggtatctatttttatcacctcttgggatctttttgtggggccaaggggaaagcagaaagatactaaaagagatgttcatgtccctttttattcattttaattattaaagggaacagtggctttgtgattaatgactgctgttcagtctattttatatcttacaaggatctgacagttttgttttacattttatagctgcagcttatcttctggtgtcccttataccaagcaattcattccgtcagatgttccggtcaacaaggtctttgcacatcccaacccgtgaccttccactcagtccagacacaacagtagtcctacatcaggtctacaacgtgctccttggt

SEQ ID NO: 751601 - DNA, 618 bp, Homo sapiens
aagaaaatatccaggagttctagtagtacagccttgctcccatataaagaagggtaattataaaaacactttttaaaaaatttttggtaattgtgttcatataatttatactaaaagttacgtgaggaactattctagctactcggacagctttaaccaaatattgaatgttctaccctgttttgggttgtcttgtcaacccaagtgcacactttcaggggaattaaacatggtggagaaatggaagaaaggaaagaatacttgccgtcacatcagctgaatcagcttttgtgattcagtcttatcacttttgtaaccatgaagcactatcaatgttgcctcatagggtttagttctctatattagcactattttatagaactttctataagggcyggacgtggtggctcacgcttgtaatcccagcactttgggaggccaaggcgggcggatcacgaggtcaagagatcgagaccatcctggccaacatggtgaaatgtctctactaaaaataaaaaaattagctaggcatggtggtacgtgcctgtagttgcagctacttgggagactgagaggccagagaattgcttgaacctgggaggcggaggttgccgtgag

SEQ ID NO: 751602 - DNA, 523 bp, Homo sapiens
ccatctcacaactatatactaagacatttcacaaaagaagataaacacacaatcaacaaacacacaacataatgctaaacatcattagcaatgaaggaaggacaagtgaagccaccgtgagctaacactactatacccattagaatagctcaaattttaaaaccctgttcatatcaacttctggcaaggatgtggagtaaatgaaattctcgtatgttgcatagtataactgttctgaaaaacagtttggcatcttcttataaggttaatcttacacttaccatattatttagcaatttcatcacttsgtattaatccaagagataaaaacatacatataccaaatgacctgtatgtgaatgtttacagaaactttattttaacaacccaaaactgtaagccactcaaatgtcaataggtgagcagataaatgaaccgtggtatacctatacaacgaatatattactcagcgatgaaaaacatttaacaacctcaaaaagcattctgaataaaagaagccaga

SEQ ID NO: 751603 - DNA, 639 bp, Homo sapiens
atttaaaattttaaatgctaaaagatttaatgaatcttgcatagagacatattattacacaaacattaaactttttttctcagaagtataaattcattttacatattagggcaagaactgcaagtttaaaaaattccaatccaagatctttaaggtaaaacacactataaatatctgggtaaaaaagcaagtgaagagcatttaaagatgtttcttaaatgaaactatttcttcataagtcattaccattttctcctaaattctcaatatgatttgcattcaaattgagaatcatgaccttatgaaccacgtcactaatggaagcacaccacatacctcaaaagtataaggagcagaaaggggaaaggaaattactttaaaacttcaagtagatctgagtctgcctatcctctgaaaggaacaggtacaggacagatactgacatagaaatcctggaagtaggaaaggaggttggctgcatgagccttaaargaggcaaaacaaattctaatgaagaactaaacttattttaatcttagaagccaatactgcttcatgaaaaaatttttcacaaatttaggaagtaaattttattcacttcctgaattttcttcaataaacatgttttcatttataaaa

SEQ ID NO: 751604 - DNA, 549 bp, Homo sapiens
tgtgtaggatccttaaagtctttgatgggcttagagctagaaccaaccaaccagagaggagaaagaaaacggattcaaagacaggaaatacaatcggctaaaagcagcgtttaatagccgcgtcctggctagggaagggaaggcaccaatgcgaggcctgcgtggctgagtggcgtcaccttgcccttcccgtgtaatgggaccaaggaagaagcacagacctactgcccggggctcccgccctccacagcccctcccctccgggtttcccagcgcgggagctatggggcaagtgcactgcctcgccgctccacactcgcttgaacgcgtaagaaatcctcgtcagactcagctccgggctgggagggcttgcggaggcagcggmgcagcaagctggccccagcccgggtggcagttcgcacccacgcacgtccagccggggtcaccacctggaagcgctgcatcccatcacctgcgtcgggtccttccagtgcccaccgattccactgcccagttacggggaggattgtacggggggtggggagggac

SEQ ID NO: 751605 - DNA, 602 bp, Homo sapiens
attggacaaagcatagtaagttgtgaaaatgaggaaagacaaagggacttgggcgagggagctaattgggtagacatgtgttcgggaagatggtataacaaggtttgtttgtaaagaatttctccagcctcagttttccgtccttgatgataggaaggttgcgtctggcagcagaatctttgtctggggggagctgctgtgcaaaccaccccctaccgaatttctcctctcccgctttcttattgcaggtagtactccsttcacgcccagctgtcctgtagaatggcagcctaaatgtgaacaaaagctatacccccttcctttgatgcctttagtccaactaaaagaggctacaagtttccaaatgaactttgcattacaaacatgaagatgtgaaagtgaacagagggaagatgagggcaggccaaccccaagggccaaggctgctgcttatcttctcctgaagccccttcctctcctgacctctatggagaagcccccctaaagttcctttctctacccccagggctaggttacagccacctcctaggtagacagtgggagactacagaaccacaggcccctccaaatacccttggcct

SEQ ID NO: 751606 - DNA, 613 bp, Homo sapiens
tatagagagggaaaatttcaacacagtggtgcatacagggagacagctgttcgaacacaaagacagagatttataagccaaagaaagagggctggaacagaggaaccaaccaccgtgacgccttgacctcacctcagacttccagcctccagggctgtgagacaacacatttctgttgtttaggttgttgtacactttgttacagcagccctagcaaactagtacatatgggtacaccacattttgtttctctgtctrtcacttagacttttggctcatttccatttttttggctattacgagtaatgctgctctgagcatccacacacaggtgtttgttttcatttctcctgggtatgtacataggagtggaatggccaggtcaaatggtaactctgttgaactgtttgtggactgccaaactcttttccagtgtggcactgccctttcacattccctgcaggaacatatgagggttctcatttctccacattcttgttgacacttgttacgatccttcttttttactgtagccatcttagtgggcgacggtggtgtctcactgtggttttgatttgtatttccctgaaatgatattgagcatcttttcatg

SEQ ID NO: 751607 - DNA, 601 bp, Homo sapiens
ggagtcacacgattacctaagagcttcaaactggaatgggctttgctgtttccccagatgttgggggattttggtgaatgtcaatgttcaggataggagagattgacactgacactactgcaggggttcagatatgaagcagtgacaatgtaggccagtacaggtagccatgggaatgacgaggagaaggcagatttgaaaaataggaagtaggctcagaaaaaaggcggactagcataaataaaggagaygaagggggcttccagaagttaatgacaatgttaaatcaagcaaaagcattcctatctaaggaggattgcctctcagtgtagcatgtcccttgtctatgtttacgccaccccaattagatcgcagcagagaacagagcctagcactcttctattttctttatatctggaacatctacccatagaatgggctggtgaacaacaggggctcaattactggttgaccaattcccttgtgcttgggcagagactgttgtctcttcaatttaatgaacattgactttgcgtccactgagtgatgggtgctctgcagaaattaggagaaaatccatgccatagaaaacagcttatgg

SEQ ID NO: 751608 - DNA, 605 bp, Homo sapiens
ttggcttaaatggtagagaacctttgtgctctttgagaataaatgaacaaaattgcattagcacagggaaatgaggttggagactgaaaaataacaatattcaccaaaaccctaatggtggagaagtgatacattagtaaagactgaaattggtagctgggttatgttaaaacacatttcctatctctgattacaaattgtatctcaactgctggcaactctttgaatttattgtgccgaaacttgcttaatcatacaatacatacgctcttctttttgtaggcggcactccccctatcgcacactggagccagtgcgtcctccagtggtaccaaatgattacgtacctagcccaacccgtaatatggctccctcgcagcagagccctgtgaggacagcttctgtgaatcaaagaratcgaacttacaggtattttctctacctcagtgcaaaatgtgatggtcatagtaccataatctgttcagattacttcaggtaaatctctcattttccaagcactaagttcttttcctcactctattctcccaaacctcatctgatttcacctctctctcctcatgttctgattcaactttgagcagtca

SEQ ID NO: 751609 - DNA, 509 bp, Homo sapiens
agaaaactgcctctcagcaacattcaactattaatagttcagcatgtgccaagcacatccatagtgtgatcctctgccaggcttgtgaggtcaagtgtgggatacagggtcactgttgccaggttttaaaaaatgtctgctgcatccaaacaggataaataccaagtagaaaaggatttaattacagtacgagaattgaaggactttccaatgctggttccattctacatactccatacaaggtggaaagtctaagtaaatgtcattacagtaaaataatttttttccatcacaaatccggtttaatcacaatgattaatgatggtagtcacttgaataataccctgggagttttttctgtttttactattgtratgagtgtacaccttagagaattctgccaatcaattgctactgcatgttctgtgagatgttgtcattcattttgaacaaaagtggttctgagcagcttctggagtaaaggccagattttgaaactgacattgaag

SEQ ID NO: 751610 - DNA, 531 bp, Homo sapiens
ttagcatcaagttttgtactcctgcctgtattactgtaggctgtgatattatatactttgtttcttgggactacacatgaaggaaatacactgaagaaaataggaatacaggcttcaagaaatatacactgacaatctcatatgtgatatgactttctccatatgtctaaaactaaaataaaaccatgtcaatatcaatgtggatatgctgagtgatgaggacaaatgtgatctaaaatcagagtccaactcatacwcctgggaatcaacgtcaaagcaggtgatacacgatccgcatgtctttcatgcaagatatcagaatgatttggaacattttactgcaaacattcatcatgctctttaacttgattgatcagtgagaaggtacacaattataatgacactttagttgaaatctcttcagtggaagtgtcctaacttaatcagcttggatatatgtttggtgaattctagtatgtaatattcattatttctcacacccatatgatgtaataatgtgcctacatctct

SEQ ID NO: 751611 - DNA, 531 bp, Homo sapiens
ttagcatcaagttttgtactcctgcctgtattactgtaggctgtgatattatatactttgtttcttgggactacacatgaaggaaatacactgaagaaaataggaatacaggcttcaagaaatatacactgacaatctcatatgtgatatgactttctccatatgtctaaaactaaaataaaaccatgtcaatatcaatgtggatatgctgagtgatgaggacaaatgtgatctaaaatcagagtccaactcatactcctgggaatcarcgtcaaagcaggtgatacacgatccgcatgtctttcatgcaagatatcagaatgatttggaacattttactgcaaacattcatcatgctctttaacttgattgatcagtgagaaggtacacaattataatgacactttagttgaaatctcttcagtggaagtgtcctaacttaatcagcttggatatatgtttggtgaattctagtatgtaatattcattatttctcacacccatatgatgtaataatgtgcctacatctct

SEQ ID NO: 751612 - DNA, 531 bp, Homo sapiens
ttagcatcaagttttgtactcctgcctgtattactgtaggctgtgatattatatactttgtttcttgggactacacatgaaggaaatacactgaagaaaataggaatacaggcttcaagaaatatacactgacaatctcatatgtgatatgactttctccatatgtctaaaactaaaataaaaccatgtcaatatcaatgtggatatgctgagtgatgaggacaaatgtgatctaaaatcagagtccaactcatactcctgggaatcaacgtcaaagcaggtgatacacgatccgcatgtctttcatgcaagatatcagaatgatttggaayattttactgcaaacattcatcatgctctttaacttgattgatcagtgagaaggtacacaattataatgacactttagttgaaatctcttcagtggaagtgtcctaacttaatcagcttggatatatgtttggtgaattctagtatgtaatattcattatttctcacacccatatgatgtaataatgtgcctacatctct

SEQ ID NO: 751613 - DNA, 531 bp, Homo sapiens
ttagcatcaagttttgtactcctgcctgtattactgtaggctgtgatattatatactttgtttcttgggactacacatgaaggaaatacactgaagaaaataggaatacaggcttcaagaaatatacactgacaatctcatatgtgatatgactttctccatatgtctaaaactaaaataaaaccatgtcaatatcaatgtggatatgctgagtgatgaggacaaatgtgatctaaaatcagagtccaactcatactcctgggaatcaacgtcaaagcaggtgatacacgatccgcatgtctttcatgcaagatatcagaatgatttggaacattttactgcaaacattcatcatgctytttaacttgattgatcagtgagaaggtacacaattataatgacactttagttgaaatctcttcagtggaagtgtcctaacttaatcagcttggatatatgtttggtgaattctagtatgtaatattcattatttctcacacccatatgatgtaataatgtgcctacatctct

SEQ ID NO: 751614 - DNA, 623 bp, Homo sapiens
aaagacagttgtgtgctgtttctttctgagtaacttccgtggagtcccactgccctggagaaagaggacaggatgtgagggtctgtgcagcaagtgggcagaaggcagcacctgctcctcattgtcaaaatctgagaaggacttggaactggaagaaaaacaaacccctggggacggattggaaccagggctaggaaggagctgcagctggtgggygggagaggtggcaggatgggtagccagggcctggattgttgctccctcagcacgtgctggcctcagtgcagggaggacttgttgcaggctcagagacagatttccacctgcaggatcttggcagacccgctcaaggcctgctctgctcctttcccacctgcctggacgaggcgtctcaaagctgctggaatctccgagatgggcagaagcccatgggctggggcaatgcgtttctactgcgctttgtctcaaatgctgagtggatgatgctgcttggtgtctggggagcatgtgtaaacctcaaacttttctaaaccctggctttgtcgtggcagccttgtggaaccgtgcaatcatagcgtaccatttctgtaatgagaaccatttcccgaatattaagctgggcg

SEQ ID NO: 751615 - DNA, 599 bp, Homo sapiens
cacatattcttagcttgaactctacatttgaagccaagatggccctacactataattggtaatgagttatctgtcttctttcaattattttctctctggttattacttgacaaaagtagtgtgtccaacaggtgttccatctgaccttccccatcagatcccatccctgcaatgttccaccttgatagatgggaaggcagatggaaggaatgtatttaatgtgcacagaaaatcagaagataaatttccagctggaatgaaaagaatccccattgccctgtagacaggagggacatartgaggctaactgatttatcctgctggaaacaagacttcatacaatcttacaaagaagcagagaaagtgaaagctgaagcgtccacctctccacacaaggtcctggtaagagttgatgtgaagataaaaaagagatagtctcattatctggcccttgcaaagtcatgaactgcttacctctttatatttatttaggcatatttgttttatgtgggactctctatcttatcaacgctaaattaaaagaaaataccattccagggaatgtcaaactccatatgttaagagataaaatagtgaca

SEQ ID NO: 751616 - DNA, 620 bp, Homo sapiens
aacaccatcaaaatcaaggcataaaataattccattacctcagaaagttctcttgtgtctcctttccaacaaccacagaaactactcttttaaattatatcacaacagattagtttagcctccactcaaactttatataaatgggttcatatctgtttttagtgtctagctttctttattcaacaaaatatttttgagtctttccatggtgtaaatgctgcatgtatcagtaatgcatttttatttattaatttatatatattattggtatttaactgtatgactaaaatgttagtttatctatctctggttggtaaataattayactgattccagttttattctgttttgaaaaaagtatacaaacattttatacacttttttgtgaatatatacattttagtttctttggataaatactgagcagtcatattgctgggtcttagtttattagaaattgaaaactctttttcaaattgattgtatgatgtgcaatgctattagtaatgtaagagatgttcttccacatccttgccaaaatttagtgctctttttttatgttagtcattttagatgttctagtatctcactgtgattttaaattatattttcctaactag

SEQ ID NO: 751617 - DNA, 655 bp, Homo sapiens
gggaactttgcagagctgtggtgggctctgcccagtttgaacttccctgcagctttatttacaatgtgaggggaaaaccacctacttaagcctcagtaatgatgaacacccctccccgcaccaagcatcccaggtgctgtgctggcagtgagaatttcaagccagtggatctaagcttgctgcggttccgttggagggggggtggggtgggatctgctgatagaccatttggcccctggtgtcagccccctttccagggcagtgaacggttctgtcttgctggcattccaggcgcacatggggtatgaaaaaaaaactcttgcagctagcttggtgtctgctcaaatagccacccagttttgtgctttaaacccaggatcctggtggtgtaggcacccgagggaatctcctggtctgtggattgcaaagaccatgggaaaagcatagtatgtkgcccacaatgcaccattcctcacggcacagtgcctcatggcttctcttggctagggaaaggagttccctgacgccttgtgcttcccaggtgaggcaacaccccacccagcttctgctctccatctgtgggctgcacccactgtctaaccagtcccaatgaggtgagctgggcacctcaattggaaatgcagaaatcacccgc

SEQ ID NO: 751618 - DNA, 655 bp, Homo sapiens
gggaactttgcagagctgtggtgggctctgcccagtttgaacttccctgcagctttatttacaatgtgaggggaaaaccacctacttaagcctcagtaatgatgaacacccctccccgcaccaagcatcccaggtgctgtgctggcagtgagaatttcaagccagtggatctaagcttgctgcggttccgttggagggggggtggggtgggatctgctgatagaccatttggcccctggtgtcagccccctttccagggcagtgaacggttctgtcttgctggcattccaggcgcacatggggtatgaaaaaaaaactcttgcagctagcttggtgtctgctcaaatagccacccagttttgtgctttaaacccaggatcctggtggtgtaggcacccgagggaatctcctggtctgtggattgcaaagaccatgggaaaagcatagtatgttgsccacaatgcaccattcctcacggcacagtgcctcatggcttctcttggctagggaaaggagttccctgacgccttgtgcttcccaggtgaggcaacaccccacccagcttctgctctccatctgtgggctgcacccactgtctaaccagtcccaatgaggtgagctgggcacctcaattggaaatgcagaaatcacccgc

SEQ ID NO: 751619 - DNA, 544 bp, Homo sapiens
agtctttctcttaaaatgatttagaggtggcccaatccttccttagaatgagtactaaataggaggagaaagaaagaacattgtaattgtgagttgtcagcctgccaaagaatactgaaacttttccttcataaattgggagtatgctcatatgmttttgcttacccttggtttctgtgatttcacaccttccatttcgccccctctcttggtgtctttgaatcagcattagttcacttgctgttagatctctatgtcaacattcaatccaagttgagtgagaaaagtccaacatttaatccacgttgagggagaaaaaagtccaaaaatccagaaggattctctgaatttgaagatgcctgaggaagggaaaatgagcatcccattcacagctgtacatctgcaaacattcaggtcctcaagcccactccttgccagcaccagccttctttataaaccacgatgtaaaaagagtttgccctgacaaacatacttgtcaacggtggttgatttaaaaatgccaatggaccatccaggataagaa

SEQ ID NO: 751620 - DNA, 544 bp, Homo sapiens
agtctttctcttaaaatgatttagaggtggcccaatccttccttagaatgagtactaaataggaggagaaagaaagaacattgtaattgtgagttgtcagcctgccaaagaatactgaaacttttccttcataaattgggagtatgctcatatgcttttgcttacccttggtttctgtgatttcacaccttccatttcgccccctctcttggtgtctttgaatcagcattagttcacttgctgttagatctctatgwcaacattcaatccaagttgagtgagaaaagtccaacatttaatccacgttgagggagaaaaaagtccaaaaatccagaaggattctctgaatttgaagatgcctgaggaagggaaaatgagcatcccattcacagctgtacatctgcaaacattcaggtcctcaagcccactccttgccagcaccagccttctttataaaccacgatgtaaaaagagtttgccctgacaaacatacttgtcaacggtggttgatttaaaaatgccaatggaccatccaggataagaa

SEQ ID NO: 751621 - DNA, 582 bp, Homo sapiens
gatcttcaataagttttggttttgttttgttttgttttttctttacaaaacatgagctaggaaagactcagtaagttctaagagtaaaaaggggtatggagaccaaaaagtctaagatccagcgaagtagagctatacaaaataggattgactgccttaatacataatgagttgtctatcactagagtagctagctggtcagttattagaggtattgtgtgaggcatgcaaaccacaggaattgggttggaaacccactgaagcctactccaaaactaaaatttaatgatgcttaaactctgtaatcattgattaattttataaaatactgataagaacakaaagttagttaaaatttttgtcaaaaatctactgtgtcagagccataattagaattctcttgtctttccactacaccacttttattccttccccaaatcttattcctttagttatcaaccttacatctacctctaggccttggccaggcaaacaaatagactgttctgtcctaactggaaccattcatgagctcagcatctaagatgtttgttggtttccatcaccttcctttctcagcac

SEQ ID NO: 751622 - DNA, 582 bp, Homo sapiens
gatcttcaataagttttggttttgttttgttttgttttttctttacaaaacatgagctaggaaagactcagtaagttctaagagtaaaaaggggtatggagaccaaaaagtctaagatccagcgaagtagagctatacaaaataggattgactgccttaatacataatgagttgtctatcactagagtagctagctggtcagttattagaggtattgtgtgaggcatgcaaaccacaggaattgggttggaaacccactgaagcctactccaaaactaaaatttaatgatgcttaaactctgtaatcattgattaattttataaaatactgataagaacataaagttagttaaaatttttgtcaaaaatctactgtgtcagagccataattagaattctcttgtctttccactrcaccacttttattccttccccaaatcttattcctttagttatcaaccttacatctacctctaggccttggccaggcaaacaaatagactgttctgtcctaactggaaccattcatgagctcagcatctaagatgtttgttggtttccatcaccttcctttctcagcac

SEQ ID NO: 751623 - DNA, 505 bp, Homo sapiens
ggagttcgcgacctgcctgagcaacatggagaaaccccgtctctactaaaaaatacaaaattagctgggcgtggtggtgcatgcctataatcccagctactcggaaggctgaggcaggagaatcgcttgaacctgggaggtggaggttgtggtgagcctagattacatcattgcaccccagcctgggcaacaagagtgaaactccatctcaaaaaaaaaaaaaaaagttatcaggagctggagctggaggtttatagtggattgattattgttgawttcagttattgctcttataaccctggctgttccaggcattgtgatgtaaccaaatctactacacagactgattacatttaatatactatattagactttgccaagacattcttttctatcccattggcacccaaggacaaagactaattctcattcatgcttaaaaaccacaaatatacctttacagtaagaatactgtaatattctttagttattcctcaggagtacc

SEQ ID NO: 751624 - DNA, 590 bp, Homo sapiens
ctcttataaccctggctgttccaggcattgtgatgtaaccaaatctactacacagactgattacatttaatatactatattagactttgccaagacattcttttctatcccattggcacccaaggacaaagactaattctcattcatgcttaaaaaccacaaatatacctttacagtaagaatactgtaatattctttagttattcctcaggagtacctaaagctctgccattggctacaagaaggtgcataagaatttagtgtgattcccattaccttctgatgcctaaacctttcactgatagatgatatgcrgttggctagagactctcaagccttagactcaatggctctaactttggtattatcacaccttcacctgcaagggtaactgataaatcccaacaaaacccaaagactgcacatcaagtttctgggggactatgcaaatggattcacaatgctcaattactctggaagtcaagcaaaaaaatgtctcatttccctccaaccaaaagggaacctaatgtcactttggactctgggtatcagagatggtagatgtctgtcttgggcattcttttataaca

SEQ ID NO: 751625 - DNA, 554 bp, Homo sapiens
ttggattttattgataaagactagctgataatctgagttgaaacccacttttctgcttgcttttacacttcattttataattaatcgtaattatttaatgtgaagaaatatttaaatgtagaaaatgtgtcaactatttatagattttttaagctaaaatgcatttgtatagagattttgttataattttttatacattattgtacatcaatcgaaattagattttccaaatattgtataaaaatcagattgttgtgraacaaggttctctacaatgtttctttgttttcttgggagaagtgataatagctgacaaaatttctcctctgttattaacattagtcaatgaccctatgtggatgggtagacattgccctattcatggtcgtggctagcagaagaaaatgtgaagcagggaatattcatatcttactacacatttttatttcctgttgtatattttatttcaacatgcattttaaaaacctataaactagtcttcatgtaaaactctacttgattgcttgactcttctctgtttgaaccagcaggat

SEQ ID NO: 751626 - DNA, 554 bp, Homo sapiens
ttggattttattgataaagactagctgataatctgagttgaaacccacttttctgcttgcttttacacttcattttataattaatcgtaattatttaatgtgaagaaatatttaaatgtagaaaatgtgtcaactatttatagattttttaagctaaaatgcatttgtatagagattttgttataattttttatacattattgtacatcaatcgaaattagattttccaaatattgtataaaaatcagattgttgtggaacaaggttctctacaatgtttctttgttttcttgggagaagtgataatagctgacaaaatttctcctctgttattaacattagtcaatgaccctatgtggatgggtagacattgccctattcatggtcgtgkctagcagaagaaaatgtgaagcagggaatattcatatcttactacacatttttatttcctgttgtatattttatttcaacatgcattttaaaaacctataaactagtcttcatgtaaaactctacttgattgcttgactcttctctgtttgaaccagcaggat

SEQ ID NO: 751627 - DNA, 550 bp, Homo sapiens
cggcagttggggtaccatggacaacttgatagggtaccttccatttgagggaaagttggcctgctggggatatttccaagtttttaataggagccaatttccctgctgggttataaaaagattatcttccttattagaggaagggagtctttgatctccatattcaaggagtgccttttgtacttgtcctacgctgattacagaattttgtagcttgaaagtatctatgtctattaggaagtttgtggttaagaaaaggcttccatacattattttgaaagggctrggctggagattgctctggaagccactcaaacatgcaacaaggctacaagcgataaagacagccaggtttctgacgactcctggcatagtttagcacgagtcctttttagagtttcatgggctctttctactttccctgaagacggtggcctccatgccaagtgaagacagcactgaatttctaggggtgaagatatgttttgggtaattgttgctgtgaaagatgagccattattactcttcaagctcttaggcagcccaaatc

SEQ ID NO: 751628 - DNA, 469 bp, Homo sapiens
atgtggaccacaaggggagggttaagtgagatggtgtgtgagaggcactttgtgaactgcaaagggctaggcagatgagacattgccacagccattgytaccatcattactttgtcccaagcacctctgggtgtagtcttggagagacaaagtgcaaacagaggtagagtttcctcccaggtcacaggcagctcctcccacctctgtagggcttccctctgcagctgctgtcagattccctctcaggtcccccaagcatcccctctaacttcctctccacagcccactaccctccccaacccagggcccctggtcactcacagtggttctctgcttgtctggcaaggaggcccaggggcctttttgaagactcctcatcatcaaggtgaaggtcttcagcctcccactgcccagaggccttgaagaagctggcacacatcccatagggacagcactggtaggcataagg

SEQ ID NO: 751629 - DNA, 618 bp, Homo sapiens
tttgatccacacaatcagtgaatgaggtcagtatcatccccaacttatagataagaaaagagaaaactaaggcccgcggttcttaagtagcttgcacactaccccacagctggaaagcaacagagctaggatgtggatcagggctgtctgacttcagagtctgcatctgtgacaactayactgtaaggaagcccaagagacacaggtttaaattccaaccctgaagcaaaactctgtaactggaaaggcccctctggcattgggtggagcctggattgaaggggacactggaggccaacagaccttcaggaacacagagtttgcatggaaaggggctgagccctccagctgctcacagccctgggctctgccccttcctgcagccaggcccttcccttgtatggcccttgccccttccccaccccttggggtggcaaagaggaacctaatcccaggggtccccaaagtctgtctttgttctttgttctcccttctgtagccttgcctctatgaagggctcctcctatccccacccattcccacagtgagatcagcattcttttgttcttgtgatgctgaggttgggttcatatttgagattttcacatacccgtaaga

SEQ ID NO: 751630 - DNA, 505 bp, Homo sapiens
ccaggcccaggctaatagtaggtggcttgtgccatgggttttcccaggctggaaggccccagggccatttctgctattgacacacccccaggaagtgcccgaaaccaagctaatgaggcctgggactacttagagctgcaytggggcttggggagccggggcgggagggtgggggacagctacatcttttataaggaccatgggaggtgaggaggtaagagcatgaggcagctcaggctggcttcagcccctgcccttgggacagaaggacacccacagaaaccaaaagaggcgcttacagttcctgcagtctgcccagggtccggatggccacagggaactcctgcagcttgttataattcaggtctctggaacagaaagcagagcagtcattagggcaaaggcttaatggggcatgtcagggtccctgagaaatggaaacttggctctgggcttggccagggagatgggttttccaatctgttggatccagcggccaatgtct

SEQ ID NO: 751631 - DNA, 524 bp, Homo sapiens
tgtcatgaactgttgaaaggacttctcacattatctcaaacaatcctcaaaacttccatgaagtagataggtcatcctaattttatacatgaattgttcataaaagaaagaaatttaaaaatgggcaatgcaaaaatggtttcatatgtataataatgttatcatgtaaagttatccgtgatatatgtatatcatgttagacatgatacatgtaatgtaattgctgctactgccaatgactagttcctttgtctgcagaagtcagcatcttacctagcctagaayacactttcaatatgcatctttatatagaaaagacaaatgcatggataaataaaaatgtatatatattattgaacctgagtttttagggtggaaaaaaatacatacttaacagagtgtggaatagcaagttaaggacctgcaagaagagtgcgctaaaaagtcagttagttaattcttgcaaagcactgtgaacaatacctgagaagtactgagcctctagtacagacaaaccattctga

SEQ ID NO: 751632 - DNA, 636 bp, Homo sapiens
ccatatgaaaaaaaaaatgggaataacagtgtctgctgcagaggttcttatagaattaaaagagagaatccatgcatgtgctcaatgcactgcctgacagtgatgaataaatggcagaaagtgttatcactttcatggcatattttgtatatatcgttttcattcgcttgtctkcacatgaagaatgttggctttctcaaatagcctgtaagtaaaacatgaggttactttgaagcctatccagtagactttgatcctgaattagagtttcttctcattaaagaatttagccataatcctgagccatctgtggctgtgagaataaatctgctctgtccagaagtgacattccattcctttataactctcttttcttttgcccatgttgggctcagaatgagatactccaaaattaagaaaatagcggaagcatcaaggtctctctgacttctcctggtttcttcccctgaagattggcatatgataggtgtcctgtcctgtatccagagggaagcaatgccatgcagtgatgccaagaagaaactgaacaaatagcccttgctaagctcccctcaggttattgccattagatcataagcttttgtcctccaatcatacttctgcatgactgtcggt

SEQ ID NO: 751633 - DNA, 490 bp, Homo sapiens
cattattttattttcattttcttagttcaaaatatttctagtttccatttaatttcttccttcggttacataaaaatattttttctttccaagaagagatatttactttcaaacatgaatatgataaagaaaaatcttatggtatatatttcyagcttaattatattgtatttagataacatgccctatatgttttatccttgaacaattgtttcaacttggtacccaaattaaggtcaacttttataacagctatatttagatgtatgcaaaaagaatgtgttatgtagttacaggatgctatgttctgtatatttttaaggtctaatttgtaataatgttgcttaaatatgttctatacttactgatttgtggtctgcttgatctgccagttactcaaaaaatatgttcaaaattccgactttgctcgtgagattttaaaatttcccttagactcttgttgagtttttgctttacatattttaaagct

SEQ ID NO: 751634 - DNA, 603 bp, Homo sapiens
caagtccttttgccatagctgccaaaaaaaaatcagacccaaattcaagccccgattttatgtttctcagactgagaaaacacaaaagccatcgctcagatggtttggaaaacatttgcaaggtcagctcatttcatgatgtttgattccagtactggcacttggattacttgtgcatctttgagatgtcactgaataattatcaccacacttttaggatttattgagaatcaggctaggacgtatttcctcatctcacaaaagaaagctaggagaaaagcactatagacatctccattttacaagtaagaaaatagagtctgcaggagagtcagctgttcagcatcactcaggtagaaagtggcacagctggatgtagaagctaggctgccagattccasagcctgcactcttaatcctgtgctgcccagataacgctgactgctttgtattaagaacttacattctcccacttaattgggagcaaggcagattagaaaccctataaggtagatgctattcatgtgaccactttacagacatgaagactgaaacctgagaggctaataaatgtgtctgagatcataaagctgttagatgata

SEQ ID NO: 751635 - DNA, 616 bp, Homo sapiens
ccctaccccccagctctactgaatcagcaactttaggggaccaaccaatccaggttgtcaccaggtgatgctgaggctcattcaagtttgagaaccactgctctagaaaaagtatgctgttgcttctgtggaaaaaacagtactctccaaagcatgtaacctgaatttttcagttaatagttctatagagatctatctaaacctgtatagctaacattgccaaattataggggtcgatgaacaagaaattgatgtttgacagaattttcgaaaacaatgaagtgaaatcaaacaaaaaagggatccttttgctttttaactgacctggttacaacckatgatctttgacaagttgttattcctgcatgtcttttcctcactttgtaaagcagcatctcctgttaccaataccatttcagagcaattctggcagttacaaatttacattttatgtcaaaatcattcgacatcaaattgttttatcacctgtttttattggtgaactctgtacttgtaccttacagacttagtaaagttagtttgttttatttaaaataaaagttgtcgcgctgacataggtgatcaagaagcaaatttaagagacaacactactttt

SEQ ID NO: 751636 - DNA, 616 bp, Homo sapiens
ccctaccccccagctctactgaatcagcaactttaggggaccaaccaatccaggttgtcaccaggtgatgctgaggctcattcaagtttgagaaccactgctctagaaaaagtatgctgttgcttctgtggaaaaaacagtactctccaaagcatgtaacctgaatttttcagttaatagttctatagagatctatctaaacctgtatagctaacattgccaaattataggggtcgatgaacaagaaattgatgtttgacagaattttcgaaaacaatgaagtgaaatcaaacaaaaaagggatccttttgctttttaactgacctggttacaacctatgatctttgacaagttgttattcctgcatgtcttttcctcactttgtaaarcagcatctcctgttaccaataccatttcagagcaattctggcagttacaaatttacattttatgtcaaaatcattcgacatcaaattgttttatcacctgtttttattggtgaactctgtacttgtaccttacagacttagtaaagttagtttgttttatttaaaataaaagttgtcgcgctgacataggtgatcaagaagcaaatttaagagacaacactactttt

SEQ ID NO: 751637 - DNA, 645 bp, Homo sapiens
aagccatattcccatcccccagaggaggagcggttatgaatttctggcatgtttggggttcagagaatgttctcaaccagagtagataccaaactgagcaatactatgtcacaaaggggccgttttcagcactgtaaaatttccttatttcttctacaacttagagctggtgttaaggtataaggttatcagaaaagaggatttaagtccttctgggcacataattccagcataacatgaaaaatgtcaagtttgggatgggagaasagctgccaagtcagattagttcaattcttttctacctggcaactgttgacaattggctgctgtttgtcatagattcatggagaactgaaaaacaaacaagcaaagaaacaaaaaacagtctttctgaactaaatgcctcaagcttcaggtcattttaaaaggaaaaggctattttaatcaccctgtttggagttcggccctctgaaggccattttaaggtatcccatttaggctgtttatttcagtaaaaaaaaaaaaaaaaaaaaagctgagggtaaccagctctttgatagcatgtctatgagatttgtctcttgacttccttaaagctgtcttttctgagttagaaatactctccagaagaattgcctgtgaaat

SEQ ID NO: 751638 - DNA, 644 bp, Homo sapiens
ggtcaagagatcgagaccatcctgaccaacatagtgaaactccacctctactaaaaatacaaaaatttaactgggcatggtggcgcgcgcctgtagtcccagctactcgggaggctgaggcaggaggatcacttgaacccgggaggtggaggctgcagtgagccaagattgcgccactgcactccagcctggtgacacagcaagactccrtctcaaaaaacaaaacaaacaaacaaaaaaacatagacaagccttccagagatagagacttgccctctgatatagttttctctcatatccactctgcctggtcagcaagatacttaaaagaagggtttcaaagggagcctctctaactttgaagggcccaggagccaaaggagcgagccgtgagccctcagtttatttccaagcaagagcacctgagcagggaggtacccaatatactcttttccctgaccttggggtaggtccctgctgcaccactgcctggagacaaaggcttgatgttaggtctagggtgacagggaagaggcctctgaccactggtgacccttaacgtcaaagataggtaggaggaagaggtggaaaccaatacttaagatttagggaggcaggatccttgctagctccctgcatgaatc

SEQ ID NO: 751639 - DNA, 611 bp, Homo sapiens
aatttcagtaattataaactaatttgctcttctttttctaggtctaatttaaatattttcaaatatcttcagataatttgacagtttacttaactaatacatagtatgtttccttagactgtctgggtttcttacatagtcggtcattcaagagtgcttcaccccaagatggaatgaaaaaaaaaatccaagcaaacatgaaagtctctatttatagctaacagtgatcaagcagatatttttggtttgtgaacaaattatatgttcatattaaagttagtataattgtatcagagtaattattttagcatatgtttatgctaattattacattttcctatatcctagtagctaccttttaatcctgaattaagagaaaattatgagacaaaacatatgagtttaaagttagctatttagaaaatatacacttctaactattttttagatagaaactcttacatttytaacatgtaacaactatttatgagggattggaggaaaagaacagaagaatacagatcagtgggagattagagttatcctggcatttgcagcaatcctgtatgtctctggggatcctagtttgattaaagacaaaatatacaagg

SEQ ID NO: 751640 - DNA, 607 bp, Homo sapiens
aagcttagacatacatcagatttatcaccacagcaatacatcttctacataaccatcagaataatctttctaaaacagtcttgaccactaaatcattcactgattactcaaaatgcttcagtcatcccctataggaaaaggaataaataataaaacgcaacatccttagtcttatatacaaggcccttcccaacatggctttcatgttgagaaggggcttactatctcccatcatttccctaaatcggcttagaagacaggattgtttattcagtgatttagttatttattccttcaaacaagtatgtattgagggcctattatggaccatatatagtcttctagtagcwggaaatttaaaaaataatcaaagtatttttttctctccacaatggggtcaaggcttattggaaagacaaagataaaatacgaatggcaactcaagtacattttgtatgataattatgatgattctttaacccagatacccttttgcaactattcatttattcattgtgcatttattgagtgtgtactgttgagcctcatgagagcacctagagaaatcagtggaaatgcattgagcttaagttttccaatttaaccg

SEQ ID NO: 751641 - DNA, 600 bp, Homo sapiens
ccccactccactcccatttgctcttgcactgaaatgctccactcataaaaaaggacaacagaaaacaaaaaagagaaagtcaacaaaacaaagagagagaagatacaggttaaaagaggaaaggagaacagcatgagggtgaagatggacaggttcacagaaayggcaaactctaaatccctttcatgtgccagaggctccagtcaaactaagatttctcttttctgcacagacaaacagagtttttcaatcaccagtcttgcttatcctgtttcattccctccacttaaaatgtgcttctgcccatcactgctacacgtctgaatatcatctctctcctttgaggtccagggcacacacagccacctcctctatggcagttcctctgatctgttggctggaagcaatctggcacctgagaactttctagtctttatctgaactcctcctatcatccttaagacttcctacatttcaatcaaattacgtgcatatgtgttgtttcccattcttgactgtaagcctattgctggaagactccataactaacaggcttttgtgatcctcgatagtgccgagactaatcctgcacataataga

SEQ ID NO: 751642 - DNA, 489 bp, Homo sapiens
atctctattatttatgattttacaaactcattttaatggctggaaccaaatatcttatgaaaaaataatttttgcttaaggaaaatactttgctagacygcgttgactggagaaattaaaaccccaaaagtttggtgcataagaagacaaggaaattaagataactcaattgttctacctaataaattaagtttttggagattggagtaaagatgggatgaatctgaaatagggagagagagaagatgtaagtctaggagtctactcctcactaggactaatgttaatctattagtctctttatctttagtctcttctcacagggatggcttctacccctaatgttgtaaaaatgaccatccccctcctaagaaattcctgcccagccctgcttccactttaagtcttagccttatgtcttcctattcacttcccactggagctccttgagtcacccctgaggtggcccaggctctgggcttcattgta

SEQ ID NO: 751643 - DNA, 573 bp, Homo sapiens
taactgcaatatatatgaaacatctcagaaagaagcaccgtgattgaagcagggtgggaatccataacctcacccactccttgtccatctcagctctcagataccttggggaagccctgagtctccatgaggcacagatcaaaccactttcttatggcatgctggcttcagttacatttctcacacctccaaatgctctttatgtgaacaaataatctcttttagactgataaataattccaaatgtaaaagtgtgatctcagttctctcatttgctaaaggaagacaataatgatctctgccacagcaaaggaaatatccmttagaagttgaaaagataatgaaaatgagtagacattgtgatctcctccctcagcatcaatttcagccctggtccactgtagaactgctatgtggtttaggcaggcactgacgccagctccagcttcaaggtggtccagcactggtctaaagcagttagctataggtaaccactgaattggtaaatgtcaatagtagggtaactatatgatagttaattttgtaagtcaagttgaccgggcaacaaagatg

SEQ ID NO: 751644 - DNA, 620 bp, Homo sapiens
acatgggtggggcaaactaagaccctttcgctccccagggtgggccctagggctaaggaacggaagccacaggacttgatttcttccttttgtcctcctttctctccttcttccctttaaatggagaaaatggagacctggtaacttaagaaaattgggggataaaggggcctagggcggataagcagcagacactcagtaagactatgcttcaaaatcccctccttccctccctccatccatccttctgttcctcccattctttttttttttttgagacagagtctggctctgttgcccaggctggagtgcagtggtgcgatctccgctcactgcaatctctgcctcctgggttcacaccactctcctgcctcagcmtcccaagtagctgggactacagacacccaccaccatgcctggctaattttttgtatttttagtagagacaggggtcaccgtgttagccaggatgctctcgatctcctgacctcgtgatccgcctgcctcggcctcccaaagtgctgggattacaggcatgagccgccacgcccggccttcccattctttaattgggagtgagtgttctctctttggatccctgttatatcacacagctatca

SEQ ID NO: 751645 - DNA, 674 bp, Homo sapiens
agaccactaggccatgactatggcatagcttggtaccatttactgagcacctactatgtgccagacctcatgctggagacttgatatgcttttctcattggatctcatcagtaattctgtgagggaggtaccattactatttctattttacaggcgaggatattgaggttacaaaatttaagtgacttgcccaaggtcacacagttgtaattggcagagaccagtgggcttcaccactatgctcttctgccttccatgaaactttcgtttggtgtcttgacttggaaagggccccagaaagatgggcccattcaggaaccacttgctgaaaggtgtactctgcacatgtaacctgcttacttctagagcaggttcaggtgttgacttaaacccatcacaaggtctctggcctgtgactcctctcaaggctcccagtgggccctagaaaaactcagatctgtcagactgctcctgtgactggcacctggcctccaycggacaagccccatcctggctgaaaaccaccactgaggccaggctgcggtgggggaagaatgcatctgggttgggtcagggggaaagcggcacttcggcaccctagagctccacggctggggccatggggggccacgcagaaagggaggcactttgcttcctccagactcaacttcaca

SEQ ID NO: 751646 - DNA, 674 bp, Homo sapiens
agaccactaggccatgactatggcatagcttggtaccatttactgagcacctactatgtgccagacctcatgctggagacttgatatgcttttctcattggatctcatcagtaattctgtgagggaggtaccattactatttctattttacaggcgaggatattgaggttacaaaatttaagtgacttgcccaaggtcacacagttgtaattggcagagaccagtgggcttcaccactatgctcttctgccttccatgaaactttcgtttggtgtcttgacttggaaagggccccagaaagatgggcccattcaggaaccacttgctgaaaggtgtactctgcacatgtaacctgcttacttctagagcaggttcaggtgttgacttaaacccatcacaaggtctctggcctgtgactcctctcaaggctcccagtgggccctagaaaaactcagatctgtcagactgctcctgtgactggcacctggcctccatcggacaagccccatcctggctgaaaaccaccactgrggccaggctgcggtgggggaagaatgcatctgggttgggtcagggggaaagcggcacttcggcaccctagagctccacggctggggccatggggggccacgcagaaagggaggcactttgcttcctccagactcaacttcaca

SEQ ID NO: 751647 - DNA, 644 bp, Homo sapiens
ctggcctcttttttttgtatattacctgatctcaggtattctgctatagcaacagaaagacgaagacagaatccttagctgtctgcaagtgtgcatgccattttcatcctctgaagagtcagcgagtgtcttaggtggagtcttgcaaaagcaggccctgagccaaagatttggatgcaaatgacttgttaagaaagggctcttcgagaccgtgccattgcactccagcccgggcaagaagagtgaaactctgtttcaaaaaaaaaaaaaagtggggggctcctaggaaaagaacagtaaaggagtgggggatgaaggacagggaatgggaagaagccaagcgagagcatgatttcmgaagtcctacactcagcctgatcacacgggaagctttagaacaaagaacacacctcagagtttttcctgcctcaacacaaaggagctgggctttggtgctcttcatcagcctgtctttggctatccagggttgtggaacgaggtgaaacataaaactccgaggtacttccggctccctccagtgtctgagggtaatctgcaggactgagggtaattgcagatgctagctgttagcagcaaactatgcaaaagctgaggactggcttataaagccagatctgggtgag

SEQ ID NO: 751648 - DNA, 612 bp, Homo sapiens
agattaacctttcccctaatatgctgatcttttcgatagttcagtcaccaggtgactgtcgtggcgttgaaatgtgtctggtctttggctttatctatggcaaaaaaaaaaaaggaacttattagaaaaaaatcaatcactaaagattgctatgtcsaaagaaatacctttatttcctttgagtttataaccagacacctctggactaggtctctaaggtcataggcttttcccagctgatttgatcttcttagcttcctccaagctaaataaagctattgtctgcactttcaacttcataggcactctaggacaacattaatggctagagctttggcaaatcagtccctagattgggggtgctaaattggaagttctgtttctttattcattattctatggagaagagccttctcaggtatttggcatctggaagaaaaaaatatgcagactcagggaaagaagaaggatatatggaagtaatgatgtcttcagaaaatcttgttccttttgtaaaagttcctattagtgtgagcattcatccattcatttaacaaatatttattgagtgggtcaggcataatactagatattggggatgggagacagctg

SEQ ID NO: 751649 - DNA, 546 bp, Homo sapiens
gaattgtctattcatgtcctcagcccactttttgatgggattgtttgtttttttcttactgatttgtttcagtttgttgtagattctggatattagtcctttgtcagatgtatagattgtgaagattttctcccactctatgggttgtctgtttactctgtcgactgttccttttrctgtgcaaaagctctttagtttaattaagtcccaattatttatctttgctttgattgcatttggttttgggttattggtcatgaaatccttgcctaagccaatgtctagaagggtttttccaatgttatcttctagaatttttatagtttcaggtcttagatttaagtccttaatctatcttggttgatttttgtataaggtgagagatgaggatccagattcattctcctacatgtggctagccaattatcccagcaccatttgttgaaaagggtgtcctttccccactttatgtttttgtttgttttgttgaagatcagttggctgtaagtatttgggtttatttccggtttctccattctgttccat

SEQ ID NO: 751650 - DNA, 541 bp, Homo sapiens
tattcattgtgatatcccgaatcatgaagagtaataggtaatgtgcaatattgttttaaaaagattttcatactaccctttaaaattaaatctgtcagtattagagataagcttgattatgtagaaattagctataactaagatgatctgtagggactaatggaaaaaaagcaataagaggttattacaggtagacgagaaatagtcttattttttatgtttacaaaactgccttgtcttctagagggtaaagtagacataaatttgattctcatttaaatacttgcactgtcaaatatatcakaccatcacaagagaaacacacactgtcctccaaataaacaattctaatccactatacaatacctaattccattttcctactattgcccaatctgaaatcttcttctcttttctggcctgtactaataattcagtctaggcagggtcacatgtttgcaactgttagaatctgtgtctccctcctgctgattgttggtctttctctaataaactgtttatcttggccatattggctctg

SEQ ID NO: 751651 - DNA, 616 bp, Homo sapiens
cataagagaaagaatatttttacatattttgaagccgtatttggtttttgggtattttctctatcaggaaaaaatgtagtcactgaattatgtcatgagtaaaagaaagtttggtgccaagcaccatcttattataawttccaatatttttcattctgccttgccattcatggccaagaagaaattcctttgccatgaaaagcaaataaatatagatgaaaactgaaggataagaacgaggcatctaatacaagtattaaaaagttaataatttggattttatacatatggagtatgaaataactgtactatgagttgttaggattacagccattaataaaagttgaaaaaattgaagcagtagtaattttatctctaaaagcattccagtaggaaccctaaattctgaggggctcagtgtcccagtgtcttttctctgtctgtactctctttctccggctaatctcatttatctcatgtcccatgtcttaaatgcagtccaccaatgagaccctcattaataacaacctcttgcctgaacttcagaaatgtacatcacctacctatgtggcactttgacttaattgtaacaagcatttcaacttgaccttgtaac

SEQ ID NO: 751652 - DNA, 616 bp, Homo sapiens
cataagagaaagaatatttttacatattttgaagccgtatttggtttttgggtattttctctatcaggaaaaaatgtagtcactgaattatgtcatgagtaaaagaaagtttggtgccaagcaccatcttattataatttccaatatttttcattctgccttgccattcatggccaagaagaaattcctttgccatgaaaagcaaataaatatagatgaaaactgaaggataagaacgaggcatctaatacaagtattaaaaagttaataatttggattttatacatatggagtatgaaataactgtactatgakttgttaggattacagccattaataaaagttgaaaaaattgaagcagtagtaattttatctctaaaagcattccagtaggaaccctaaattctgaggggctcagtgtcccagtgtcttttctctgtctgtactctctttctccggctaatctcatttatctcatgtcccatgtcttaaatgcagtccaccaatgagaccctcattaataacaacctcttgcctgaacttcagaaatgtacatcacctacctatgtggcactttgacttaattgtaacaagcatttcaacttgaccttgtaac

SEQ ID NO: 751653 - DNA, 647 bp, Homo sapiens
cgtaacaagcccagagaaacttatttctctccgtgttaattggcattaaacttaaataatgtaaattgtattttcttagtataactaataatgttacattataatttgaaaaacaggcatcattaaaaagtaaagtgcacctagaaatttttttaagcatacaaaggcttacattttctcaaaatttgacacacacttgggttatartgcacaaactaaccttaaagtgtcatttgttgctatgtgattctgctacatatgactagcatacagcttagatcatatgtgatccacaacaattaactgtactataccctggtcagaaataatcccattgatcaaaaacctttatggcctggcaatgtgaaattgctgcagatattttgaaatgcttactctgaatgcttatatttatcttgccttagagctctccaccaatgccagtgcaggagatcatgctctgagcatccaaggtctagagggcggagcaaacatttaaaaaatgctgcaaacatgtctagctacatattatgatatcagtataaaggaaacatacagggtgatgggagcaaatattatagggatcctgtttacattaaagggtcaggaaaagtcctaaggaaagatgaatgggtgagggcagcctt

SEQ ID NO: 751654 - DNA, 643 bp, Homo sapiens
agtcatcatcagaaagatattaagtgtttggatggaagatcagaccctgaggaaaagaaagtgcttcttagagtcttacacgcaaactgtctgccacagagcgcaatttataagtatctcatttcaaccacggaagraaagaacgaagggtaaaatggagatacataaaataatatttatactctctggatctaatatgtcatctttataattttattttcatgagtaataaaaatcttaaaaacaaacttttattaacgaggttaacctgaaaattgtctcttcatcatctttcgtcccataaggtaaggatcacacgttggggcgccttcctgccacagccaggaaacctcagtaaatgacagctcttagttataaggtgttagagtgatgaggattgtgctaagtttgagagcacatgcccggttttttaaaattcaattttcttaaaccacttggtaaaccaaagaaataggtctgtgagccacaagcttttctcagtctgccagttttaacctctcaatgtcttaagttcctcagcagcaaactgtcctgccacaggggcttttaagttaaaaaaaaaaaaaaaaaaaaaaaaagaaaagaaaagagaaaagcactaaaatggaaatacaaacaaagc

SEQ ID NO: 751655 - DNA, 498 bp, Homo sapiens
agagggacctggaccctacctgctgtgggtggaggggccacctggaaagattgagggatgcaagcagcatctaggagcaaaggctaccctgggctgaccgccagaaaggaaacggagatctcattgctacaaccacaggaactgaattcagtgaataacctgaatgaacaaagacacacatccatctccaaaattttcaaaagggaatacagccttgtcagccccttgctgtcaatctgatgagactcaggacagagaaactagccaagcctacgagactctgacctgcagaactgtgagtygataaatgggtgttgtttttagctgctaagatggagactattcgttatggcagcaatagaaaactaatacaagagagttggcaagatggctgaataggaacagcttcagtctgcagctcccagcaagaccaacgcagaaggtgggtgattattgcatttccaactgaggtgcccggtttatctcactgggactggt

SEQ ID NO: 751656 - DNA, 623 bp, Homo sapiens
ctcacagtcatccataatggctggaatcaacttcttccaaattcctgttaatgttgatgatattttgacctccttccatgaatcatgaatgttctttttttttttttttttttttgagacggagtctcactctgtcgcccaggctgragtgcagtggtgcaatctccgctcactgcaagctccgcctcctgggcttacgccattctcctgcctcagcctcccgagtagctgagtctacaggcgcccaccaccatgcccggctaattttttgtatctttagtacagacaaggtttcaccatgttagccaggatggtctcgatctcctgacctcgtgatccacccaccttgacctcccaaagtgctaggattacaggcgtgagccactgcgcctggccatgaatgttcttaatggcatgtagaatagtgaatcctttccagaaggttttcaatatactttgcccagatccatcagagcaatcactatctatggcagctattagccttatgaaatctatttctgaaataataagacttgaaagttgaaatgacttcttgatccatggacagaatggatgttgtgttagcaggcatgaaaacaatgttaatctccttatacatctcc

SEQ ID NO: 751657 - DNA, 623 bp, Homo sapiens
ctcacagtcatccataatggctggaatcaacttcttccaaattcctgttaatgttgatgatattttgacctccttccatgaatcatgaatgttctttttttttttttttttttttgagacggagtctcactctgtcgcccaggctgaagtgcagtggtgcaatctccgctcactgcaagctccgcctcctgggcttacgccattctcctgcctcagcctcccgagtagctgagtctacaggcgcccaccaccatgcccggctaattttttgtatctttagtacagacaaggtttcaccatgttagccaggatggtctcgatctcctgacctcgtgatccacccrccttgacctcccaaagtgctaggattacaggcgtgagccactgcgcctggccatgaatgttcttaatggcatgtagaatagtgaatcctttccagaaggttttcaatatactttgcccagatccatcagagcaatcactatctatggcagctattagccttatgaaatctatttctgaaataataagacttgaaagttgaaatgacttcttgatccatggacagaatggatgttgtgttagcaggcatgaaaacaatgttaatctccttatacatctcc

SEQ ID NO: 751658 - DNA, 560 bp, Homo sapiens
aattttaaattatttgatgtggacacagtatcttttccttgaaaatgagacaaacactttaatgcccttggaggtttcctttaaggccacgtgcctacactatctatctgtctgtctgtctatttatttattattattttttgagactgagtctcgctctgtcacccaggctggagtgcagtggcatgatcttggctcactgtagcctctgcctcccgggttcaagcaattctcctgcctcagcctcccgagtagctgagattataggcacgtgcaaccactcctggctaatttttgtatttttagtagagatggggtttcaccacgttggccaggctggtctcaaactcctggcctcaggtgatccacccacrtcggcttcccaaagttctgggattacaggagtgagccagcatgctcggttatactatctatttaaagaataattgtaaacatgtagtaactaaaaataagagtttattaccaagatatatgattttatttttgaagctaagtagcttacaaatctgtgttctctacactctttcctcttcgtttta

SEQ ID NO: 751659 - DNA, 560 bp, Homo sapiens
aattttaaattatttgatgtggacacagtatcttttccttgaaaatgagacaaacactttaatgcccttggaggtttcctttaaggccacgtgcctacactatctatctgtctgtctgtctatttatttattattattttttgagactgagtctcgctctgtcacccaggctggagtgcagtggcatgatcttggctcactgtagcctctgcctcccgggttcaagcaattctcctgcctcagcctcccgagtagctgagattataggcacgtgcaaccactcctggctaatttttgtatttttagtagagatggggtttcaccacgttggccaggctggtctcaaactcctggcctcaggtgatccacccacgtcggcttcccaaagttctgggrttacaggagtgagccagcatgctcggttatactatctatttaaagaataattgtaaacatgtagtaactaaaaataagagtttattaccaagatatatgattttatttttgaagctaagtagcttacaaatctgtgttctctacactctttcctcttcgtttta

SEQ ID NO: 751660 - DNA, 626 bp, Homo sapiens
cctcttatatgggatattttctctcgttttcctaagaaaattttatgcatcatttttagacacatcttccaggacctgcctctaaaccaaattaggcacatcttcctctgtgcaccttgcatttagtcacatctccctctgttgcaccttgctcaggggtttgcactataactttctaattacgtgtgcttttcccctactagcatgatgcatttttaattaarggcacaactctctgtggccctgtggcctcaaattgtgcacacaatacaatgataatccaatggtgatgagatgagaacaagaaggcaacactaacggagtcccatcaacaggcagaagaggatcatttgtaatatttctcttcattctattattgttttcttagagcctttacaatatggaatcatctatattatccagcacaagcaagtctgccgatttcagatgagttatattactggcaaagatgaaagaggagtaatgacaagttacatcagattttctattagaaacaaaatcacaaaaagcatttggctcttgataaagtgtgtgttcccagcttttttaagatcaaaaaagataataaagtataaacttgatacaacgtattcatggcagaaagc

SEQ ID NO: 751661 - DNA, 596 bp, Homo sapiens
aagacttgtcttcttcgttaacctgctcctcctgtttcatcctgcaaatgtttaaatctgaggggtattatccacagctcatctccacttttctaatctgacagcactgataattgaattcctcagaagcaagatgtttctctggcacccagaggcctcagcagtgtcacgacagctgaagtgtcacttattcctcatcctgggcacaccatgatggagtgcagccccactgattgggacccatgcagccagcctggcccagggccactctctctcccagaatgtgcacaagtcaagggrtctctacttccatccttattttcctcaaaagctggtgccagcagtaatcaaccagacttctagaaaagaggagataatctgctctcaaggctgctgtgggctccagtgttgtaatctactacttgaatctagttgtttatttcattctataataatttaatacagcagatgtcaggagaaatctttgtttagatattatgtcatatctggatatatctgaatcctgaatgattaatctaaatattaacaatattcacttctgccaatgtcaagagtattttctgctactgggctta

SEQ ID NO: 751662 - DNA, 596 bp, Homo sapiens
aagacttgtcttcttcgttaacctgctcctcctgtttcatcctgcaaatgtttaaatctgaggggtattatccacagctcatctccacttttctaatctgacagcactgataattgaattcctcagaagcaagatgtttctctggcacccagaggcctcagcagtgtcacgacagctgaagtgtcacttattcctcatcctgggcacaccatgatggagtgcagccccactgattgggacccatgcagccagcctggcccagggccactctctctcccagaatgtgcacaagtcaagggatctctacttccatccttattttcctcaaaagctggtgccagcagtaatcaaccagactyctagaaaagaggagataatctgctctcaaggctgctgtgggctccagtgttgtaatctactacttgaatctagttgtttatttcattctataataatttaatacagcagatgtcaggagaaatctttgtttagatattatgtcatatctggatatatctgaatcctgaatgattaatctaaatattaacaatattcacttctgccaatgtcaagagtattttctgctactgggctta

SEQ ID NO: 751663 - DNA, 476 bp, Homo sapiens
attcttttttttttttttttttggtaatgatacagttttcccccttattctgtgaatatagtgaactacattaattgatttcccaatttaaacctattttggattccttacgtaaatcagacttggttgttatgcattatcctttttatatattactggatttaatttgctgaatttttaatgtatttttatgactactgaatgagagaaattagtctatatatatwtttttttcttgcaatgaaattgtcaaaattgtcctcatacaaaagttagaaatatttcctttttttcccccagtgttcaagagtttgtattattaattttctcctggaaccaacttctagctttattaattttctctattacagtatgttttccatttcattactttctgcctttttctttattactttctttcctttctttgcttttaatttgctggggttatttattttattagtctttgtgacttt

SEQ ID NO: 751664 - DNA, 505 bp, Homo sapiens
gccactgcattccaacctgggcgacagagtgagactccatctcaaaaaaaaaaaaaaaaaaaaaaaaaaaggaagaagaaagggagagagagagaaaaaaaaaaaagaaagaacaaaccatgggagcgagtgactgaggtagggtcttaraaaacaagatctttggcagagaggacaccaaggaactgagataccagaatgttagaaagataatctatgtggatattgaaatcacaggaattatgatgaatgacagagggccagaagtgaaatctttaaagagtaaggagaataatccagggagtctgtagatgattgcaggaaggaggggagtagcttacactgagattcaaaactgggaggcttttattttcagggaaggtagggcacaggggagagaatgaatagcttataaatagtagggaggagcaagaaggacaccttctccacctccagggcaagtagtagtacaagagctgtgggagagaacagagctaccatttga

SEQ ID NO: 751665 - DNA, 594 bp, Homo sapiens
agttcatttaggcagtgatatggtttggctgtgccaccacccaaatctcatttcgcagttccaacaaaccccgtgtgttgtgggagggaggtaaatgaatcatgggggtagtttcccccatgctattcttgtgatagtgggtaagttctcatgagatctgacagttttttatttttttgagagggagtctcactctgtcgccagrctgaagttcagtggcacaatctcagctcactgcaacctctgcctcctgggttcaagcgattctcctgcctcagcctcctgagtagctgggactacaggtgtgtgccaccacacccagctaatttttgtatttttagtagagaccgggtttcaccgtgttggccagaatggtctcgatctcttgacctcgtgatccacccgccttggcctcccaaagtgctgggattacaggcgtaagccactgcacctggccacgatctgacagttttataaggggcttccccctttacttggttctcacttttctctctcctgccaccatataaagaaggacgtgtttgcttccctttctgccataattgtaagtttcctgaggcctccccagccgtg

SEQ ID NO: 751666 - DNA, 491 bp, Homo sapiens
ggcttgggcttcgagagaatttgagtttctttctgatctcgggaaatcaacttaacctttcaggacttcagttactttatctgtaaaamagaaaaaatactctcctcagaagacttttactgggaaaagtaaatgcacacaaagcacttagcacattgcttgcctgagtgccttgataaatgtttcttccttcctcaaatctgaaccaacgtatttaaaaagctgtctacttgagaagcctaaaattgtagatcttaaatatctttttgaagaataagaaatcatgaatactaccctaatatttaactcagtttgtagtattttggaggaaaaacaaatcacagcatatttaatatctttaagctcaatcatgtaaaaggagttctgtacacacagtttccagaatgaaagtcttccatttcttgtctgtgtttacaactttcaaaaagcttaatttaatatgttcaatatccaaaagattattttaaaat

SEQ ID NO: 751667 - DNA, 549 bp, Homo sapiens
cgacacttcttaatctatgtaagaatgctgctgagaaaactgtaattcctgggtagcaagtatggtggttctaatggatgaggattctaaagtccccataacaataatagatttctttctgccacagattctatgacmtagattcttatttatcttccctctgcctcctcattttttagccttatttctattctttattcacgtctttccttcattcacactctagtgaaatataggcattttctagatctccatcattagaaataaattctcttttcttagattttcaagattgccaccatcatcacaactgttctaacaagcatttcttggtctgtttggtctgcccaagttaatcacctcctgccagtccaccattttttctttgctaaatgaattatgatcatgtcaccctcctatataaaacttctcattagtttcccaatgttttaagacatactcagtagtctacgctgttcaacaaagctctacggtttctattccttctcttgagccttgtcttgcaacatcctgccccacactctctct

SEQ ID NO: 751668 - DNA, 676 bp, Homo sapiens
tgagatttgtgaggatccaaaactcagcataaggtgtttgtcttagaaagtaaagggccaaatatgatgataagtcccaactttaaaataaaaatgatgcggccgggcgtggtggctcacgcctgtaatcccagcactttgggaggccgaggcgggcggatcacgagatcaggagatcaagactatcctggctaacacggtgaaaccccgtttctactaaacaaaatacaaaaaattagccggggtggtggcgggtgctgtagtcccagttactcgggaggctggggcaagagaatggcatgaacccgggaggcggagcttgcagtgagccgagatcgcgccactgcactccagcctgggtgacagagcgagactccgtttcaaaaawaataataataataataataataaatataaataaataaataaaaatgatgctaagaccaatgcatccaaacaaaagtatgcatgtttattatttcagtttttatgtagatagtgttaaaaagcaaaacagcatgctttaaattaagatctagctaatgtatagattttgagatttactgatggctaagagtcctattattagtgtattttatcctagatatctattaataaacatgatttgtgggtaaataattcacatatatgccgaattatgagaaatttgagggag

SEQ ID NO: 751669 - DNA, 512 bp, Homo sapiens
cctgggagtctagaatggactgccagtgaccttcatgtgaccgtgagggtctttttgcttccgaggatccttgggtcgctcagtagggatgtgagtgaggagacgctgctggggcctccacgcccgatgtcggtggttctcaccagaatgcctcggctgcatgacatatagctctcttataaagttggagtttcctgttccaaaacgttcagatttcttgcactttctccttgtgggtggaggtgagggcacgtttctggcctggtagacagaagctgacatcaccacacaccccaggcctgagtctgcgaargagaggccaagagtgtggccttcaagggcacctcatggcatgggtggagcacgatgctggaatccacgctgtaccccttgtcctttcctttattcattcactccacaaagaattactgagcacttcataggtggcagttgctgtactaggctataggtcaaccctggtcggcaaaacagacacaatgtctggtcacttg

SEQ ID NO: 751670 - DNA, 512 bp, Homo sapiens
cctgggagtctagaatggactgccagtgaccttcatgtgaccgtgagggtctttttgcttccgaggatccttgggtcgctcagtagggatgtgagtgaggagacgctgctggggcctccacgcccgatgtcggtggttctcaccagaatgcctcggctgcatgacatatagctctcttataaagttggagtttcctgttccaaaacgttcagatttcttgcactttctccttgtgggtggaggtgagggcacgtttctggcctggtagacagaagctgacatcaccacacaccccaggcctgagtctgcgaaagagaggccaagagtgtggccttcaagggcacctcatggcatgggtggagcasgatgctggaatccacgctgtaccccttgtcctttcctttattcattcactccacaaagaattactgagcacttcataggtggcagttgctgtactaggctataggtcaaccctggtcggcaaaacagacacaatgtctggtcacttg

SEQ ID NO: 751671 - DNA, 549 bp, Homo sapiens
tgtggccttcaagggcacctcatggcatgggtggagcacgatgctggaatccacgctgtaccccttgtcctttcctttattcattcactccacaaagaattactgagcacttcataggtggcagttgctgtactaggctataggtcaaccctggtcggcaaaacagacacaatgtctggtcacttgaagcttccattctactgagagagacagagcgtgtatacctaggcaaacacagmccaatgtcatggagcgttgccataaattccatgaaaaagaggcgcgacacaccacagacgagaaaaggaagggatcaggggtcatccctgctggcgatggcaggggtgaaagctcaagggtcaggcggtgcctctctaaggctgtggcattagccagaatgacagagaagggaaggggtgggtcccagcaggggacagaatgtgtgaggcccgactggagaaatgccttgatggggtggaggaacccaaggaagttaaggaggctccagtggcaggtgatggggggagactggggtgggatgaggttggg

SEQ ID NO: 751672 - DNA, 549 bp, Homo sapiens
tgtggccttcaagggcacctcatggcatgggtggagcacgatgctggaatccacgctgtaccccttgtcctttcctttattcattcactccacaaagaattactgagcacttcataggtggcagttgctgtactaggctataggtcaaccctggtcggcaaaacagacacaatgtctggtcacttgaagcttccattctactgagagagacagagcgtgtatacctaggcaaacacagcccaatgtcatggagcgttgccataaattccatgaaaaagaggcgcgacacaccacagacgagaaaaggaagggatcaggggtcatccctgctggcgatggcaggggtgaaagctcargggtcaggcggtgcctctctaaggctgtggcattagccagaatgacagagaagggaaggggtgggtcccagcaggggacagaatgtgtgaggcccgactggagaaatgccttgatggggtggaggaacccaaggaagttaaggaggctccagtggcaggtgatggggggagactggggtgggatgaggttggg

SEQ ID NO: 751673 - DNA, 632 bp, Homo sapiens
aaattcttataacatctgtgaattttttttacctgccaaacagatgggaaatgagtcattcttcaccaaccattctacttttaaggatgtttaatgagagattttttgaactacttatcaggtagatttctacaaatacaaaataataatgtaaaarcaatccacatttatttgtttttttctttgtttttacttgacaagtggcaatatcatgcttgtcattttaatttagacacaattattaggttatatatcatattaacaatatttaagttattttgttttatgtcctttaagatacattaaaacacacacacacacacacgcgcgtgcatgcacacacacacacaccaactgaatgggagaaaaagcatggaacccaaccaaatttccacacttcagtaatatgtcattcattcttttaataaagctttaagaaatgtcataacgacatgagcttgaaacatctctaggcattttctttgaggctcatgatgtggcactggtgacgtaaacagcagaaaacaggggctgccaaatgaccaaattatggaggctcagggctgctttttcccacaggaacacatcaaatggtgatggcagtgatctcacacactgaagaggagtgacat

SEQ ID NO: 751674 - DNA, 632 bp, Homo sapiens
aaattcttataacatctgtgaattttttttacctgccaaacagatgggaaatgagtcattcttcaccaaccattctacttttaaggatgtttaatgagagattttttgaactacttatcaggtagatttctacaaatacaaaataataatgtaaaagcaatccacatttatttgtttttttctttgtttttacttgacaagtggcaatatcatgcttgtcattttaatttagacacaattattaggttatatatcatattaacaatatttaagttattttgttttatgtcctttaagatacattaaaacacacacacacacacacgcgcgtgcatgcacacacacacacaccaactgaatgggagaaaaagcatggaacccaaccaaatttccacacttcagyaatatgtcattcattcttttaataaagctttaagaaatgtcataacgacatgagcttgaaacatctctaggcattttctttgaggctcatgatgtggcactggtgacgtaaacagcagaaaacaggggctgccaaatgaccaaattatggaggctcagggctgctttttcccacaggaacacatcaaatggtgatggcagtgatctcacacactgaagaggagtgacat

SEQ ID NO: 751675 - DNA, 632 bp, Homo sapiens
aaattcttataacatctgtgaattttttttacctgccaaacagatgggaaatgagtcattcttcaccaaccattctacttttaaggatgtttaatgagagattttttgaactacttatcaggtagatttctacaaatacaaaataataatgtaaaagcaatccacatttatttgtttttttctttgtttttacttgacaagtggcaatatcatgcttgtcattttaatttagacacaattattaggttatatatcatattaacaatatttaagttattttgttttatgtcctttaagatacattaaaacacacacacacacacacgcgcgtgcatgcacacacacacacaccaactgaatgggagaaaaagcatggaacccaaccaaatttccacacttcagtaatakgtcattcattcttttaataaagctttaagaaatgtcataacgacatgagcttgaaacatctctaggcattttctttgaggctcatgatgtggcactggtgacgtaaacagcagaaaacaggggctgccaaatgaccaaattatggaggctcagggctgctttttcccacaggaacacatcaaatggtgatggcagtgatctcacacactgaagaggagtgacat

SEQ ID NO: 751676 - DNA, 312 bp, Homo sapiens
ttctgaatccccactacctcccactccttccacgcagtcccttgcttctatacaaagggctcccagcatctcacatgtttgcaagtgaccacagtgatcctgctggctccccagggcatcatttttctttgccacttccaaagcttgccagcatcactgaragcatgtcattaaccaggggtgcctctaggtccttgtgcagagctcttggccccagggtcaactgtctgtcctagggcatgatgggcagcacaggctctctcatgagggttcctgacccttgtggcagactctgagctgggatccttgttg

SEQ ID NO: 751677 - DNA, 637 bp, Homo sapiens
ctctcctggaacaactaggccaactccagctcctgccccacccacctgagtctggccaggcagcccgagcccagcgcccagagctctccttgaccatgacctcatccccaaaccctccaggctgggtccctgccctccaccgcatgaggcacggaaagaaaggagaagggaaggtcccagttcaaatatcagggtgcctgtgctctctccaagacaacctccctgtgccacccctagggagggtctcccatgtsatggacagccgcacagctctgctgagctgccccccacagcagtgggcccagccctgggcctgggggacattttcataatactgatgcccagccatcgtgccctcacctctggaatcctcacctccaattggaggggaggtgaagcagaaggcacggatctttttagaagttcctcagatggcttttaaaagttcctgcatcttgtcatcaggggcctctgcactctgcggtataaattatggggacagggaagacacacccctgccctcactgaactcccagccactctggtggttcctgttcacacaacctcacatatatgaggcctcctcagaaggctctagggcaatgaggaagacagggctgggggtcagccctggtga

SEQ ID NO: 751678 - DNA, 452 bp, Homo sapiens
tcgttatggaaagatatcgaatggaatggaattgactcgaatggaatggactggaatggaacggactcgaatggaatggacaggaatggaatggattgaacggaatggactggagaggaatggactcgaatggaaaggactggagtggactctactcgaatggaatggaaacgaatggaatggaatggaawggactttaaaggaatagaatggaacggaattggatagaatggaatggaagtaaatggagtggaatataatagaattgaatggaacggcaacgaatggaatggcgtggaatggaatgaaatggagtggaatagaatagaatggaatggactcgaatgacatggactctaatggaatagaaatgaatggagtgacatcgaatggaatggattgcaatggaattgaatggaatggacccaaatataatggactcgaatggaatg

SEQ ID NO: 751679 - DNA, 627 bp, Homo sapiens
agtggaatggaatcgaacggaatggaccggaatggattggactggaataaaacggactcgaatgtaaagcattgcaatgcaatcgattcgaatggaacggaagcgaatggaatggaatggaacggcatgcgccggaatgcaatggactggaatagaactcgaatgcaatggattgcaatgtaattgattcgaaattaatggaattgaatggaatgcaatcaaatggaatggaatgtaatgcaatggaatgtaatagaatggaaagcaatggaatggaacgcactggatttcgagtgcaatggaatctattggaatggaatcgaatggaatggtttgtcatggaatggactcaaatggaatggacagtaacaaaatggaatrgaatagggattcgaacggaatgcaatggaatggaatggactcgaatggaatagagtcgaatggaatggagtcgaatggaatgtaatcaaatggaatggaatcaaatggaatggaattgaattgaatattaaggagcagaatggaatggggtgttatcgaaggatatcgaatggaatggaatggagtggaatagacttgaatggaatggactggaatggaatggaatcgaatggaatggactggaat

SEQ ID NO: 751680 - DNA, 617 bp, Homo sapiens
gaaacttgccccatcatgcaataattctactataaatctataataattttagaaagaaattttctgtgctgatttctataatttgggtacaactctgctgtacacatgggtggtataaggcaccctcgaaatacatacwtttgatgtaaattgaagccttgtctctaataatcgtcacatttgcagtgacataataattttgcttcttaaaatttaggatgggaggtgatttgaaggcccaggcagaactatttaaaaactattccttaaagttgcttcaaaagccctcttagtagatgctgaacacctgcttgtcttggattctgatcatgtttctctctctctgaaaagtatgattgggaggaaaacctgacccagtgttttgctgctttgcctttccctgtgcttctagctattcaagactctgcccactctgagagtaaatgaaggcaaacagaccacaatgagtgatggtgctcagtgagcttcccacttcactggaaaccatggaatcaacgccagctcatgaggactttctcaaaggcacttctcaaagaaactttaaaacaagcaggggataaagttgagacctgaagttgagggaataaataaatctg

SEQ ID NO: 751681 - DNA, 599 bp, Homo sapiens
gcttaagtaaattgccttccgctttgactattccaatgcgtatattttggtgtatttatacaaacaagcaaataaatgtctcattacattttagtttatttgtgtactctagataaaaggctcttttgttatagttttggtaagaaaagtctcctgatctcaaacaccctaatgagtgctttaagttcctttttttaaaaaattattattattatggatatctattagttgtacatatttatggggtacatgtgatattttgatacaaacatacaatgcataatggtcaaatcaaggtaattggggtatccaccacctcaagaatgtatcatttctgtgtgatagaaacattccaatttcactcatttagttattttgaaatatrcaataaattgtttttaactatagttaccccattatactatcaaacactagatcttattccttctataactgtatttttgtgcccattaaccatgccctcattatccccctcttcccactgcccttcctaacctctggtaaccattattctactctctatgagttcaatgtattttttagttcccacatatgagtgagaatatgtgatatatgtc

SEQ ID NO: 751682 - DNA, 619 bp, Homo sapiens
aatccatttcaaacagctattgagtgcctccaatggcaaaactctgtggtagacagaggattaaagtggcagataagaggcaagactagcttgcacctccccacttggacagagcagcatgtggagactcacattgtgaacttttgtcccaaaaactaccacaggaacataccaggaaagccgagagaatccacagaccctttgaagaactggatcacttctatgggttccctgagatgccraaaacctcttagtcggcttgctttctcaatggggaggctcatggtctggggcaagttctcagccctggtcactggctgcctgcaaatagacttggtgctgttgtgggggctcggtgagagtaagaccaaactttaggactgtaggctgtgtgggagcagggtgaggcctgtgactgctggctttcccctacttccctggcaacctgtatgactcagcagaggcagccataatccccctgggaatataactccactggactgggaaccacagccccattgcccacagcagctgcagcaagacccacccaaggagaagctgagctcagacacacctattcctgcccctacctggaggtctttctctacctgccctggta

SEQ ID NO: 751683 - DNA, 520 bp, Homo sapiens
cctaggtttcaagcacaaaactgagcagctgtttgggcagaaaaggagctacctgcaggagttttttttcataccccagtgatgcctggaatgccagtgagacagaactgtttactcccctggacaggaggctgaagccagggagccaggtggtcttgcttagcagatcccacccccatggagcccaacaagctgagatccactgggatgaaattctcaattgcagcactgcagtctgaagtcgacctgggatatttgaacttggtggggagagagccgaggcttaagtaggtggttttctcctcacattgtaaacaaagcctccaggaagttcgaactgtgtgtggaacccactgtagtgcagcaaagccrctgtagccaaactgcatctctagattcctcctctctgggcagggcatctctgaaagaaaggcagcagccccagacagagacttatagataaaactcccatctccctgtgacccagcacctgggggtaggggcagcagtgggctcacct

SEQ ID NO: 751684 - DNA, 640 bp, Homo sapiens
attttttgtgtgcaagtgtacttggacaaatgagagatatttattcatttatgaatttataattgttgtactacagaaatctgcctatagaccatagatgttgaacttggagtttgatgtaataaataaatggaaatttatgttgccatgttttgggaaggactgaattaattctaagaataaagacaagagtgacgtgtatctgaagatcagattgttatagaaagtgagaactggcctttaaatttattcttccatttcactttgaaaaaataacttgactatcttcacactcttttgcatttagatgttgccatgtggctgagttctagccaatgaaacttgaacaaagtatttttgcygctttcagacctgcctctaaaacttgtgctccaccattaccccttgctcaggtggcatcagcattgataattcttagtgttattttggaagccacatactgaagactacagagcctgcagtagcctagtacttgaataacttcacagaaaagaacacatacatcacaaccaattgccaaccccaacccccaccccatctcaagatctgcatctacttggactgctatgaacaaccaatgcatgtaaattgtgttaacttataatatttgaggctgctt

SEQ ID NO: 751685 - DNA, 634 bp, Homo sapiens
aattcaataattcccttccagacatgaattttatttccttttctaggtccttatttttcttttcccatctcaccaatctcttcctgtcccctggttcctccctgtgacccaaatgtcagcttagagtctctagtttttgatattcaaatgaagagactcctgtcccacactacatgcagtgagactgatacattccaccttattcaccggttatgggaggaggaaggatgatgatttctgctatctttagttgcctmtgcctctgaatctactcaagataaattcagataagttagcatagtttgtagtttgtcttgtcattgtacacaagatgtcctggctcagcttcggattgccccaggcatggaacacagcttcctttccttattttctcatgccctccaccctcagcgctccccaggtatcactcacgttaggaatgtgtggtggagcagaggaccagagataaggaaggcacagagagaaacagaaagcacttgagagctacaggaggatcccctcaaatcctgaacattaacctgcgcatacgttgggtgaaactcctaaggctggacatgaggtattggtagagcctttgaaaggacatgctgtagtagtaaggctaaattaatgc

SEQ ID NO: 751686 - DNA, 616 bp, Homo sapiens
tgaattttatttccttttctaggtccttatttttcttttcccatctcaccaatctcttcctgtcccctggttcctccctgtgacccaaatgtcagcttagagtctctagtttttgatattcaaatgaagagactcctgtcccacactacatgcagtgagactgatacattccaccttattcaccggttatgggaggaggaaggatgatgatttctgctatctttagttgcctatgcctctgaatstactcaagataaattcagataagttagcatagtttgtagtttgtcttgtcattgtacacaagatgtcctggctcagcttcggattgccccaggcatggaacacagcttcctttccttattttctcatgccctccaccctcagcgctccccaggtatcactcacgttaggaatgtgtggtggagcagaggaccagagataaggaaggcacagagagaaacagaaagcacttgagagctacaggaggatcccctcaaatcctgaacattaacctgcgcatacgttgggtgaaactcctaaggctggacatgaggtattggtagagcctttgaaaggacatgctgtagtagtaaggctaaattaatgccagagt

SEQ ID NO: 751687 - DNA, 634 bp, Homo sapiens
aattcaataattcccttccagacatgaattttatttccttttctaggtccttatttttcttttcccatctcaccaatctcttcctgtcccctggttcctccctgtgacccaaatgtcagcttagagtctctagtttttgatattcaaatgaagagactcctgtcccacactacatgcagtgagactgatacattccaccttattcaccggttatgggaggaggaaggatgatgatttctgctatctttagttgcctatgcctctgaatctactcmagataaattcagataagttagcatagtttgtagtttgtcttgtcattgtacacaagatgtcctggctcagcttcggattgccccaggcatggaacacagcttcctttccttattttctcatgccctccaccctcagcgctccccaggtatcactcacgttaggaatgtgtggtggagcagaggaccagagataaggaaggcacagagagaaacagaaagcacttgagagctacaggaggatcccctcaaatcctgaacattaacctgcgcatacgttgggtgaaactcctaaggctggacatgaggtattggtagagcctttgaaaggacatgctgtagtagtaaggctaaattaatgc

SEQ ID NO: 751688 - DNA, 484 bp, Homo sapiens
gattcagaataatcgaaccaatctgcaagtaatttaactgtgtgccataacaaagaccaacactctttaaagaaatacaactaaatcacaaaaccaacaaatacatgagacctgacatccaataaaaaatttcccagcatgcaaaaaagaaacatgaaaatataacccataataaggagagaaataaatcaatagaaaaagactcagaaatgacattaataaaggkaatagcagacaaggaacttgaaatagctattataaatattcaaaaagatatataataaaacataaacatgataaaatacaagatatttttaaaatatctaaatgaaacttttaagatgaaaaatatatcaaaaatgaaaaatacgctagatgagattcagaaccatttagacaccacaggaaaaaaacagtaaacttaaaaacatagcaatagaaaccatccaaaatgaagcacatatagaaaaataaagactgaaac

SEQ ID NO: 751689 - DNA, 484 bp, Homo sapiens
gattcagaataatcgaaccaatctgcaagtaatttaactgtgtgccataacaaagaccaacactctttaaagaaatacaactaaatcacaaaaccaacaaatacatgagacctgacatccaataaaaaatttcccagcatgcaaaaaagaaacatgaaaatataacccataataaggagagaaataaatcaatagaaaaagactcagaaatgacattaataaaggtaatagcagacaaggaacttgaaatagctattataaatattcaaaaagatatataataaaacataaacatgataaaatacaagatatttttaaaatatctaaatgraacttttaagatgaaaaatatatcaaaaatgaaaaatacgctagatgagattcagaaccatttagacaccacaggaaaaaaacagtaaacttaaaaacatagcaatagaaaccatccaaaatgaagcacatatagaaaaataaagactgaaac

SEQ ID NO: 751690 - DNA, 545 bp, Homo sapiens; identical to SEQ ID NO: 739017

SEQ ID NO: 751691 - DNA, 545 bp, Homo sapiens; identical to SEQ ID NO: 739018

SEQ ID NO: 751692 - DNA, 655 bp, Homo sapiens
tttgcatctgatagaatcacttcacttggggaggcatttgtttggttggttgtttggttggttttttgagacaaggccatactctgtcacccaggctggagtgcagtggcatgatctcagctcactacagactcaacttcctaggctcaagcaatcttcccacctcagcctcccaagtagctaggactacaggcgcaccarcacacccggctaatttttgtaccttttggagagatagagttttgccgtgttgcccgggttcacctggggagcttgtgaaaacttttggttctatatccccatctttggaaattcttatttaagtggcatggggtggagtccaggcactactgtttgtttgtttttttaagctcctgaatagttttaaattttctgccaaatttgagagatggctgagatagtcaatatgactatcatccagtatctgcctagactcccagaactcttgcagactgggctagatgtcctctgccctttgcccacttctgttgccaccctcatcacaaaagtgaaacatgatagttagatgggcttcctatttcatttctgcatcctctgataatttgcatcagaaagattgcttcctggaagtgccttgcagattgtcagtctctctgtaactagtcagtttaat

SEQ ID NO: 751693 - DNA, 613 bp, Homo sapiens
tagcagttattaacgctgtattagacattgagcatacaaggatgagaaaatacctctgtcctgtggaactcagaattgacaatgagaggaaggagttgaggactgagaataagaaaataaccaagagaaaataaggtaaatgctacagaagagtcatgtggaaggggctgccttgactcccaagagagctaagttaattctgcataatggagtaatatctgaggtcagaaagccaagacatgtagactaacaacatttaacaaggaagaaagagctaaatgtctcaagagaggatggaggaaagtgggaggtttttgttttttgtctgtttgtttgtttgtttttccgagaggtgtccaagagggatccaatgccacgggatatccaattacacttcgacaaggtttatgactggatgtgaggatggtaaaagggttcyattatgatagaataaatccagtaaatagtgtctgtgtttagatccccaggacacagtgtttgcctttgtttaatggtttaactttttacttgttttccctttctttttttttttttttttttttttgccttttcgtagccagaggaagaatttgcagcagccagcacaccagcg

SEQ ID NO: 751694 - DNA, 518 bp, Homo sapiens
tccatcaatttttaaaaaaatcaatagcttagtcaaaaaacaatatgttcatctacaaccgtctgacctttgacaaacctgacaaaaacaagcaaagatcaaatgattccttgtttaataaatggtgctgggagaactgactagccatatgcagaaaactgaaactggaccccttccttacaccttatacaaaaattaactcaaggtggattaaagacttaaatgtaaaatcaaaaccataaaaaccctagaagaaaacctaggcaataccattcaggacataggtatgggcaaagatttcatgacaaaaatgccaaaagcacttgcaacaaaarctaacattgacaaattggaattaaactaaagagcttctgcacagtcaatgaaactatcatcagagtgaacaggcaacctacagaatgggagaaaatttctgcaatctaaccatctgacaaaggtccaatatccagaatctacaaggaacttaaacaaatttacaagaatgaaacaaaaaaccc

SEQ ID NO: 751695 - DNA, 612 bp, Homo sapiens
agatttaatgacaattttataagtttaatatgtaaattagtagatgcaaatacgtacaaggacacagacctgcaaaaaggacacagactgattcccttccagaaatctccaggccccagcgcagatgtgcactttggaaacttggggttgccagactccacttgctgtcaacattgtggcttcatttcagctgcgatataagcaaaattactgtaaaggggattatccattcctctacccaccagcgtctgcatcccaagtccttttaagccaaaatgcctgatatatgtaaatgtatgcttgctgctcgttcctgtttccctgttctctttctttaagctccctccaaactgacttcattcttaaggaataatgagcaatgtagaatattgtasaattcacagagaaggcagagaagaagactgatgtttcacagtgcacaggccctcatctcaaatcctcccgtgagaggatgctttttccatacctgtttctacgtcacagctttgcaccttctcacacgcagcctcctggccatcacctcctgcctccctggagcaattattctctggggcctcttaaactctcctcttctttgagcaattccctgat

SEQ ID NO: 751696 - DNA, 607 bp, Homo sapiens
cttccttggctcctcacatattctaaagcaccccccaacaactatactcagcccaagagttaacagcattccttaagagcccttaaaccccttttttttttcactttgaaaatgtaagttgatggaatcctgctcgtttacattctgtgtattttctgacaggacccgcaagtattttcaaaggctccactctgagttagaattagcacattagggacagcagattcactgttaaggaggaggccccacctctggctcatttttctttccttaccttgctcagaacaggattccccacataccaactggccagctgacactgttgcacatttgcacartcattcattcattcattcaaatatttactgtgctcttattatgtatgtgtcaagtcccgggccgggatctgaaagcccaaaatgaatgttgaatcagtaactccagcctcattcatctatcagttgtgtcaccttggacaagtaagctaattttcctgagcctcagtttcctcaactgtaaaatgtgggataacaatagtctctgcctcacaatattaaataattgtacatacttcccaaattaagtgtaataatatacataaagaaca

SEQ ID NO: 751697 - DNA, 605 bp, Homo sapiens
atcccagcactttgggaggccaaggcaggcagatcacctgacatcaggagttcaagaccagcctggccaacatagtgaaacgctgtctctcctaaaaatataaaaattagccaggcggggtagtgcatgcctgtaatcccagctattcaggaggctgaggcagaagaatcgcttgaacccaggagstggaggttgcagtgagcagagaccatgccattgcactccagccccagcgacagagattttgtctcaataataaaaaacaaagaaagaaatggaggtaaaaatgggtaactgcaggaacatgtctcaaccaaagacctaacactaggcaaacaaaaatgctcacatgaccaatgctacgttatgggaacagcccttgcatccaataagcaaagtcctgaagaacatacattagatgtagtctcacgtataaaaggggtaactcgtcctcatctctgtaacgcaataaccatgttaaccactttccttcatagcatcagctgatcttcaaccaatcacagctgatgagattcttccatatatcctgattattatctgctggacctgtgtcagcaaacctctgctatttaaatgatttcttc

SEQ ID NO: 751698 - DNA, 605 bp, Homo sapiens
atcccagcactttgggaggccaaggcaggcagatcacctgacatcaggagttcaagaccagcctggccaacatagtgaaacgctgtctctcctaaaaatataaaaattagccaggcggggtagtgcatgcctgtaatcccagctattcaggaggctgaggcagaagaatcgcttgaacccaggagcyggaggttgcagtgagcagagaccatgccattgcactccagccccagcgacagagattttgtctcaataataaaaaacaaagaaagaaatggaggtaaaaatgggtaactgcaggaacatgtctcaaccaaagacctaacactaggcaaacaaaaatgctcacatgaccaatgctacgttatgggaacagcccttgcatccaataagcaaagtcctgaagaacatacattagatgtagtctcacgtataaaaggggtaactcgtcctcatctctgtaacgcaataaccatgttaaccactttccttcatagcatcagctgatcttcaaccaatcacagctgatgagattcttccatatatcctgattattatctgctggacctgtgtcagcaaacctctgctatttaaatgatttcttc

SEQ ID NO: 751699 - DNA, 543 bp, Homo sapiens
atatattttcatacttcctagacacttgaagcctgattaaaaaacaagccaaattaccaaaaaaaaaaaaaaaaattagtataaacatctaattttctttagggaaactggcaaggaaactggttacagagagaatmagggttgggattgccccttgggaagcccttgttactcagcaggctgcaccagccccactccgactctcccacacacaaaggaggcagagtagcccgaggattgggagcacaggactgttggccccctgactgtgacttcctgtaaggccttaggcagagtaatccccttcctgtgactccattgcttcatttgtaacaaggggagattaataggctcagctttaccagggttgttgtgaggattaaaggagttactacatatcaagaggttagaatagtgcctgccccaccgtgggtgactgataaatgttagtcatgatgatgacaacaacaactatctacttagtaaagactgcaatatcccagagcagagttcagactggtgggatcaacagtattcaataaa

SEQ ID NO: 751700 - DNA, 654 bp, Homo sapiens
caaaatggaagcagtttacgcttaacacaaatgccatctacaagacaggaaaacataatgttttactgtcttttcttcctgatcaccatttcatctagtggcagcttatggtgattggggaattgagaagttttctagactccygaagtgtgcagttctccaagtataaccttcaaacttcaatgcctagccatatgtattttccttcctttaaataaatattcattgtaccagggactctcctagaccttgaagatatggtagataaggcaaatatggtccttaatctcatggtgaagaggttgcatgtatccttttgtttgctgtttaccaagttacatttaacaccataaaagttatttttaaaaggtttttttcttcttgagaaaagttcccttctgccatgttcatgtttctaaatgatagtaaagaatcacaatgataattatctttaagcctgtgagatggaatattttaatgccattacttatgtttttgaggaatagttaatgggaaatatctcaatatatgatgctaaatgaaagaggcagaactaagctttatatatcatatgataccagttttagtaagtacagaaatataaggatatataaatagttagaaaaataaataaatatatgggtaagagactga

SEQ ID NO: 751701 - DNA, 515 bp, Homo sapiens
aattgcccacaaggtggcaccaaactcgtgccctgaggacaaccaaggaaactttttaatagtaaaacagatgctccaaatactcaacagacatcttcctttatagcttatcctcaacaatgagccagatttatagttataagtatctccttctctctatatggtgcaaaaattaaaacctattgctgcctacaagaaaacagtaaaaggagaaagacytcctcccaagatagacctgtgctacttctgagcagttttcaaaagaaaaaaaaagtatctaagtcctaaaaataaatgttccacttctttgggggggaaaaaatcctgaaactaatttagctcactgaatggtacccagaagttgatccttcttcctctgttttaaattttatcttattgagcttagatgagtcggtgtaaatctttaaagaactgactgttatttaaaaattaaaacagatttgcaattaatacttaatgtgacaggtcatggttattttaaagggatgagatct

SEQ ID NO: 751702 - DNA, 621 bp, Homo sapiens
atgacaggacagaaggaagtgattcacacacctgaattccctaagaaacagacattttcacacaggaaggtgttttgatagcttttctttctttggaagtcacgacgtacatgtgagttttaagggttccttattcagcagggaaagaaaacctaagatgggatgataacaatgtgaattataccctayttaaatgatttctgcctttctattttttccttttttttttttttgcactttatcagaagcaagcatgattcaaattataatattggcagaacaaatttgtagtttctaaagaagatattgtcacatctgcaccactattgagctgcataatgttgcccaagctcctcaatctctcttagacctaggccagagggactcttgtcctgggccatggactttagagggcacatgacaaaccccaaaatgcagggttttttcttttcaatcttaaatagaagttttgtttgttttcttaatttaataactgactaagccaatgggagggactcacctgaacttggactccagaccggagggtgctgaactgagagcccatgagagaatgaaccacagcctctgtccttggaaaccaagacgaaataggtgtttagt

SEQ ID NO: 751703 - DNA, 577 bp, Homo sapiens
aacaatctattttcacttactttaaggtacataaagcatttgttatgtgtctatcagaccttaggtataaaaataaaccaagagtacaaagaaaacaattagcaggggttccaaaagttggatgatgaaatttaatgttcaaatctgctttgtttggaaagttggagagaacccttgaatatttttgtaccgaaatgctcccactcatttagaaatcagaattttagcaagttcaaccacttgaaagaaagctagtaatattaaaaacttttattgagcaacttctatgtgccccatatttacattagttaattctcagaatttcccaatcaaaaaggttaaagcacacggtggttactaacttgtctaaatcagagatagcctcaggattccaaatcccagtttgtcttgttcactattataawctgcagtaaactggaatacagttattaacgacaaatcccatatttgtgccataggaataacatgtaaatccaggctgtttatgtaaaaatttgcttaaagccaggcatggtgacccgcaacaagaatcccagttacttgggaggctgaggca

SEQ ID NO: 751704 - DNA, 535 bp, Homo sapiens
ccaaggccatgggagcccacctcttgcatcagcatgacctggatgtgagacctagtgtcaaaggagatcattttggaactttaaggcttaatgtctgccctattggatttgggacttgcatggygcctgtagcccatttgttttggccagtttcttctatttggaacaggtttatttacccaatgcctgtacccccattgtatcttgaaagtaactaacttgcttttgattttacagggtcaaaggcagacaggacttgccttgtctcaggtgagactttggaattagacttttgggttaatgctggaatgagttaagactctggaggactgttggaaagccatgactgtgttttaaaatgtgaggacacaagatttgggagaggccagggatggaatgatatggtttgactatgttcctacccaaaatctcatcctgaattgtaatccccataatccccacgtgtcaagggtgggaccaggtggaggtaattggatcctggggtcagtttgccccatgctgttctcctgataat

SEQ ID NO: 751705 - DNA, 633 bp, Homo sapiens
aaagtttgcacatatggcacttcactccatttgcccttctttctacaaaagaggtctagctgtaagatggtgttataatttatacttccctcagggggccaggtttctcccctctcgaagagtatattgtggccaggtgttatgcagaagaatataagccgcttctttcttagcgtctgagggtcaaattggtcccaattctccagaatacatcttaggggcatttttgccttggggggaatgtttcccatcgctttggagaagccccatatgggccaccagatgttaccggtgggtctttgttcttagagatctcaaggcggtggcaggccrctcccaagattgcggcaagccttttgttctctgacctggggttcttggcctcatggattccaaggaatggaaccttgggccatacggtgagcgtcatagctccattagaagctgtgggtcttggaagagaaccgtggaaccgagctagtagtgttcagctcaattaggaaggacccgggcacttagccttgcaggaacaatggcaaacctttagcccgatcaggagtggcaatgggcaccttactggatcaggagcacagcggacaccctgccggatccggaggggtggaagtcagttac

SEQ ID NO: 751706 - DNA, 556 bp, Homo sapiens
tatgtcagaagaatgggggcggtaagtaatctttttaagtgataaattactgtagtaaattgcaattgggtttctcaaatagctcctattattgctgtttctcattatttttgaaactttcaatttcattgtaaagctagagaaacccacttctttgtgggaagtgagcccagatatgttttcagattacgtttccacaggagcagatgggcttgctgtgaatgctcagggattgcttaagggtaacacattctcaacttctttctccggaagcttattaaacaactctgaataactgagtgaaacttttcttgcatcgtttgtgcttgtaaattattccctttgaagaataacctaaagcttctgatatatgacaatactggtgaaggaaaacagagaattttctctcygtgatttattaattcttaattttaagttgcctcattcttcaaaaaatacaaaatgatatgtaacttagaataattataatcttcaaatgctgatgagaacatttagatcccagcagaaggaatgtaaacagataatacaatgctag

SEQ ID NO: 751707 - DNA, 455 bp, Homo sapiens
gaattgtactgctgtaaacatatgcatgtaagtgtcttttttttgtttttgtttttggcttttttttttttttcgacaaggtctcactctgtcaccgagactggagtgcagtggtgcgatctcagctcactgcaacctctccccatctctggactcaagagtcagtcttcccacctcagccttccgagtagctgggaccacaggcgcgcagcccacgctcagctgtttttttttttcytttgttttttgtattttattttatttttttagtagagacggggggcgtctcaccatgttgcccaagctggtctcgaactcctgaactcaagcgatctgccagcctcggcctcccaaagtgctgagattacaggcatgagccaccgtgcccagcctcaagtatctttttcatataataacttttcttcctttgggtagatatctaggagtgggcttgc

SEQ ID NO: 751708 - DNA, 586 bp, Homo sapiens
ccacttcaatctagacttgtcatcacatatcccctccgtactactctcaccaaggtcactgataacttctctattgttaaatcagacaactttccatctgtattttgcttggcttctaggcagcaattaattctatcgacctctcccttcttccaacacttatttaccttgtcttcatgatactacactgtattgatcagggttttgaattgcaaacaacagaatccactctgacgttttaagcagaaaaggaatatgttgaaggacgttaggtagctcacaatgcatgtgggaggactggaagacaggttaagatgatattcagccamgaaaatacctattacatcttggtacaaatcccactacctctaccttttggtatcaacaccacaactcacataaatgttgtgaacgttcactgatgccatccaagactggactccagaagtgaatgccatggcgaccatgctaaatgctgatatgccttctctattatgcttgctaaattttgcaacctgcaaggttataaagttatcttctggattgaatttttgcatgagtgctcccatttggtagtaccaggtca

SEQ ID NO: 751709 - DNA, 513 bp, Homo sapiens
gtgcatttttagacaaaagttcgtctcttctatagtccagtggttcagagaggagctttggtatcataggtcctagattctaatctcaactctacatttattaattgtgttaccttgggcaagttatagttaacctctctgaaccttcaaattgatataacaatcaaaaatcttcctgatttggtcttggaaatgatgaaatgaaatgatgyaagaacacattaatgaacatgtacaccaggttccaagcactttatggaacatacagagacacacaggcacacatgtgcacacacactcatttccacacttcctgattatgtagaaagtgactaataaaaacttgtgttggaacgtaatggaaagagcactggactagtataaagaccttgattctgaccacgttcatactgaccagctgtgtagttttgactaagttactgatctctttgggtacagtctcttcctctgcaaattgaagaggttgctggggctgggagctttaaggagact

SEQ ID NO: 751710 - DNA, 658 bp, Homo sapiens
agaatagttgaacggatgcataaaagagtgaatgaatacacgcatgcataaattaatgaatgaataataacaactgggggtaggaaattatccactttctcatgccataattcctccacctctgtactcatttagtctttcataatatgttccttagtaccagcttagagacccaagtctttgcaacattacacctgatatgtgtccaacctgagattttactcctttgtagcctcattaagtgatgcaattataacctgtccattttcacactgaggttctaaggtccwtctccctccagaagccaatgttcacaaggaatggggtccccaaagtaagttttatgatttttcaatagaagagttaaaatgccaacatttgatattaacattctattaatttacccctttttaattactcatggtggcagggggagtagaaacataggcaatacatttttatttagccttaaaatgtagaaagaagcaataaaaccaccagacttatctgtgcacttttatgcgtctgtcctcctgctgagtttggccttctatttggtgataaagccctttgcaaaagggagagcccctcagaggagattccaaagctagtgttcctttcattactgcccctgggaaatgacccaaggttataccag

SEQ ID NO: 751711 - DNA, 612 bp, Homo sapiens
agcttgtgaaaacacagattactaaggcccatctgcagagtctctgattcaatagatctgagttggggatcaagaattttctaataaatttccaggtgatgccaatgctgctggtctgggaacacactttgaacacctsataactagacttttaacaacaatttgcatagacctctgtgctcctcacctgccctgaccccctgcctctcagatgtagatatgttcctgaattctgtgtttacaatgatgagaaaggtggggttttttttttaatttgaggtgaaattcacatactctaataattttaaactgtacaattcggtgtcttttagtacattcacagtgtgtgatccagccagaccctctatttagttctaaaacattttcatcacccccaaaggagtccttatacctgatgacaaagcttttatactcccaaaatatatcatctggtcacctatcatatgcttaataaccacctctctataggtcaccctgaaccttaccctgaaccaaacacattcatgggaaagcagaccagcatccgagaaggcaagtcccattcctgaatgctggccagagatcatcaattaaaaggggcttctccttgga

SEQ ID NO: 751712 - DNA, 589 bp, Homo sapiens
ccagccctgccatgggatccctccagtaccagtaataaaggaaaactgagcaggcaatttggttggcgacgtgggaggcggaatatcacacagctgctttacccgcagctgtattggctttgcagtgttgacagtttgaaaaaagaggaagacaaataggaaataaaaccttgtcttgggctgggaaataagcagctgggatgtgacccacccagggaggcttgctttcattagtagaagttattgatttaacttgaatttcagacctataatttttatcttttaatgaattttccattatttggagtttttcttmaccctggggcttctaagtattttttaaacctgtatttatttctatatattttattccacgctttgagaaatctccataaacaaaatcactgtaatatacattttccattgaggattccataccctctaccccaactactctcttctcaccacccccaaatggtaagtaaactcttcatgctgttgaaaagctaagctgatatacacagaaaaaatgaagtggtagattaagtaattatttagtgaacttcagctgggtagacaatttgtctaa

SEQ ID NO: 751713 - DNA, 589 bp, Homo sapiens
ccagccctgccatgggatccctccagtaccagtaataaaggaaaactgagcaggcaatttggttggcgacgtgggaggcggaatatcacacagctgctttacccgcagctgtattggctttgcagtgttgacagtttgaaaaaagaggaagacaaataggaaataaaaccttgtcttgggctgggaaataagcagctgggatgtgacccacccagggaggcttgctttcattagtagaagttattgatttaacttgaatttcagacctataatttttatcttttaatgaattttccattatttggagtttttcttcrccctggggcttctaagtattttttaaacctgtatttatttctatatattttattccacgctttgagaaatctccataaacaaaatcactgtaatatacattttccattgaggattccataccctctaccccaactactctcttctcaccacccccaaatggtaagtaaactcttcatgctgttgaaaagctaagctgatatacacagaaaaaatgaagtggtagattaagtaattatttagtgaacttcagctgggtagacaatttgtctaa

SEQ ID NO: 751714 - DNA, 589 bp, Homo sapiens
ccagccctgccatgggatccctccagtaccagtaataaaggaaaactgagcaggcaatttggttggcgacgtgggaggcggaatatcacacagctgctttacccgcagctgtattggctttgcagtgttgacagtttgaaaaaagaggaagacaaataggaaataaaaccttgtcttgggctgggaaataagcagctgggatgtgacccacccagggaggcttgctttcattagtagaagttattgatttaacttgaatttcagacctataatttttatcttttaatgaattttccattatttggagtttttcttcaccctggggcttctaagtattttttaaacctgtatttatttctatatattttattccacgctttgagraatctccataaacaaaatcactgtaatatacattttccattgaggattccataccctctaccccaactactctcttctcaccacccccaaatggtaagtaaactcttcatgctgttgaaaagctaagctgatatacacagaaaaaatgaagtggtagattaagtaattatttagtgaacttcagctgggtagacaatttgtctaa

SEQ ID NO: 751715 - DNA, 618 bp, Homo sapiens
taaaaagccatatgaattaccactacagtttagtttccaaattctgagagatgtaatcaacatttgaatagaacgcaaatccatttgaattggattttaatcaattgctgactcaattcaggatattactgaattctcattggctgaatttaaatatggtccaactggcaaaaacattcatgaaaaatatgcattcacaagagtttaaattttggtaaccacycttagagtactgtcgaatcacacacacacacacacacacacacacacacacacacacacagacacatgttctgcagtgggcaggtctacgcaaacctacccccaaggtctgaggaaactgagaagtcaaagaaaaaggctgacaaatccaccttctcagaaagaaatatttcatagggacttgcacacagaagccatgtttatatcttgggcaatggctggacaagatggtggatctctacgccattactccctagacccagggcttatataccatagggaaagggtatacatgattcagaagggatatgtaaaacaattatttaaaggcaggacttatggtaagcataataacatcaaggttgtgtgacctaagggcaggatttaaactggaaa

SEQ ID NO: 751716 - DNA, 619 bp, Homo sapiens
atgccattccacctgtctggatggccacagagctcacccctcacttgtttcaggtttaagttcaaaagtcactttctaagccaggcgcagtggctcaaccctgtaatcccagcattttgggaggctgaggcaggcagattgctcgagcccaggagtttgagaccagcctggccaacatggcgaaaccctgtctccactaaagatacaaaaattagccaggcatggtggcacagcctgcagtcccagctactcaggaggctaaggtgggaggatggcctgaacccaggaggtggaggctgcagtgagccgaggtcataccctgcactccagcctgggcaacagagtgagaccctgattcaaaaagaaaagaaaagtcactttytaaataaaaccttccctgaccacgttatataaaataattaagtccccaaacaaataataatatggcaacacagactaattgctgctttcttttgaaacctccccctatgtcttatcttggtggtgtattggagctagctcatatggatatgtaagaactactgattgctgaatttttaggaattttgaaaactggttattaaacacggcatttaaaaaattgaattatataaattca

SEQ ID NO: 751717 - DNA, 522 bp, Homo sapiens
cataggtgggagttggacaatgagaacacatggactcagggcggggaacatcacacactggggcctgttggggggtggggggttgggggagggatagcattaggagaaatacctaatgtaaatgacaaattgatgggtgcagcaaaccaacattgcacacgtatacctatgtaacaaacctgcacattgtgcatgtgtaccctagaacttaaagtttaaaaaaaattttaaaaattgaaataatatcaattctctttggccacaatggaatgaaaccaaaaatcaacaaaaggaattttggaaactatacaaacacatggaaattaaacaatatgctcctgaatgaccagtgggtcaataaagaaattaagaaggaaattgaaaawtttcttgaaaaaaagataatgaaaacacaacatactaaaagataaatttataactataagcatctaaatcaaaagagaagaacttcaaataaacaacctaacaatgcatattaaagaactagaaaagccagagcaa

SEQ ID NO: 751718 - DNA, 614 bp, Homo sapiens
gctatgttttccaggatgtagtgcagtagctattcacaggcacagtcccactgctgatcagccggtgtattagtccattcctgcactgctataaagacatacctgagactgggtaatttataaagaaaagaggttaattggctcatggttctgcaggttgtacagttttctccttctgggaggrcctcaagaaacttacaatcatggtgcaaggtgaaggggaagcaagcatatcttacatggcaggaacaggaggaagatagacaggagaaggtgctacacagttttaaacaacaagattttatgagaactctatcatgagacagcactaggggaatgatggtaaaccattagaaactgcccctatgattcaatcacctcccaccaggccccgcctccaacactggggattacaatttgacatgagattttggtgggaattcagagccaaaccatatcagcagaggagttttgacctgctctatttccagcctgggccagttcacccgtcctctggcaacctggtggtcccccattccagggagtttaccatattggaagcaagcttaatgcagacacctgatcagcatagcaccctgatcagcatagcaccc

SEQ ID NO: 751719 - DNA, 495 bp, Homo sapiens
gatatgcacttaaagcaaacataaccttaaacggtaaataaagaacccggaacttggaattaacatatgcgtttctgatgctagctctgccactaagatcacaccactgtatgatcttggatgagtcattaactctctaggtctgtttttttcatctctaacattaagaggttttataatttcaaagttctcttccagctatgaaattttattattatattctgcaaaagtatttgtcagattaawtcctagacatataaagacatataaaggtttaacacattatctattgttatttactctgccatttctcctctccatttgtgtggacaactgaaagtcaattacgtatgctaaggcaaagacattggggaagactccctatacttttactccactggcatatctagatgaacaacttagtgccctgctgattaaaggactcaaagactcatccatatccatttctctcacaagtttaaagaagcaaaaccc

SEQ ID NO: 751720 - DNA, 569 bp, Homo sapiens
gtatctccaggcctcacattctgccctggcctgagcattctaatccaagcctctaggtggccaagccaggcaactcccaccctgagtggctctagcatacatgcacgtactcactgctctgatttttccttctcacttcatctttgactccaggaactttctttactttcttccagcattcagccrtgtcttaaaggagacttgttttactggatccagaatttctgattattgtggagctacatggtttttggattgtttagttgaccatacacctagaggcagaaattagtttaaaaataattaaacaattaaatacaaaatttaatcacatttaaagggaagttgggagttcctgaggggtagatttaagctattaaaggaagctgctaaagagagctgcggaatggtgaggtccagtcagcgtgggtattgggtggctctattatgccatcatggcgactgtcacattaaataattctgaagctgaaagaatttaagggaatgtttgacctgccccacagtatatgtatttaagacttaataggccatagggaaagtcagcaaat

SEQ ID NO: 751721 - DNA, 643 bp, Homo sapiens
gttattctccatcttcaaacacattctctgtcttctccatctcttcagggcctatggaggctccatcactctggttctcttgccctctggcttctgattgggattagccaatggtgagcaccatgaggtcctgaatcttgcccctcttccaccaccccttgcaccctctttgcctgtttgttcttggctagggctctgctctcagccatggctccagccaggcaccccctccctcccacagctctgcagctgtgctcaagatcggctcaattctcctcccctrgtccctttaggtttcatgatggtaaaggctgcccagtgctgccaatccttggtgcttcactctccttgttttcctcttgactctgctcccacctctgtgaatagtccctttgttaaacttctactcattacccctttgagtgtgccagctgtttcctgccagtattgtcacatgtacccgtgttctaatgttaaaattccaaccaaatcacttaatttatattatagttgaaagttgtgatatgaggctttcaaattagatgtcttgctttgaaagggggaatttctagaaaatgtattttaaaatgagtgagggtattttatgctaaaatggtgaatcctaacttttttctcagtaggt

SEQ ID NO: 751722 - DNA, 576 bp, Homo sapiens
cccacgacaaggcaatgtggggggccaagccagactacattattcacaatgtggttttctagctgcttccaaatttgattttgccagttgaggctgagcgagttaatcccctggacttcatctcttgggcctcaatttcccaagcttctccaaggtgttgccctttcctctctgaccactaaatctgtgggaatgagctcgaagcctgcacccagtgcttcctgkctatgcagcatctgtattgaccaagtcacaaactggtctaaataataaataggatcaaagactgacccctggatggggttggctccaccgcatttctgtggctgtcagtggccttggcaagctgataggcgcatcaaaacctctttggtataaaagtccagatgagggagatcagagagtgtgtgggtgcagagcctctggggaggacgggtttgcaggctacactgtgttcaggtgcccaggtcagtagggatccttccctgcaggtggcctctgagatgcctttcacccaccctgcacttgtgacatcttggcttgtacctggggacctctctctgcaccgtacacaga

SEQ ID NO: 751723 - DNA, 583 bp, Homo sapiens
gtgtgatgatgtgttaagttgaatcatatgaaaattatggcaatttcctatggtataattagtcatttttattagagaaacgtgcttaaaaataagcttattttcctaggtcggtgaatgtttgctgttctatagatagtattccaaagtttaaagtcaaacctattcccttcttaaatgctattgattacacaagattataccaagattagcttgttgtgtgtttgtaccataacttttasagttttttgttttgtctggagaatctgattaccttttcatttttctttatagcagagagatcacttgccttctaaaccatatttataagacatttgagcttttaatcatacttgttgagtgcattgatgttttagccaggcacagtagtttctgcctgtaatcccagcaccagcacttcgggaggccaaggtggtaagatcagttgaggtccagagttttgagaccagcctggccaacacagtgacacctcgtctctactaacaatacaaaaattagcccagcatcgtggcgcacaccacacttgtaatcccagctacgcaggaagctgacgtcagcaaat

SEQ ID NO: 751724 - DNA, 615 bp, Homo sapiens
ttcaatgtgcagggtcagttgattgccttttctcattcaagttgtaatttttcagattcttagtatgatggataatttcagttatatcctggaaaatttgactattctaacactctagattctatttaaatatattattttaacagccaggggctctgtttaggattagcccacaggtctgtcctacttttgtcagctgtggttccaatgacaatataatttccgagacctgtgtggtgttattttggtttgcttggtttatctcattttcccactgcttcctgctggtgctgccygaggggacagaagacgttgagctacctgacaccaccctgtggggaaaggaagtttccggactgccttttggcagaatctcccttgcttttgagaggatagagagggctttctggttggccacttgcaaaaggatctccttgcccatgctgctttgctactgggtgtctgtcatgtgggagaggagtcttgggcctaaggagaaaaagaggcttcctgagctgggagcatggagttgtagggcctctaccccagcattgccttctgtggtctcttgggagagaagagtctcacaggcagcagggaaggagagtgctttcc

SEQ ID NO: 751725 - DNA, 607 bp, Homo sapiens
cacaccatatcgagggaacatgctatccacatgacttatcactgttgacagtgaccttgaccacctggcccaagtagtgtttgccaggtttctccactgtaaagttactcttttaaaaaaatcctttgccatcctgtatttttggtagaaagtcacttccctgtcctctgcaagatgtacaaggggatctttctcagatcttcaccatggccaccttgtggggctcctagacttaaggcccatgaaaatgaggacccctctaagactgcagccctctagagtttctcatttttgttctactccacactcagttcccagcaattcctcaaaataccacctaagtgttcccaccagtctgtggttctagtggcttctgctcgaggtgagctgagcccaactaggactccagactgctgaactctccaggtttccaggtggaggtttkccctgagcccttgagtctccaacaggtcctggaacactggttgattttcagtgttctagctttttcttgttgtaaggatgggagagatgatttccaggccttttatgtattggagctgaatctagaagttctctttttttataattcatgcatttcctttta

SEQ ID NO: 751726 - DNA, 508 bp, Homo sapiens
agcgttggtttgagccttagtactccaaaataattttaatcctcctcctgctcccctgattcagccatttgatgttttcttggactcatgaaactttatgcccccagcttctcctccgtaatttttgcagaaattctgaaacagccactgyccctgcctactgtgcatttcttaccacatttctgcacgtaatttgatatcacacttcctgcccccagcaacatttcctagcatgtaaatgatgaatattttttcttgtgctctgacctatctgaataggtctccaaaaaggagactatctgggctctcctcctgaatgtcatttccatcaacattgtaatttttaagataaaacatccagggttccccactagttgaatgtggtaaaagtatatgtcttgatgttgcctttcagtcggcaatgttcattaatagcaagaattcccatgataagtagagtgtgtgatctaccaataacttgcctcttttcaaggccaagaaagacatc

SEQ ID NO: 751727 - DNA, 585 bp, Homo sapiens
tgttttatgccttaaaaattataaataatgataagtttaatttgcagcccttatagcttagaggcattgtagttgatattatagtaacccttttagatgttagtaacttttattgtaaaatttaaggtagctctacctgctaaagtagcacctattcttttgaaaggaactttctcaaaggatttttagggcttcataatttcttgttgctctgtgtaaatccctctgataggcttccctgaaggattttaagcagaaataacatcaggtaccagtagatggcagtgaaaaataagcagacacatttttctgataaaatgccatttctacctcagtacttgataagaatcacacagtctagytggcctttgtgttttcactaaaaatatcctgaattatcagtcagttatgtttgactatgagaaattgcagaaaagttaaaagtatttcgcatccaaaagtttgtaatctagtgtaataaataggacagatactcaaagtgtatgaatggtatgacaataaatttagaaaatcatacaggcacacacactgctatagacatgtaaagatacatacatgtattgg

SEQ ID NO: 751728 - DNA, 704 bp, Homo sapiens
acatagaaactcacccagcctcaaaagttaaaaattaagagagatatgtattcaggtggccatttatacacaatatttttgaatactattctggccaaattagtataaaatgggttactctaaaatgaaattttaaaagtatataaacatcttaaactttaaaacttcagcccagctagaagtcaacgtgtgtttctgaaactatgctggggaaagtagctctgtccataatgattatatagttgttagcaaaatattggtcaaaactttttcagtttaatgagtttcaagatattcttcaaactggcctctgtgaactctttcttgacaagtgaaacctggctccaacaatgactactttattctacctctcatttattttctgtttaataaatccagtatttgggcatacaaactgtatacaacattttataacactctaatgtggataagacacctcaaaaacaggagtttagtcatttcagtcacatgtttctaatayatgataagatttgcagttatcgtttaattaattgcaatatggaaatagatactaaaaaatctaaattgcatcttacatttcaacaatggatgtttaaagcgtttaaaagttatgttttgcattttacaacatattgaagatacacattttaaatttaactctaaacaatgcaataatctagagaatcagagaattggatcct

SEQ ID NO: 751729 - DNA, 639 bp, Homo sapiens
agccagggcaggcctgagatccttctccatactgaaaggtcaaggtcaatatgaaactaaaaagaaaatgttctaccattaaagctagacttggagtgtaaggsttaaccctacaaggaggattcccatatagaatgtattctcagaagagcaaacaaacacaggatgtcactgaatccttgagggaggaaagagagttttgtagattaactctctggcaacagctcacttatttagcattttgatggtactggagaggtggcagaatcttacaagacataaagtactttttctaggtttacacagttcaattaacttcttatagccctcagattttgttccaacttcctttcattttcttttagctataacaggtaaagcaggagaaaacaagataaaggaagagaaaaaatgggaaaatttctagtcaagtactaagattcattgggagcagcaaaagttcatgaaaatttttggaactcaagttcttaaatactcataatggtatttaaaaaaatgctctaccatagaaaatgccaaacatatacagaaagagagaaaatacttgagtgaacctcaagtacccatcatgtaacctgagcaactttcaaatcattgcccatttgtttcatctgtgcg

SEQ ID NO: 751730 - DNA, 568 bp, Homo sapiens
ctgaacaaatacttggggaaaattataacatctataattgtagcaaaatgtttcacataatttgacatcttgtgctaaaatctgcactgtaaattgccaatagcagaaattattaaattctagaactatctacaaatggagactattaaatgtcttccagtgcacttttaaaaaatgggatggttgggaggccaaggtgggtggaccacttgaggccaggagttcaatatcagtytggccaacatagcaaaaccccatctctactgaaaatacaaaaactagccaggcatggtggtgcacacctgtggtcccagctactcaggaggctgaggcaggagaatcacttgaacctgggaggtagaggttacagtgagctgagaccaggctcctgcactccagcctggtcaacagagcaagactctgcctcaaaaaaaaaaaaaaaaaaaaaaaaggaggcggggtggaatgaataagccactatcttacatggtttgtatttgtttttacttggactagataagacttagtcgggtatcaggtggagaatgctacaaaaatcctgtttgcc

SEQ ID NO: 751731 - DNA, 440 bp, Homo sapiens
ttacttgagttttaggtcgtagagaaagttttccaataggaattttgttcatattgatctctccttttgccaagttgtcccacagttcaactcaaattcttcttttcagtgctaggacaggaataccatctctgggaagccatgattccctcagaatcaccaaamtaatgtagaaataaagacattagagtgaactgcatctgctttatttattggatttaccacccagtataaacaagaaatcctttgttccctgtttcattgacttcttaacatctcagagctatcctatgtttcagacatcacccgacccacccttgctgaggccccagactatcctaagtccaaccctgcaatcataacatcaacctcacatcgtgatgctaagtgtgtggggagggaggtggtggctgtttgcaagagtggccacagtaccactg

SEQ ID NO: 751732 - DNA, 626 bp, Homo sapiens
gaaaaatgtaaacctataaactacacgcatacacccattccatatatgaaatcaagaaacccaactaaaacttatctgtaatccccaagaaggtagacagatcccaatgtaaaaatgcgagggtagcatctctagagacaaatttaatgagagtaggataagcaaagtagttattctgtatccttaaagagtgaattacctggaacgttcctcatcttcatagcccatgatgatatattcctcattaacattaagtggagggcagaggcagccagagctggtatagaggttgacagtgtcccgtggaatgtttaccagagaggactttagaatctccttcacctccactactgcagtcacatcatggcacttagtctttatctctttaactttagcccraatgactgggataaaagacaagaaaagctgataataatatgacacataatagctaccccattcaaaaaaagccaaagtaggcttctctttagttaattcttatccacttgatattcaacgaatggaacagaaaagtcagccagatatttttgccttagactgtagtgtgtgacataaaacaacacacctgacctaatgctcagccctgctctctttccaatttgtgg

SEQ ID NO: 751733 - DNA, 542 bp, Homo sapiens
tcagttgcaaagttaaagtatgtgactcagaatctagaaagtacagatctgcttcttttctgtatctctcccctttaaaagagtcaagttgttcagattcctgcttctagtaaatgagcttttaaaaagagaagttttaaaacaccaagaaagaagtaaaaatatcagtaaaaagccagtggcatttctcccagtaccctcattgctccagttcactatccatggacattatatagaggaaaacaccgtttatccaaatgagtcaacatttcaaaaacttcttaggcacataattgcaaaccactttaatctgagtactttcccacatattttagagattttggactataaaggattagaagaaagtaatccttgaaaaatataaaacsagctaatcaaccattccccccattaatgttccaatttcgtcacaaaaacttattctaccagtacaacacacatgacagaaattagttactaaggaattctaaaagcttcacatttcagtcttccgagaattagttgcctcaagtatgagaacg

SEQ ID NO: 751734 - DNA, 636 bp, Homo sapiens
tcatggaaagtaaacgtgctactccagtgaacacactaatgataacacaaaacagccatactgctaacatagagaatgtcttagtggtctgggtagatcaaattatctacaacatccccttagcgaaagcctaaccagagaaagaccctaattcttttcaattttatggaggcttagagagatgaagaagctgcagaaaaaagtttgaagctagaaaaggttggttcatgaggtttaaagaaaacagccatctccataacatcaaaatacaagatgaagcagcaagtcccgacatagaagctgcagcaagttttccagaagatctagctaagatcattgatgaaggtggctrtactaaacaacaaattctcaatgttaatgagacagccttccattggaagaagatgctatctgggacttttttttcatgcctgctaacaccatatccattctgcagcccgtaaatcaaggagtaatttcaacttcaagtcatattatctaagaaatacatttcataaggctctacctgccataggtagtgattcctctgatggatccaggcaaagtaaattggaaaccttctggaaaggagtcaccattctagtgtcattaagaacatctgtgattcatggaagg

SEQ ID NO: 751735 - DNA, 494 bp, Homo sapiens
agagaactggtcaaaagtatcagttgttgcaaagtaatggggaaaaaaaatcctatagttttaagctactgtaaaatcacaaaaatactatttgtctatccttttttytccaataaggtgtggaagttggctctacagtcagtaaacatttgtaccaaagaaaaaaactgaacttcttcccaaaattggtagtaagccagcagggaggaaagaagtgtaatagaaagaaagagagggaatgggtctatactacccaagctaagcataaatcatgtcagcaaaagtgggagtggctgggcaggcctggcagctgcagtcatcaggaatctccagttgctcagtggccaccaggcagctacccagaggagcttctctggagcacctttggaacagcgccaagagcaggttagtgaaaactctgggagagcatctgacttacactaatgttccctaatttaagataaatcagaagggaactcagatcaatacaatct

SEQ ID NO: 751736 - DNA, 471 bp, Homo sapiens
cacagaagaaaacagtcaaagttaaaacatgctattattagctattacttctatttttagcaagtcataccctctgagttttaaaaaaatatttttgttcctgttctaaaacacttgatcttaacctactttaataagaaaactacttcaactacttcacggatattatcgtttgttttggggttaatgtctttaatagaattgttggaaaatcgtctacaaattaagagggaactgaatttttggtactgacattccttcacgggatcctaaataatccagaacattttggtgcttttgtttctagcatacaagttgaattayaattttgacatatgattattcttaagcatttgatcatttaaagcaatttaaataaatatcaaaatgtaccaaaaatataatcaaatatttttaaaaacaaacgtttacctaccgggtttttatcaggatgtaacttcaatgccaatt

SEQ ID NO: 751737 - DNA, 604 bp, Homo sapiens
tttttaagaaaaagaattcctcaaaagatttggaattttagaaccaggtacaatctttgagatcatgaagtctattccttcaattcatagaggaggaaactgaggctcaggaagactgatgagtgacttgcctaaagatactcaaatgtaaatagatgacataggaacataayctgtggttcctgttttttttgaccagtatgaaataatgatcatcaaaataaccaaaacttacatctgctttataattctcagatactattttaagcactttagttataataatacatttaattgtcacaacagccctatgaggtaaatgctgttattaagtcaattttactgatgaagaagctgacacaaagagaggtttagccacttgccaatgtcacactgttagtaagcggtagaatttggattccaacataggtagtaatatggtttggctctgtgtccccactcaaatctcatctcgaactgtagtccccatgtgttgagggagggacctgatgggggtgattggatcatgggggtggtttcccccatgctgttctgtgatagtgagttctcagagatctgatgggcttctgaagaaggtgcttgc

SEQ ID NO: 751738 - DNA, 611 bp, Homo sapiens
cctttgtactccttgaatctataaaaatataaaaataatttaaaaactcagatgcaacaaagatttgagcacttaaataaagctaaactgtaaaaccacccaaagaaaatatgaaagactgatgcatttgactatacaaaatgcaaagttcagtgtggcaacaatggcatattataaacaaaggtcaaaaaatgataaacttggaaaaaatattcttagcatgtaagaacaaagagtaatttcccttaatatataaagtatatacccaaaggattataaatcattctactttgaagacacatgcacacctatgtttattgcagcactgtttacaataacaaagacttggaacctacccaaatgcccatgaatgatagactggataaagaaaatgtggcacatatacaccatggactactacacagccataaaaaaggatgagttcatgtmctttgcagggacatggatgaagctggaaaccatcattcccagcaaacgaacacaggaacagaaaaccaaatactgcatgttcttactcatagtgggagttgagcagtgaaaacacatggacacagggaggggaacaacacacattggagactgttgggggt

SEQ ID NO: 751739 - DNA, 523 bp, Homo sapiens
ctgtatcccataccagctagccatgggctagaatccatcctaagggagatgtaaactctgagtcacttctgactctctctacaggtgaggctggttacaggcccaaggtcagtcctctgaaggtcaaaggtataaacttttaatggcaagagcacagctgggcaatggtgaaaaaaagttggttaaaagaccctagaggatctgaatggggtaccaagggtatccactacacagctgtaatgggaaagggggacaaagaacaatagttcccaaactatgtttctggggacatttaattgtgtgaaatttctayaggaattagcaatgggaatggtggttataagtttgaaattgccaagttgaatgaaattaaaaaccttgtttactgcagaaattctcagatcctttgatatcccaagaggccaataaaatacaaagcattttcaagctcatttaatgagagcacaccttgggaaatacttgagttgggaggtattaagagtttgcattgattgaactaagt

SEQ ID NO: 751740 - DNA, 522 bp, Homo sapiens
cgtgtatactgaaaaatccttgttactttttttgtctaattgtgaagtattggaaattgcctgaatccccactagtgaagtttgcacatatatgttatgctgaatgtgtatatatggagatagatctctatatgcagcaataaaaataattctaatatatacagaccttgtctagattatttattgctgtaacccagagcctagaacattacctacttattgatgttcagtacacttcttccacatggaatgagcaaaagtcttgttgttacatgccaaaagtaaattttaaaatagaatgcaacccmaaatcacatatttataaaaagtctgtctcttcaacatttgaccaaagtgattccagtggtctttacttcagaaatttcccatttcgagttcgtcaatttttaaacgttttctaattgttaaaataaccatgcaattatgtgattaaaatattgaaatatgaaaagaagagagcactcctctattcctttataccagagctatgctatttggtgt

SEQ ID NO: 751741 - DNA, 670 bp, Homo sapiens
ccttgccaataaataattccagctgctagttgatactacaaggcttaatggatcaaagtatttgatgccatcatcactaaaatctcttttggcagtctcaagatggggtgctgccaccagtggtggagtacaatacaataactggtatgccaaaagaaaacagatattctatttattaataggccattttacaattaaggaaatctttaatcttcatggatatacaacatgctcattgtcactcatatatggtcactcatacataaggtacccaawgtagttttacacaagagagtgagtgctacaatacataggtataaaaatgacataactcattctttctttttccgcagcacatgcttaaataaacttatagtttctcttactggacttacactaaataaatgttatgaagtagataaatgactttaataaattccttccaagcacaccagtttgaagataaagcaaaatgtaagttatacaaacaccaatgaacaagaaaattaaagaagtaattttctctaatttctattataaacattcagccaatttataaggtaaatatagtaacagtctaatcagaaaataaaaccataaaattccaaacttatcaaaaaatattgcactatggacttaagtccactcataataagttagctgggattaa

SEQ ID NO: 751742 - DNA, 670 bp, Homo sapiens
ccttgccaataaataattccagctgctagttgatactacaaggcttaatggatcaaagtatttgatgccatcatcactaaaatctcttttggcagtctcaagatggggtgctgccaccagtggtggagtacaatacaataactggtatgccaaaagaaaacagatattctatttattaataggccattttacaattaaggaaatctttaatcttcatggatatacaacatgctcattgtcactcatatatggtcactcatacataaggtacccaatgtagttttacacaagagagtgagtgctacaatacatrggtataaaaatgacataactcattctttctttttccgcagcacatgcttaaataaacttatagtttctcttactggacttacactaaataaatgttatgaagtagataaatgactttaataaattccttccaagcacaccagtttgaagataaagcaaaatgtaagttatacaaacaccaatgaacaagaaaattaaagaagtaattttctctaatttctattataaacattcagccaatttataaggtaaatatagtaacagtctaatcagaaaataaaaccataaaattccaaacttatcaaaaaatattgcactatggacttaagtccactcataataagttagctgggattaa

SEQ ID NO: 751743 - DNA, 470 bp, Homo sapiens
tctgttagtaatatctggggcactacctcatccacttaattaacccctggagagctaaccaaggaactgctctgattacaaaataatgggtccatcaggcacaattaatacccaagtgaaacatggcagtttgcatgaaaacgattgaagtaaacagttccaggccctgaaaggggctcacttcctaattaacccttagagggctaatctgcttgcccaaacaaaacyaaacctggtgcctttgccaactggcatgttggggaaatgatttttgcatcaggtcttgctagcatggcactggcaagtggaaatgcctaatccctatagacctaaaccatagaacatcttgaaaacacagggttctgtgaacgtgttaaatagtgacttggtaaggcattactagattagagccctagaaagagacttacaaaaatccatattataggacgcacaacattcctacacatgct

SEQ ID NO: 751744 - DNA, 634 bp, Homo sapiens
acagaatcatgctgccctttcggagcttatattctagatattgtatcctccagaaacatgcaatttggaagaacatgtgcacaaaaaactagagtacagagaagcagaagataaaaagccatctgagcatcaaaagcaagaaaatgctataggatttcaaaggacgtgcagagtgtttttggtataataaattcaggaaaatattcactgagagagaagcccttgaggtgaagtttggagggcaggtgaaatgaggatgtaagcaagaaagaaaaagagagattaagggttcgataggctgtcagttccctgaggtagagtttgttttgttttatttatctcttttaataagggcctagaatagatactggcatatagtcagtgctcattatttattgaattagcaatagatcactccaagcatagacatactatgaatgacaccctgaaggaggcaaragaaaggtttgtctatggagctattatgggaagagcaggttgtctaatgttcataacctaaagccaaacagaactatttttgtggtagagaaactatttcaactaatccttctgttttctgataatttaagcaggactcagcctagaaactgctttgcattcaacccatggtgca

SEQ ID NO: 751745 - DNA, 651 bp, Homo sapiens
cctttaggataaatcttgattttattctttttaatctaagtcctatttccaaattgccctgaatcctgttgtagccttacctcccactagcctctcccaaatccctccatcttagataaagcatttagcatgttgtattaaacaatgcccaagatttycttatctttacccttactgattccttccccggctggctggcacagcccatccagagcagacacgttctcctcctcctctgggctcaaaaagtgcctcatgacccatactttcttttggcacttgctctgtcttcttttagtgttcattgtcttctcgtgacagtgccgttattagattataatttttgccagaacaagaattgtgttttctcattttatgggggcgggggacatttgggactgtccacacagtgctgaggacagtgtagataagtgcttaatcaataattcccagataagtgttgactgataattcccagatcccacagataaaaaatttgcattttgcaatagttgggtagcttttatttgctgcctgcttgctttgcaaaagacagatgaggtgtctggaagtgtcacagaaatggtgggggttcattggaggatttaccaatgtcaacttcgggacatatgctaaaaaaaatacctcagg

SEQ ID NO: 751746 - DNA, 569 bp, Homo sapiens
tataaagaccatgaaccacagtttccccaaaacttgattttccccttcatttccccctctcctttctaacaaaatcctaattgctgttcacatatccactccatttctagccctagaaggagatgaacctgattattcccagccaattaatgtatgtggttctcctggctgcaattagtattctagagatggaggtgggggcctaattagactaaaggaaaaaacactcatatgccagctggttttcgtttgtttgtttgttgttgttgttgagacaaggtgttgctctgtcgcccaggctagagtgcggtggtgctatcatggctcactgyagcctcaatctcctgggctcaagcaatcctcctacctcagcctctgagtagctgggagactacaggagcacgtcaccatgcccgaccaattttggttttgtttgtttgtctgtcttgtagagatggggttttgccatgttgcccaggctgttcttgagctcctgggctcaagtgatccatctgcctcggtgtcccaaagtgctggaatttcaagtgcgagccactgcacctggataa

SEQ ID NO: 751747 - DNA, 616 bp, Homo sapiens
tgctttccacttaatcctgggtttccgttcccttgccatcatgttcattcaaacctttccagcttgaagattgctcctctttgtttattatgatgtactttttatactgaatagaaagataaggcttatttaccggtaacatcagtgatggttgataaataagggtttgtgctataattaaatgcarcgtttaaattacataatccaagtgaagtggagaactaatataaacatgcaaatgaagttagtcaagaacatttttaattgatctaaatgaagtggttttgcatcttaaattatttggaaactctaggtgcctcattttgcccctttacagcccagcagttttcttggcatttctctggcaaagaaaagacactgtgggaaaacccttagacaattagcatttgactctctcttggctaattaaagaaagtcagagtcaaaaaagcaatggaagcttttgagctcctaataaattttaaatctttctgcaagactcttctctatcactctttttcaggaagacagagatggttcactgtgacaccagtgaagcttaaacttcaaggtccctccccgggacaggctccttccagtgccctggagcatggtt

SEQ ID NO: 751748 - DNA, 495 bp, Homo sapiens; identical to SEQ ID NO: 733017

SEQ ID NO: 751749 - DNA, 612 bp, Homo sapiens
gcacacctgtaatcccagctacttgggaggctgaggtgggaggatcctctgatctggggaggcagaggtgacagtgagctgagatcacaccactgcactccagcctgtgcgacagagggagactccgtctcaatgaataaataaataaatagccgggcgtggtggctcacgcctgtaatctcagcactttgggaggctgaggcaggtggatcacttgaggtcaggagcttgaaaccagcctggccaacgtggtgagaccctgtctctactaaaaatacaaaaaattagccaggtgtgttggtgtgctcccrtaatgccagctacttgggaggctaaagtgggagaatcacttaaacccgggaggtgaaggatgcagtgagccaagatagcaccactgcactttagcctgggcgacaagagcaagactccatctcaaaaataataaataaataaataaataaataaataaataaataaataaagttaagtaactacctttcagagctactattttctgggtgttcataagggctagaaagttcttccctttacagagacaaaatcagctactttgtaatacacacccattggtctaagttgtgcttgctgaga

SEQ ID NO: 751750 - DNA, 541 bp, Homo sapiens
gctcacacctgtaattccagcactctgggaagctgaggcatgtggatcacaaggtcaagagttcaagaccagcctggccaagatggtgaaactccgtctctactaaaaatacaaaaaattagccaggcgtcgggcgggcacctgtaatcccagctacttgggagacggaggcacagaattgcttgaacccaggaggcagaggttgcagtcagccragatcgtgcctctgcactccagcctgggtgacagagcgagactccacctcaaaaaaaaaaaaaaaaaaaaaaaaaattttttttttccccccccccccccccttttttttagcatgtttaaagataaaataccaaagactttaaagactcttaaatctaacactttctatttttctaatcacaaaataaaaaatactttttttattagtgtgtatgacaattaccttctgaaagtagcctctttttagagttttatctcgaacttgtcggaaatacacatatccataaaaataagcaggatccttctaagaagaaagtgacaagta

SEQ ID NO: 751751 - DNA, 515 bp, Homo sapiens
caatacagattctccctggcaatggatctcttccgcaattcaaagatgtctacattagaagtgatgacgtttacatatcagaaaatccacccctataattaatcatgtcaattaccagaaaggaaatagttttgtgatcatcttaactgacatcaaaaactcatttgacagaactgaatatccattctgctgaaaacccttagtaaaataaaaataaaagaacatttccttggcataataataataaaaaaaacctatctgcaaccaaccgtcaacatcattcttagcaataaaacacctagccagggtcattcatattttagtcagggtagaatgagaaagcctgctattaacacaattattytacattgttttggaagttttagccaaggcaagagtacattaatacacaaaaggaaacacaacatttggaaaggaggagaaattgtcatcattatttgtacatgatattattgtttatccagaaaactcaagagaatcaactagaaaagtaa

SEQ ID NO: 751752 - DNA, 587 bp, Homo sapiens
caaagaaaacacctgatagtctttacactgtgaggaatcctctttagatgccaagaattttccaatgatgtgaagaagaagaccagtatacagggagaattcagttgaatgaccaccttcctgcctccctgatccatcacatgaaaaatttgcaacgttttctatagatttatattacacttgtgatactcaatactattaaaatgtcatatttcaatattaaaaatattaattggcaatttgttacaaaatgccctcagactcaaaagaagggaagrgaatttatatttgttgagcacatatttatatgtcaggaactgtgctttgtaaacatttttacttgtgttgtatgacttctatgatgtcttcattatcatttcattatcatttctgcttccagatctgggaacagtggctcggggagatgagggaacttgcccaagggtacctacctagtacctggaggcactggaggctgatctgcctgccttcagagtttgtttcactatgccagaagacccagaggacctcggggtggcagggctgcttctaagagcaaggctgaagactgtcatagaatgtggagt

SEQ ID NO: 751753 - DNA, 624 bp, Homo sapiens
tgagcagagtctcccagtgggcactagagtagctgtgcatgtgcagggttgcctctgaccgtctcaccttgatgagttgcttccccagcgtcctcatcctgagggtgaccacacagcagtcttcccagggaagccacaggagtgagccatgggaacctcacacaccaagcaactaggctccaggacaccaggggcagaccaaggtctgtaaatccaaytccctcccccaccaaagcttgcgatgtttctctccaacagctccaggaggccttctctggttattttcctccgcccacctctcctttccattctctccatcagggagttccagatcttaaatctatgggtataaagttgaggtccttctgtgaaatgaaggctcacctctaacaagccaaacagatctgtttggtaagtgtgggttttggagaagaggagctcctccactctcccctctttctagcataatctgtagaccagaatagggagagagaatcatgagttttagagtcaaacagacttgggttcagatcctagtcttataacttacttgttatttgacccaggttaagtcatttagtttcccagactcattttccttatctgtaaaagggggtgctttgt

SEQ ID NO: 751754 - DNA, 573 bp, Homo sapiens
ccagaacatttaggcagctttctaggatcctcctcctttagtgaactgaatattaatatcttccaaaggcatctgctactaacctgctcactactgcgctacgtaacagagattcctcaactctgttttgcataggatattgacatcttgtgcaaaaatgagggtactcactaaaagggtctgacatctgacataatggttgctggcctatgaggtcctgcttgggtgtggcactatttcccctgagcacctgtgggaagtcatacctgatctctgcttctacagygatactagagagattgaaaaggaagaacagattgctgctgaaaaggcagaacaaagagaagttttggagagaatgcattacttatgttggcagatttactgcaactcaatctgagctcacagattcatctgaaagagtctgcatctattcagtattgatgaagaatgaagtgctcagacttttgctgaagacagatctatagctgccaactgaccctggagtacagaactagggtgaatagaaaagaagtctcagtttgagatattataacaataatagcaatagta

SEQ ID NO: 751755 - DNA, 658 bp, Homo sapiens
aaataaacctcttttctttataagttacccagtctcaagtattcctttatagtaacagcaatggactgacacagaaaattgctatgaaggagtggggcattgctataaagtgaactaaaaatgtggaagtggctttggaactgggtaaagagcagaggctggaagagttgggagatctcagaagaagacagaaagacaaaggaaagtttggaacttcttagagtagttgtgaccacagaatgctggtaacaatatggacagtaacgtctagtcctatgaggtctcagatggaaaagaagaatttattgggaagtgaagtaaaggtttgttatgccctagcaaataatttggctacattgtgtccatgtcttagggctttgtggaaggttgaacttaagagtgatgacttaggaaatttagtggaagaaaattctaagcaccgaagcattcaagaagcagtgtggctgcttctaacaccctgcaatcagayacaggagcaaaggaatgatttaaattggaacttttaattaaaagggaagcacagtgtaaaaaattggaaaatttgcagcctggccctttggtagagagaaaagagtattttcaggagcagaactgaagcaggctgtaaagtatccatttgctagagagatttgcatga

SEQ ID NO: 751756 - DNA, 598 bp, Homo sapiens
aatgtagactttggtgtctaaatcttcactactcaaggtgttgtccttgaaccagcagtatctcaagcaacacctgggaagttactagaaatgcacaatctcaagccccatcctagaccggctgaatcggaatacggatttaaaaatgcaagctcccacattaactgacgaatggataaacaaaaayggtacattcagctggatgtagtggctcatgcctgtggtcccagctactccagagatggaggcaggaggatcgcctgaccccagaagtttgagaccagtctgggcaacatggtgaggcctcacctctactttaaaaatgcaaaaattagccaggtgtggtggcgcgtgcctctggagtcccagctacttgggaggttgaggtgggaggatcgcttgagccctgcaggttgaaactgtagatgctacaacatggagaaaccttgaaacattacactaagtgaaagaagccagacacaaaaggccacatgttgtgtgatttcatttgtgtaaaatgtccagaataggcaaaactatacagacagaaagtagagtagtgtttgccaggggctgggagaagggggtaattgggagg

SEQ ID NO: 751757 - DNA, 598 bp, Homo sapiens
aatgtagactttggtgtctaaatcttcactactcaaggtgttgtccttgaaccagcagtatctcaagcaacacctgggaagttactagaaatgcacaatctcaagccccatcctagaccggctgaatcggaatacggatttaaaaatgcaagctcccacattaactgacgaatggataaacaaaaacggtacattcagctggatgtagtggctcatgcctgtggtcccagctactccagagatggaggcaggaggatcgcctgaccccagaagtttgagaccagtctgggcaacatggtgaggcctcacctctactttaaaaatgcaaaaattagccaggtgtggtggcgcgtgcctctggagtcccagctacttgggaggttgaggtgggaggatcgcttgagccctgcaggttgaaactgtasatgctacaacatggagaaaccttgaaacattacactaagtgaaagaagccagacacaaaaggccacatgttgtgtgatttcatttgtgtaaaatgtccagaataggcaaaactatacagacagaaagtagagtagtgtttgccaggggctgggagaagggggtaattgggagg

SEQ ID NO: 751758 - DNA, 598 bp, Homo sapiens
aatgtagactttggtgtctaaatcttcactactcaaggtgttgtccttgaaccagcagtatctcaagcaacacctgggaagttactagaaatgcacaatctcaagccccatcctagaccggctgaatcggaatacggatttaaaaatgcaagctcccacattaactgacgaatggataaacaaaaacggtacattcagctggatgtagtggctcatgcctgtggtcccagctactccagagatggaggcaggaggatcgcctgaccccagaagtttgagaccagtctgggcaacatggtgaggcctcacctctactttaaaaatgcaaaaattagccaggtgtggtggcgcgtgcctctggagtcccagctacttgggaggttgaggtgggaggatcgcttgagccctgcaggttgaaactgtagrtgctacaacatggagaaaccttgaaacattacactaagtgaaagaagccagacacaaaaggccacatgttgtgtgatttcatttgtgtaaaatgtccagaataggcaaaactatacagacagaaagtagagtagtgtttgccaggggctgggagaagggggtaattgggagg

SEQ ID NO: 751759 - DNA, 509 bp, Homo sapiens
ggattggtttatttgtccctaccaaatctcacattgaaatctgatacctgacatcaccctaagggtatgaaaaaaaaaaagaagaaacttgatccccagtgtggtggtgttgggaggcagggcctagtaggagctgtgtgggtcataggagcaaatgtctcatcaacggctttgtgccattctcatggtagtgagctcttgcaagattggattggttcttggggagaacggatcagttctcattagaatgggttgttataaagccaggacccctactcactaccccggggatcagtctctcttcrcatgagcccacttgccctttgatcttctccttcatattttgatgcagcacaaaagccctcaccagaagctgagcagatgctggtgccttgcttcttgcacagcctgcagagctgtgagctaataaattaccccacttcaagtatccctttatagccacgtaaaatgggctgagacagacagtctcttcaataaatggtgttgag

SEQ ID NO: 751760 - DNA, 537 bp, Homo sapiens
  misc_feature 526, 533: n = A,T,C or G
ctgcaaaatacaatgatgcctactctacagtttcccaatgtcttagctcattccagcatttactgaaatgtccaaagcccaaagtctcttctgagacaagactgccatcccttctgcccctgagcctctgaaatacaaagcaagttaattacctccaaggtatgactgtccaggcattgagtaagaacctccacccgaaaggaagattttttgccagagagaagaacaaaacacaaacgggacttacaggttcccatgacattccaaaacccagcaggccagttattcaaacctacagctccaaaatcattctttttaaatccttgtcccacatcyaggacacaagggcatgagggctgggctcccaaggccttgggcagctctgcacctgtggctttgcagtgttcagcccccgcagctgccctcatgggctgtgctgctgttgagtgcctggagtttttaacccatggagggtacgaagcttttgatgggtctatgaacctggggttggcacgatggtggcctncagtgtngggg

SEQ ID NO: 751761 - DNA, 538 bp, Homo sapiens
aggacagaaagttaagggaagaaatcttttccccccatttcttacagagttgatgagtaagcacagaaaatgataagaaagagttctgggaaaatattacagagtagaagtaaaagtatcctttcccttttctctgtgatcatacttctgctatctcttttccaacatctgtaaataatttatgtatataaaaatagaaaagcaatatattgtatatatacatatatatgtaatgtacatacaaataagagaggaggaattcacaaacagcaaagtgatcyttctgagttgaaaatgtaactgcccaatgtgttcttcttgcccactgcctatatagagctgattcatcaagacaggggaattgcaataagaatactgtacacatcaaacaaagcagtgcaatgggtaaaccattaggacctctgtacagtcacagggcagtcaaccaacttcaaaagtggagcgaggcacgggaagtctgaggccactgctctgccattgagtcacacactgaccttgagtttctgatctcagctac

SEQ ID NO: 751762 - DNA, 618 bp, Homo sapiens
taaataatttatgtatataaaaatagaaaagcaatatattgtatatatacatatatatgtaatgtacatacaaataagagaggaggaattcacaaacagcaaagtgatctttctgagttgaaaatgtaactgcccaatgtgttcttcttgcccactgcctatatagagctgattcatcaagacaggggaattgcaataagaatactgtacacatcaaacaaagcagtgcaatgggtaaaccattaggacctctgtacagtcacagggcagtcaaccaacttcaaaagtggagcgaggcasgggaagtctgaggccactgctctgccattgagtcacacactgaccttgagtttctgatctcagctacccaactgatgtctttatttaggggaaagttttatttttttctcagaaactagaaggctaacacacaaatcaggccctatgtactcagttattgatcagtccaagctgatcaattgtatcattggctgcttgcagtggcactttcaattgctatcaactaagaagggaatgtaaagcccaaaattgactggacttcagtcttcagagaaaatctgaaactggcttctcaggtttcaacatccgtggccattc

SEQ ID NO: 751763 - DNA, 618 bp, Homo sapiens
taaataatttatgtatataaaaatagaaaagcaatatattgtatatatacatatatatgtaatgtacatacaaataagagaggaggaattcacaaacagcaaagtgatctttctgagttgaaaatgtaactgcccaatgtgttcttcttgcccactgcctatatagagctgattcatcaagacaggggaattgcaataagaatactgtacacatcaaacaaagcagtgcaatgggtaaaccattaggacctctgtacagtcacagggcagtcaaccaacttcaaaagtggagcgaggcacgggaagtctgaggccacygctctgccattgagtcacacactgaccttgagtttctgatctcagctacccaactgatgtctttatttaggggaaagttttatttttttctcagaaactagaaggctaacacacaaatcaggccctatgtactcagttattgatcagtccaagctgatcaattgtatcattggctgcttgcagtggcactttcaattgctatcaactaagaagggaatgtaaagcccaaaattgactggacttcagtcttcagagaaaatctgaaactggcttctcaggtttcaacatccgtggccattc

SEQ ID NO: 751764 - DNA, 557 bp, Homo sapiens
cccagatattaaacattttaggcttttaggacccctcctctgttgcagctattttactctggatatagtgtgaaagtagccatagacaacaggaagtgaaagagtatggctgtgttccaataaaactttatttacataaacaggcagtgagtcagatttggtcttcagcacaagttttccagcccctgggtacagggtaagagagcactttgaaggtgctmaatgggcgggacagtgctaggtgttaatagaaccaaaggataaagggagacagcagaaggggaaaatgatttgcatttttttcataagtatggagaatataaaaagcattctagattaaaaatcataacagcatatgcaaaagagcatatgcaaagaacaggaccaacaggttgaatggcaagtagcttgttgcagctggcaaaacagcacactatggggagtggccacagggcacgctaggggctgccatgttcttgggaggattaagtgagtgatatggtttggctatacccccacccaaatctgaatttttatctcccagaagtcccatgtgt

SEQ ID NO: 751765 - DNA, 643 bp, Homo sapiens
aggtttcccacaggccttaggaagagaaggagtccagcgtgggaaggagagatgctgccaaccatggacaacatggagcccaaggacatagtgagggctattgctttgaggaataaaaaagcctggccaactttcaagtaaagatttcagagagtggcagccagattttaaactataaaggaatgagtgaggatgaggaaatgaaggctgtgggagctgctaagagtgattagacaggaagggcacctcccagagtcctctakgatggagcacctgtgtgtgtttggtagagaactgggatttgaagctgggtttctagaacttccttctcaagtccattctactcctaatccccctgaggtgggggtgtcattgacagcagtggttaggacagagtcctggtgcctgctgatgggcaaggacacacggcccagttctggtaatcttccttactctgagcccaatctgcaaacagcttccaggcctttcaaaagtgacccaaaggcacaactctgtaaataaattgactgctgataagacatcaagaattaatgaaactcccagaaaacagctgggcacagtggctcacacctgtaatcctagcactttgggagcccaaagtgggaggatggatccagggcag

SEQ ID NO: 751766 - DNA, 627 bp, Homo sapiens
ataataaatgctggtgatgttgcagaaaaaaaggaacacttatatactgctggtgggaatgaaattagtccacatactgtggaaagctgtgtagcagtttctcaaagatcttaaaacaggggtactatttgacagcaatcccattattgggtagatacccaaaggattataaatcattctaccataaagactcatgtacacatatgttcactgtagcactattcacaatagcaaaggcatggaatcaacgttaatgcccatccacagaaaactgaataaagaaaatgtggtacatatacaccatggaatactatgcagccataaaaaagaatgagatcatgtcccttgcagcaacatggattatggctggaggctataatcctaagcaacctaatgcaggaatagaaaaccaaatattgygtgttctcatgtataagtgggagctaaacattaaatacacaaagacacaaagaagagaacaataaacaccagggctacttgaaggtggatgatgggaggagggaaaggactgaaaaactacctatggggtaccatgcttattacctatgtgataaaataatctgtacaccaaacccccatgacacacaatttacttatgtaagaaac

SEQ ID NO: 751767 - DNA, 624 bp, Homo sapiens
ggtgattacccatagggctcaatgttcatcttttgtttctaaattccaaaagcaaagttgattctaaaggatgataataatcattaataattcatagaatacctatctccaaaacagaatcaggaatgctatagacaataataagcacacattaaaccaactgggcactgtgccmagaagatcagccaagtacacacaataggcaagaaaagagcttgtatgtgtgtaaggagaaataagaaagggaaagcaacgcgtaaaaggcttccaaacagaacaaccagggagtcaacagattttcaaactttcacagaaaccagaaatattttgaagtcatttctgctgggtctactaactgtcttacaatgtaagatagccatgaaccccaatggaagaagtagaagcaaattgagtatattctaaaaaattcaaaatttgtaggcatattaagttttaggttttacaagcttacaagtggtgaattacaagaccacaatataggtgtaggtttatgggcttttttatttgtgatgatgacttaaaccaaccttcttttttctatatgatttgttgaaattaaagcactgtacatgtgattatgacaaggaacaaggagtctcatgt

SEQ ID NO: 751768 - DNA, 624 bp, Homo sapiens
ggtgattacccatagggctcaatgttcatcttttgtttctaaattccaaaagcaaagttgattctaaaggatgataataatcattaataattcatagaatacctatctccaaaacagaatcaggaatgctatagacaataataagcacacattaaaccaactgggcactgtgcccagaagatcagccaagtacacacaataggcaagaaaagagcttgtatgtgtgtaaggagaaataagaaagggaaagcaacrcgtaaaaggcttccaaacagaacaaccagggagtcaacagattttcaaactttcacagaaaccagaaatattttgaagtcatttctgctgggtctactaactgtcttacaatgtaagatagccatgaaccccaatggaagaagtagaagcaaattgagtatattctaaaaaattcaaaatttgtaggcatattaagttttaggttttacaagcttacaagtggtgaattacaagaccacaatataggtgtaggtttatgggcttttttatttgtgatgatgacttaaaccaaccttcttttttctatatgatttgttgaaattaaagcactgtacatgtgattatgacaaggaacaaggagtctcatgt

SEQ ID NO: 751769 - DNA, 652 bp, Homo sapiens
ggtacacttggataatcttcctgtcttcacatcaactgattattaacattaattacatctgcgcaatccattttgccatgtaatacaatataatcatcaaagtaacactgggaggctaaggttatgaccatctaatattctgtataccacacaattgtattgctttctgaggtcattgaacactttcagaattcatgaaaggtggatactcactataaataagatagatatggctagcaagaagaaaaatatagggattctatacttaaaagatacagctatttccatttatataattgtcacaataaaaatttaaatgtgaataagtgaatagcaagtatagaaagtttagcaaaataatgagaattagatatataaatgaatttttaagatagtctcagaaaaagtgtaatatttgtcatttatcctgaaatgtcaaaaattttcctaagcagaactactcaccaccaatttctcagtttcatccctgaraaaaaaatcattcaagtggatttattttggcaaagtgaaactgtgaattgcttggctccagaacagctgcccatactcagcaggactgcattcccacactccattcacccttaccccatcccttccaggaacacttggactaggatccagctctagatct

SEQ ID NO: 751770 - DNA, 515 bp, Homo sapiens
aatgatggaagaaatagataccctggaagaaggaaaattaaattcatgctttcaaagcatccttcccaacaaatccaattcatcttttgcacagaaggaataattagatgaagatatattttaagtcagattgttagtattttggccacatggctacatcakaagtgtagtttaaaattctgttcatttttatttttttaaatcaaaacactcattgaactgtacttaatttttaaatgcaaaatacataaaactcttgcatttcttggaaataaattctctttattctactaataaataaacattgttaccaccattgaggcaaatgacagaaattcttacaattgattatcctatatgggtatgaaaactttaacatgctcctctaagtaactgaatactacagagtgattttggatcaatgtggccttattttgaatataacatacaaaatcattgagtgttttatgatttatcttcattttaaatcaagctttgggatatatgaagacaga

SEQ ID NO: 751771 - DNA, 514 bp, Homo sapiens
aatatccttttcctgtaaaaataaatgagattacctacctgaagtaccttaggcctttctaatattttcaattttcattaaatgtttatttttatgtatctatagatatcttgaatatgtattgtaaatattatatgtatgtagaatatatgtattctagtatttcttccagatagcacttaaaaaccagtgtttgcatttttgcatgtgagtaagcaattcctacttacaatgatggaagaaatagataccctggaagaaggaaaattaaattcatgctttcaaagcatccttcccaacaaatccaattcatcttttgcacagaaggaataattagatgaagatatattttaagtcagattgttagtattttggccacatggctacatcataagtgtagtttaraattctgttcatttttatttttttaaatcaaaacactcattgaactgtacttaatttttaaatgcaaaatacataaaactcttgcatttcttggaaataaattctcttt

SEQ ID NO: 751772 - DNA, 596 bp, Homo sapiens
atgaaatttttacattgattcgtagaatgagacatgaatattttttaaaatttgtaatttctaatgactatcagtatataaaactaagaattatatggctgtcaactgactaaaaactgtacataagattagagatagtgaaacaaccatatatgaacttctatttccacttttctgtctcaagaatgacttgtgaaaatgatgttttttttgaaattttacattctcattttgaaagagcttcacaaaacttacgtgagaatctggatgctcataagaggtctgattttttaatggcatgtttgtatttctgttatgtacatcaatgtcaagcattcgtttcctgagctgttctctacaacacaatttaacttgtaatrgacactcaataaaaggtcggttggatattcaaatcaacaccttagttccatcaattttcatttcatataaaaatgcctgatcttctatactcaccaatgaaacagagagagatgaaggagggagagcagttgagactgagaggatgacgagcagacctcattctgcagtggatttcctacactctccacttctgaatgcttggaaacacttgccat

SEQ ID NO: 751773 - DNA, 661 bp, Homo sapiens
tgaaagtcagtgtaggctcctctcccactagagtgctcactgcagatcttgggcttggtgcatccaggctgcacacccatagttctgaaatgatcataggctttatgttacttccccagcttggaagcagcagaggagaccctgtggctcaacgtcttttcttgtcacttggggctcccattgcagaaagatgcagaactgcaatcaattagcatgatcagcctgacatggggcagctgcactgtgagcccacgctggggggatcctgtctggtgactagcagagaatgtgggtaggacccgtgggagacagactggcctcctctcmttagagcaactacaacttgcgggataaagcactcggagtctttgctccttccctagttcaagggtaaacagggaagttaaactggagaggcagtggcagagggacttttggttgcccctgggagctccatctctgagaaatgtggagctgctgctactgggagtgttcagccagagggtgaagcagctgcactgcttgcctgagctagaggctctgcttgttggggaacagggggtcaagggcccatagcagcaagaaatggggcttttctctaaatggtggctgtggtgtgctgtacgcatggggagaaagcaaccaacttagaaaacatatt

SEQ ID NO: 751774 - DNA, 595 bp, Homo sapiens
gatgcaacaatcctcaacaaaatactagcgaacagaatgcagcaggacatcaaaaagctaattcatcatgatcaagtagaccttatcccaaagacgaaaggttggttcaatatatgcaaatcaataaatgtgattaatcatgtaaactaaagacaaaaaccacatgattatctcaatagatgcataaaaagcaaaaaccacatgattatcacaatagatgcattcaacactgctacatgttaaataaccttcaataaatttaggcattcaaatgaccacactgcccaaagcaatttacagattcaatgctattgctatagaactaccaacaacattcttcacagaactagaaaaaaactatttttaaaattcacctagccctcaaaaaagaccctggatagccaagrgaatcttaagcaaaaagaacaaaactgaagccatcacattatatgacttcaaactcttctacagggccacagtaacccaagtagcataacactagtacaaaaacagacacgtagaacaatggaacagaatagagagcccagaaataatgccacacatctacagccatctaattttcaacaaaaccaac

SEQ ID NO: 751775 - DNA, 595 bp, Homo sapiens
gatgcaacaatcctcaacaaaatactagcgaacagaatgcagcaggacatcaaaaagctaattcatcatgatcaagtagaccttatcccaaagacgaaaggttggttcaatatatgcaaatcaataaatgtgattaatcatgtaaactaaagacaaaaaccacatgattatctcaatagatgcataaaaagcaaaaaccacatgattatcacaatagatgcattcaacactgctacatgttaaataaccttcaataaatttaggcattcaaatgaccacactgcccaaagcaatttacagattcaatgctattgctatagaactaccaacaacattcttcacagaactagaaaaaaactatttttaaaattcacctagccctcaaaaaagaccctggatagccaaggsaatcttaagcaaaaagaacaaaactgaagccatcacattatatgacttcaaactcttctacagggccacagtaacccaagtagcataacactagtacaaaaacagacacgtagaacaatggaacagaatagagagcccagaaataatgccacacatctacagccatctaattttcaacaaaaccaac

SEQ ID NO: 751776 - DNA, 579 bp, Homo sapiens
acatgcgtgtttatagcagcgcaattcgcaattacaaaaacctggaacctacccaaatgaccataaatcaacaagtggataaagacactgtggtgtgtgtgtgtgtgtatacacacacgatagaatattactcagccataaaaaggaatgaattcatggcatttgcagcaacctggatgagattggagactattattytaagtgaagtaactcaggaatggaaaatcaaacattgtatgttttcactcataaatgggagctaagctatgaggatgaaaatgcataagaattatacaatggactttagggactcaaggggaaaaggtgggaagggggtgagggataaaagactacaaatagggtgcagcgtatactgctcgggtgatgggtgcaccaaaatctcacaaatcaccactaaagaacttactcatgtaatcaaacaccatctgttccccaataacctatggaaatatattttataaaaaaattatagaaggaaaacagctataatgtagaattttatatccaaatgaaatgctgttgaacattgagagcattttaaaaaatattcccagactc

SEQ ID NO: 751777 - DNA, 558 bp, Homo sapiens
aataggctttgtcactcatagactttggagttttttttttttagttatagagaatgtcatatgatttttggcttttattctgttaagaaaaacacactgcagttttaaaattttgaatattaaaacacgttcattcctgtaacaagcccaacctatgtttgtggtttacatattgcggagttttatgtataatatttaaattatttttagctaggttgtaagagagactggactgttactgtcttttcttctratgtccttgtcacatttctatgttaaaattatcggtaaccttataaaacaagctgagaaatttttcaataggggaaatatgtaagtaatgttagttttctttcctgttaatatgttttggagaattctctagtgaaacatctggacctagaacttttgtacatatatgagaaaaagttatttattatggattttaaaaatagttacaggaatattccgatttttatgtcttctcatgtcagttttggtaagtgactttttcaagttttttacaaattttattgaaactgtcaaatatgtactgca

SEQ ID NO: 751778 - DNA, 558 bp, Homo sapiens
aataggctttgtcactcatagactttggagttttttttttttagttatagagaatgtcatatgatttttggcttttattctgttaagaaaaacacactgcagttttaaaattttgaatattaaaacacgttcattcctgtaacaagcccaacctatgtttgtggtttacatattgcggagttttatgtataatatttaaattatttttagctaggttgtaagagagactggactgttactgtcttttcttctaatgtccttgtcacatttctatgttaaaattatcggtaaccttataaaacaagctgagaaatttttcaataggggaaatatgtaagtaatgttarttttctttcctgttaatatgttttggagaattctctagtgaaacatctggacctagaacttttgtacatatatgagaaaaagttatttattatggattttaaaaatagttacaggaatattccgatttttatgtcttctcatgtcagttttggtaagtgactttttcaagttttttacaaattttattgaaactgtcaaatatgtactgca

SEQ ID NO: 751779 - DNA, 631 bp, Homo sapiens
aaatataatgttaatatgatttgtcactgaactatatgataactcagtcgtacttctgtcttttaaaattggctacagttaaacttcaatctgtcaataaagtaaaagctaccaaagtgggaattctaaaattataacatgtgataaaatctcaggcagaagttttggattctgttgtttttattttctgccatttgtgccgatttgagcggtaactgacctcatgaaacatggaagtattatttatgyacaaggaactgacccctgagaaattgaaggtcagcactaaaataaaaatgtagggggaaatgcaactaataaaatgtaggaagaaaaatgtgaacagaaaatataataaacctacatgggtggtgcttacgtagataaaactgaaagaggattgtaaatagaactgtaagaatggatttgtctaccatttattatattttgttaaaaataaagaaattcaatttacaatattgaattttactagactctctggtttgaaaagctagagtttctttttcctttcagaaggcttgtattcaggtaatactgatgaagagaatcctcaagacctttacacttctgggtcagttccaagatggctgagagctgtttaaaacaacca

SEQ ID NO: 751780 - DNA, 646 bp, Homo sapiens
tttcaacaacaccaatctacatatacctgatattttatataatgcactaatgaaagcattgtgatgttaaaattagcattgtagaaaggaaattgataaatgtaactagcaaatattaattttgggggatgaatattttctaatctatttctgaaaarctattacttggttatactaatttatttgagggtaccttcccctgtatcatttttacctccacttttgaaagaagcaaacaatactccttctgaaaaataaattttaattctacagctttctatgacaacttttttgttattcataccaaagatgaagctatgcccataccttattgattatatatgcaaagagttctctatcaggaaagtttcaacatgaaagatttcttcccactgaggagtctctccattacagaaggtcaactggtaaatgttattctgtttccactaataaccatttgatcctcttttagattttcattcactctagtgttaaatgaatctttgctgaaaattattaaatcaaaactataataccttaatagagaaaaatgaatgttatgaggcagtatctcaccatcaaagttgcagagacatgtcttttcaaagtgaaatatatagcttatctagttaacaaaagggcagca

SEQ ID NO: 751781 - DNA, 632 bp, Homo sapiens
ctgtaacaattgcctggtgactatattcaacttagatcaaaacaatgcaaaaaatctactgtaaactgtgccatttctgtatcaggattttaccaagttagcacaggagtaatttatattttgagtttaaactttagagcagagsttttaaatggaaaattctgtgacaataaaaatttctataatatactgaaaccttggaacaagaattaaaggcatacaatggtatatttatggaacttttattttattttgattaatttaaatacaaatgtaaataacctcatgcgtctattggctaccatattggatagcacaactgtacagcatcagtaagatttaaactcatacgagtattatcaaatctactaaaaatagataagactttttcctatcttaaaatagaactaaggtgacattttttttccacagccatattaatggatagcaaccttttcaatactgtttcctcataagtgtatggataaacggattccaaatatatttggttaaaagcaaggcaaacaaatatattgaattcagataaggactctaggtcagagatcaatcgaaagtgggtcctgatttcaagactacattattttgtgctgagtgaaacaaatgaaagctaa

SEQ ID NO: 751782 - DNA, 596 bp, Homo sapiens
ttttaaagttatcatacacataaaaattcaaatgtattcttatctactcatagttttagtaactcctctgataaaaaagagatcatagtagaaataatcagatatgaaaaaaattaaagatttaaaaatttggtatgtattactctccactgaagacatgatcttattggtaattattggaacatcatgctatctacatacctattattttagatatttatctatccacatagwttccacgtcatgctgacacacacacatccaggtgtacacacacaatttgggcccttttacactatatcattttaaagtgatacgtgctgagatttcatctatgaaatagtcacccaattacagttcagagaatctccatctgaaaagaggtgaacacaattttcaccttgtgaatattcagaaattgaatccagggaagaaatttactgctagtgaacattgtttgtatatgaaaaatgagaacctaggaagtggctattttcataatgatataaatctggaaacacaactagaaatacacttcagctaagtaagaattgcaaagaactttgtactcgttcaaatgaaattatttcctggca

SEQ ID NO: 751783 - DNA, 596 bp, Homo sapiens
ttttaaagttatcatacacataaaaattcaaatgtattcttatctactcatagttttagtaactcctctgataaaaaagagatcatagtagaaataatcagatatgaaaaaaattaaagatttaaaaatttggtatgtattactctccactgaagacatgatcttattggtaattattggaacatcatgctatctacatacctattattttagatatttatctatccacatagattccacrtcatgctgacacacacacatccaggtgtacacacacaatttgggcccttttacactatatcattttaaagtgatacgtgctgagatttcatctatgaaatagtcacccaattacagttcagagaatctccatctgaaaagaggtgaacacaattttcaccttgtgaatattcagaaattgaatccagggaagaaatttactgctagtgaacattgtttgtatatgaaaaatgagaacctaggaagtggctattttcataatgatataaatctggaaacacaactagaaatacacttcagctaagtaagaattgcaaagaactttgtactcgttcaaatgaaattatttcctggca

SEQ ID NO: 751784 - DNA, 642 bp, Homo sapiens
agaggaataatttaagaaatgtgatcctaggcttattgtaagggatagactcattctcttatcttctaggagcaatttttcttaatggtttttgaaactgctgaccaaccattgtcattaaaaccctctctcggtttctaaaatactgaattttccttataccttataatcttcttgactactttgacttaacttttgacttagtttctatttacratctaccataaaatagaaatgtttatttaataattatttatattctctctgtgtgtacacataaacacacacacacacttccacaatcctgttagaaagttattatttctaatttataataagaatacaatgaaattgtccatttaataggaaagcccaagataagatagtaaatcctgaagccacaatacaaacacaattcagtctgatttctaagactatgttctctcgtcacgccatgctacatgtgcccttaataccatggttcaacgttcttcagttctcttactgtcatcatttataattgccttttgagagatctcatccattcttaagatttgaatgtccacttctgcatggatggcatgcaacatctccagtactggcattttccatatattgctgtaccactttggaaatgcactg

SEQ ID NO: 751785 - DNA, 429 bp, Homo sapiens
acttcaagaaggcttcagatatttgcgttaaaaagaagcccagtgctaacagccaaaacagtggggaaaagtcattgaagatatttcatagctccactttgcagtacttattttctgtgtggtcataatgaaaaggggattcattggctcatgggtcttcaggctgtaaagaaagcatggtggcttctgcttctgggaagactcaggaagcctcccaatcataccagaaggaaagcagcaatgaaatgtttcatacggcaggagyaggagcaagactcacagaggaaagaggtgccacagcctgttatacaaccagatctcatgagaactcactatcactaagtcagcatcaagaagatggtgcttaaccattggtgaaggatccaccccccaacacacctccaccccctactgtttccagacagaagc

SEQ ID NO: 751786 - DNA, 604 bp, Homo sapiens
taatttttttttttttttgagacaaggtctcactgtatcaccaggctggagtgcagtggtgcaatcttggctcactgcaacctccacctcctggcttcaagcaattctcctgccttagcctcctgagtagctgggactacaaktgtgcaccaccatgcccagctaatttttgtatttttaatagagacagagtttccccatgttggccaggatggtctcgatctcctgacctcatgatctgcctgccttggcctccccaagtgctgggattacaggcatgagtcaccacacctggccattgtttaacctttgtactaataaaacactacctttctaaaatcatgtatatgcagtagaccaatattaactgtatttttgtctgattactctaaacagcattacacaggtgcatcctctgttatctaaacttaaaataagtagaaattttactttatttatgtgattatttttctatttaagcaaacttcaagttatgtctagtcactaaaaatactaaaggtcacattttgtaagtgatacattatttgcatgataatgtttcttgtttaacttaaacattattattatttttacttattttaga

SEQ ID NO: 751787 - DNA, 604 bp, Homo sapiens
taatttttttttttttttgagacaaggtctcactgtatcaccaggctggagtgcagtggtgcaatcttggctcactgcaacctccacctcctggcttcaagcaattctcctgccttagcctcctgagtagctgggactacaagtgtgcaccaccatgcccagctaatttttgtatttttaatagagacagagtttccccatgttggccaggatggtctcgatctcctgacctcatgatctgcctgccttggcctccccaagtgctgggattacaggcatgagtcaccacacctggccattgtttaacctttgtactaataaaacactacctttctaaaatcatgtatatgcagtagaccaatattaactgtatttttgtctgattactctaaacagcattacacaggtgyatcctctgttatctaaacttaaaataagtagaaattttactttatttatgtgattatttttctatttaagcaaacttcaagttatgtctagtcactaaaaatactaaaggtcacattttgtaagtgatacattatttgcatgataatgtttcttgtttaacttaaacattattattatttttacttattttaga

SEQ ID NO: 751788 - DNA, 604 bp, Homo sapiens
taatttttttttttttttgagacaaggtctcactgtatcaccaggctggagtgcagtggtgcaatcttggctcactgcaacctccacctcctggcttcaagcaattctcctgccttagcctcctgagtagctgggactacaagtgtgcaccaccatgcccagctaatttttgtatttttaatagagacagagtttccccatgttggccaggatggtctcgatctcctgacctcatgatctgcctgccttggcctccccaagtgctgggattacaggcatgagtcaccacacctggccattgtttaacctttgtactaataaaacactacctttctaaaatcatgtatatgcagtagaccaatattaactgtatttttgtctgattactctaaacagcattacacaggtgcrtcctctgttatctaaacttaaaataagtagaaattttactttatttatgtgattatttttctatttaagcaaacttcaagttatgtctagtcactaaaaatactaaaggtcacattttgtaagtgatacattatttgcatgataatgtttcttgtttaacttaaacattattattatttttacttattttaga

SEQ ID NO: 751789 - DNA, 569 bp, Homo sapiens
gagtttcttgtatattttggatactagtcccttattagatgaatagttgacaatattttctcccattccactggttttctcttcactcagtttgctgggcagaagctctttatcttaatgtaataccatttgtctatcatttggtttttgcctatgcttctgatgtcttacccataaaaatctttgtgcagactaatgtcctcaagcatttttcctccatttacttagagtggtttcataattttaggccttaaatgtcagtcttcaatcaattstgagtttatttcattatgtgctgttacataggaagctagtatcattcttctccatatggatatttagttttcccagtgccattcatttgaagagactgtccttcccccagtgtatgttcttggcacctttgtccaaaatcagttggctgtaaatatgtggatttatttctgggtgtgtattctatggcctttaccccaagaatcattacttcgtaaaatgcaattcaaattagcatgaaacatttgcagtttaaggaaaggcttatggcatcagaatccttatttacaggattc

SEQ ID NO: 751790 - DNA, 555 bp, Homo sapiens
aaaagactcaaactcaaaagaaatataggcaagtatataaacaattgatagaaagtaaatgcaggccgtcgcggtggctcacacctgtaatcccagcactttgggaggctgaggcggttkgatcacgaggtcaggagatcgagaccatcctggctaaagcggtgaaaccccgtctctactaaaaaaaattaaccgggttttgtggcgggtgcctgtagtcccagctactcgggaggctgaggcaggagaatggcgtgaacccgggaggtggagcttgcagtgagcccagaatggcgtgaacccagaaggtggagcttgaagtgagccaagattgtgccactgcactccagcctgggcaacagagtgagactccatctcaaaaaaataaataaataaaataaaaataaaaaattaagtaaatgcaaatgacttttaagtatacaaaagtgtattcaagttcaaccataataaaactacaaataaaactctatcaatattctttcacttattagaatagcatatttaataacacaaacttcagcaaacatatagaga

SEQ ID NO: 751791 - DNA, 600 bp, Homo sapiens
tgctaaggcaaaagaaaagttaccttggcttctgctcccagtaagttgttcattttcatctgagaccttctaagcctggccttcactatccatccttcagtcacccttttaattataactatttaacacgtctctacaatagtcaaaactttcattcatctttctgtcttcttccaagccctccaaactgtgcagcctgcggtcgttacccagcttctgaacctgcttctgaacttgcttctacamtttcagctatcgttgtgacagcctggcagtgtggtaaaagaaaaaaagtccattttcagggggaaaattcaagaaggcttcagatatttgcatataaaagaagccaaatgttaatagtaaaaaatcaggaaaaaaaccttgagggcatttcatagctccactctacagtacaaattttctgtagtattattttaaaaagaggtttaattggctcacagttctgcaggctgtaaagggaacatagtggcttctgcttctgggaggactcaggaagtctcctaccataccagaaggccaagcgacaatgagatgttccatatggcaggtgtaggaggaagacagagagaggaaaga

SEQ ID NO: 751792 - DNA, 648 bp, Homo sapiens
catggctagagcagctgggatgcagggcaccaggtccctagactgcacatagagggaacctgagcctgcctcatgaaaccattttttcctctaaaacctcccagcctgtgaggagaaggactgccacaaaggtctctgacatgccctgtagacattttccccattgtcttggtgactaactttcagctccttgctacttatgcaaatttctgcagccagcttgaatttctcctcagaaaatgggattttcttttctatcacattgtcaggctgcaaattttctagacttttatgatctgttttccttttaaaactgaatgcttttaacaccacacaagtcacatcttttttttttkgggagtctcactctgtcacccaggctggagtgcagtggggtatgatctcagctcactgcaacctccccctcctgggttcaagcaattctcctgtctcggcctcccgagtagctgagactacaggcgcacactaccatgtccggctaaaaagtcacctcttgaatgctttgctgcttagacatttcttttgccagataccgtaaatcatctctctcaagttcaaagttccacaaatctctagggcaggggcaaaatgccacaagtctctttgctaaaacataacaagagtcac

SEQ ID NO: 751793 - DNA, 615 bp, Homo sapiens
aatacatcagtaagaaaatactttaacaggaacgggaaattctccaggttcagtgtgagatttccacctataattttcatttggctggcgagactgacttgcgttacttgagttatgctattttaaaagtatttgtcaccagtatgtatcccttctttgatatttttcctcccttctacagtgactttwaaaatccaaatctaatcaagctgccactgaggacatattgttatattaaacatacaaatgtttaagccttattaaatacagactgggtttcagtaaatcagaaatggttaaaaaaaacaaacaaaaaaaagaggccaggcgcggtggctcacgcctgtaatcccagaattttgggaggccgaggcgggcggatcacgaggtcaggagattgagaccatcgtggctaacatgttgaaaccccggctctactaaaaatacaaaaaaatagccaggcctggtggcgggcacctgtaatcccagctactctggaggctgaggcaggagaatggcgtgaacgcgggaggcagagcttgcagtaagcggagatcgcgccactgcactccagcctgggcgacagagcaagactccgtctcaaaaaaaaaaaaa

SEQ ID NO: 751794 - DNA, 615 bp, Homo sapiens
aatacatcagtaagaaaatactttaacaggaacgggaaattctccaggttcagtgtgagatttccacctataattttcatttggctggcgagactgacttgcgttacttgagttatgctattttaaaagtatttgtcaccagtatgtatcccttctttgatatttttcctcccttctacagtgacttttaaaatccaaatctaatcaagctgccactgaggacatattgttatattaaacatacaaatgtttaagccttattaaatacagactgggtttcagtaaatcagaaatggttaaaaaaaamaaacaaaaaaaagaggccaggcgcggtggctcacgcctgtaatcccagaattttgggaggccgaggcgggcggatcacgaggtcaggagattgagaccatcgtggctaacatgttgaaaccccggctctactaaaaatacaaaaaaatagccaggcctggtggcgggcacctgtaatcccagctactctggaggctgaggcaggagaatggcgtgaacgcgggaggcagagcttgcagtaagcggagatcgcgccactgcactccagcctgggcgacagagcaagactccgtctcaaaaaaaaaaaaa

SEQ ID NO: 751795 - DNA, 615 bp, Homo sapiens
aatacatcagtaagaaaatactttaacaggaacgggaaattctccaggttcagtgtgagatttccacctataattttcatttggctggcgagactgacttgcgttacttgagttatgctattttaaaagtatttgtcaccagtatgtatcccttctttgatatttttcctcccttctacagtgacttttaaaatccaaatctaatcaagctgccactgaggacatattgttatattaaacatacaaatgtttaagccttattaaatacagactgggtttcagtaaatcagaaatggttaaaaaaaacaaamaaaaaaaagaggccaggcgcggtggctcacgcctgtaatcccagaattttgggaggccgaggcgggcggatcacgaggtcaggagattgagaccatcgtggctaacatgttgaaaccccggctctactaaaaatacaaaaaaatagccaggcctggtggcgggcacctgtaatcccagctactctggaggctgaggcaggagaatggcgtgaacgcgggaggcagagcttgcagtaagcggagatcgcgccactgcactccagcctgggcgacagagcaagactccgtctcaaaaaaaaaaaaa

SEQ ID NO: 751796 - DNA, 623 bp, Homo sapiens
tctaaagggctggcctagaacctgagttcctcttccctttagtctaagtttagcactgcaactatcttgttccactgttcacatttaccacgaaatgggtcaaacatacaaagagagcctaaagacacttttaatacatattcgtaaatgaaagtttattaataaaattgaaggagacgtatcaacacatagtcacttcttttctagaaaacactccctactttatagaattgctatgtgtatagttcctcagtaagtgctatgtgtgaacagaagatgtagaatacagatcttttatcttcaggtcacttaatatccaagtctgaacataagaaacataaacacaaaaaagtaactttcagaaaagtgctatgcaatatatattggggatcttctaaggagggagatgccatcgtggaccatgatgatcaaagaaaggttaatagagcttcctattatgtgatactcttcaayaatatggggaagaggaaaagtgcattatggattattcaaaagacaagtgcaaatttggtgataagcatagaaaacattcagaagtatagaatgcatacattagaataatgtgattgtttcagaatatttgaatatacaattagaagtaa

SEQ ID NO: 751797 - DNA, 608 bp, Homo sapiens
acttactctaaaatcgaccacataattggaagtaaaacactcctcagcaaatgcgaaagaatggaaataataacaaacagtctctcagaccacagtgcaatcaaattagaactcaggagtaagaaactcactcaaaaccgcacaattacatggaaactgaacaagctgctcctgagtgactactgggyaaataatgaaattaaggcagaaagaaataagatctttgaaaacaatgagaacaaagacacaacataccagaatctctgggacacagctaaagcaatgtttagagggaaatttatagcactaagtgtccacaggagaaagcaggaaagatctaaagttgacaccctaacatcacaattaaaagaactagagaagcaagagcaaacaaattcaaaagctagcagaagacaagaaacaactaaaatcagagcagaactgaaggagatagagacatgaaaagtccttcaaaaaatcaatgaatccaggaggggtttttttgaacagatcaacaaaatagatagaccactacccagactaataaagaagaaaagagagaagactcaaatagacacaataaaaaatgataaaggggatatcactac

SEQ ID NO: 751798 - DNA, 594 bp, Homo sapiens
aactggatccagcagaacattgaattatttggctttacttactaaaaatgtacatgagtagatgggcttctgtctcagtgggatcaggggtcaactaatatcaaccaaggctcattctgtcccttcatttcctgtgtcagctctgcttttcaggcaagctgttttgagagagcagcaaaaatggccccataaagttcacatcacttacttccttacaaatagatatgccaataaaaagtaagcacctcattcccagcagtttcatcaraagttcagggatgacttccatgagcccagcttggatcacatgaccactcctgaatcaattaccctgctgatctgattgcccagggtgggtcagccttcccaaatcacatggactagtattgaaagacaggtcctcccatgaaaagaaaaaaaaaaaaaaaaaaaggaagggtagtggcagaggaatatgagtggggggggcctcatctctatataaaaagtatgagcgtatttgtgctcttttgtacattcatttgtatagtcactgggaaaaaaatgagaaaaacccaaacacggctttctatatgcctctgtgctttgttttca

SEQ ID NO: 751799 - DNA, 594 bp, Homo sapiens
aactggatccagcagaacattgaattatttggctttacttactaaaaatgtacatgagtagatgggcttctgtctcagtgggatcaggggtcaactaatatcaaccaaggctcattctgtcccttcatttcctgtgtcagctctgcttttcaggcaagctgttttgagagagcagcaaaaatggccccataaagttcacatcacttacttccttacaaatagatatgccaataaaaagtaagcacctcattcccagcagtttcatcagaagttcagrgatgacttccatgagcccagcttggatcacatgaccactcctgaatcaattaccctgctgatctgattgcccagggtgggtcagccttcccaaatcacatggactagtattgaaagacaggtcctcccatgaaaagaaaaaaaaaaaaaaaaaaaggaagggtagtggcagaggaatatgagtggggggggcctcatctctatataaaaagtatgagcgtatttgtgctcttttgtacattcatttgtatagtcactgggaaaaaaatgagaaaaacccaaacacggctttctatatgcctctgtgctttgttttca

SEQ ID NO: 751800 - DNA, 585 bp, Homo sapiens
accccacttttaacatcctccattcattcatttgaccctgataaggaaggagtctcatgggagaggagcaagcctccacctgggggccagacatctcatgatcaaagttgaactctaccactgttcagctgggtgactttgggcaagtgactttccctctctgatcctcatgttcctttttgataaaaacagcaaaatgtcaggcctatggggattcaaggagccaaaagaaaaatgtgtgtcttagtctgaatttcctggaagtagatccygaggcaaagattcaaatacaaaaattttgtttggagataacgctaggatattaattcgactgccagttcttccttagggtgctaatcccaggaaacatcagtggaggagtggggaactgagacaggaaaggaatgcagcagttaaagggaccttcatcaagaaagtttccactgtggcagccaggactcagccctgccaggtacctctgagagacagcacagaacatgtgcttcagagtcatcatacccagagcaagggaccaggggtatttatccaccaatacccaccagtcactcctcagggatcctccca

SEQ ID NO: 751801 - DNA, 728 bp, Homo sapiens
tggagtgcctacaacacccccaggcacacggtcagcactgagcatgtttttcattactactcttaatgaggtaagaatgagaaaacaggcgccagccatgagcctggggtttatctggcaaaggcatcagagaccccacttttaacatcctccattcattcatttgaccctgataaggaaggagtctcatgggagaggagcaagcctccacctgggggccagacatctcatgatcaaagttgaactctaccactgttcagctgggtgactttgggcaagtgactttccctctctgatcctcatgttcctttttgataaaaacagcaaaatgtcaggcctatggggattcaaggagccaaaagaaaaatgtgtgtcttagtctgaatttcctggaagtagatcctgaggcaaagattcaaatacaaaaattttgtttggagataacgctaggatattaattcgactgccagttcttccttagggtgctaatcccaggaaacatcagtggaggagtggggaactgagacaggaaaggaaygcagcagttaaagggaccttcatcaagaaagtttccactgtggcagccaggactcagccctgccaggtacctctgagagacagcacagaacatgtgcttcagagtcatcatacccagagcaagggaccaggggtatttatccaccaatacccaccagtcactcctcagggatcctcccaagggcatgatt

SEQ ID NO: 751802 - DNA, 640 bp, Homo sapiens
acagacagaagagtgctctggtgagacaggccacagaggtccccgggggggggggggatcaggggctggaggattctggaggtttccagccttgggctctgtggttcctcaaagagtttaggtttacctaggactaggcctcccctcccatgattcaaagagtgggtgagtgctatgcatcacgaactctgatctggacctattttttcatttaggtcaccaagagacaacccctaacccccaagctagggatggtccaagctctggcatgagattctcttccagcaatgtgatgcttgcagggacagggagaaaagccggtgaccaggcctgctgtcccccaggtaaggacagtgtgctacccaccctctgagaggcaggtggtgccaggtcactgcactgggtscctgtacccctggctctgcagacaccagtcatggaggtcctcccctctccacattaccttcttgctactcccagatttcttctggtcattaagcactttgagccatttttctgtgcagccgatctgatatttttgctatcagatgaaacatgacaaagtaagccgagccaccaggattcctggagggaaccttggatgctgcgtcttgggatccagagccctgatgggactgaa

SEQ ID NO: 751803 - DNA, 643 bp, Homo sapiens
acgctctaatccaaaaccattttgaggatacacttctaatttggtcactatcaaatttcctggattttacccaaagaaaacaccagtcaatgctctcatttctccccctgacattttgcagctctttttctcacacagtttctatttttgagtacatattgctgtatatcaagaatcagtaaactttttctgtaaagggtcagacagcaaatattttcagctttgggggttataccatctctgtcgcagctcctcagctgctgcctttttgacacaagagaagccataaaaatatgtaaacaaaaggctgtggctgttttcccattaaaatgtatttataaaaatagggggtgagccaaatttggcctggaggctgtaatttggtgacccttgcttcatatacacaacaataactcagaatttgtaaggcaaataaacaaataaaatwaatgaccagcatgcaatagtattcaattggtactagaacgtccttggtttcttggaaggcttagtagtcattttgtactaaatggcatttttttttttttttgatagtcaggaagtcttctggaacagcctgtaataaaagtggtaatcttggggatgtatatgcagggatcctgaagttgtatagactgtgaaa

SEQ ID NO: 751804 - DNA, 628 bp, Homo sapiens
atcattgcctcataattaattctgtgtttatatgcacccctttccctaacactatatattctttgaaggaagtggtggtagcaattatatttataactcctatgcctcatagctggtgtccacatgtgttgcctagacagagtaaaagttcagctatcgacacaggttattcttctctcctgttgcctatgctttcagcctttgtgtgcgcgttcaaggaaagacacacgtagacacccatcatgcatggcataatttcactctctctaacagccgmatgctcaacttggtcaaatgctctttaattagcaaactctaatccaagtctacgttacagctctttcatgatttatttgattttagtggatttcttttagtagattcatgggaaaaaaaaaatacactctctagcctgttcactttagctttggggctgaaggagctcccaaggcacgtcctggtgagttatgtaccctggaggagcagtgctttaggctcccatcactaatttattatgctgacctgaaacactttgaagagtattggggcacagttctgtcttctattagatcactccctagttagcatcacccagttcttttccctcttgctcattcatttattcaaa

SEQ ID NO: 751805 - DNA, 628 bp, Homo sapiens
atcattgcctcataattaattctgtgtttatatgcacccctttccctaacactatatattctttgaaggaagtggtggtagcaattatatttataactcctatgcctcatagctggtgtccacatgtgttgcctagacagagtaaaagttcagctatcgacacaggttattcttctctcctgttgcctatgctttcagcctttgtgtgcgcgttcaaggaaagacacacgtagacacccatcatgcatggcataatttcactctctctaacagccgcatgctcaacttggtcaaatgctctttaattagyaaactctaatccaagtctacgttacagctctttcatgatttatttgattttagtggatttcttttagtagattcatgggaaaaaaaaaatacactctctagcctgttcactttagctttggggctgaaggagctcccaaggcacgtcctggtgagttatgtaccctggaggagcagtgctttaggctcccatcactaatttattatgctgacctgaaacactttgaagagtattggggcacagttctgtcttctattagatcactccctagttagcatcacccagttcttttccctcttgctcattcatttattcaaa

SEQ ID NO: 751806 - DNA, 628 bp, Homo sapiens
atcattgcctcataattaattctgtgtttatatgcacccctttccctaacactatatattctttgaaggaagtggtggtagcaattatatttataactcctatgcctcatagctggtgtccacatgtgttgcctagacagagtaaaagttcagctatcgacacaggttattcttctctcctgttgcctatgctttcagcctttgtgtgcgcgttcaaggaaagacacacgtagacacccatcatgcatggcataatttcactctctctaacagccgcatgctcaacttggtcaaatgctctttaattagcaaactctaatccaagtctacgttacagctctttcatgatttatttgattttagtggatttcttttagtagattcatgggaaaaaaaaaatacactctctagcctgttcactttagctttkgggctgaaggagctcccaaggcacgtcctggtgagttatgtaccctggaggagcagtgctttaggctcccatcactaatttattatgctgacctgaaacactttgaagagtattggggcacagttctgtcttctattagatcactccctagttagcatcacccagttcttttccctcttgctcattcatttattcaaa

SEQ ID NO: 751807 - DNA, 650 bp, Homo sapiens
actgggtaacaggcagaggttggaacagtctgaaggactcagaagaaggcaggaagatgtgggaaagtttgaaacttcctagacctttgttgaatggctttgaccaaaatgctgacagtgatatgggcaacaaagtccaggctgaggtkgtctcagatggagatgaggaactttttggaaactgaagcaaaagtgtgactctttctatgttttggcaaagagactggtgacattttgcccctgtcctagaaatctgtcaaactttgaacttgagagagatgatttagggcatctggtggaagaaatttctaagcagcaaagcattcaagaggtgactagggtactgttaatagtattcagttttatgtattcacaaagctatgatggttggaattggaacttatgttaaaagggaagcaaaaaatataaaagttcagaaaatttgcagcctgatgatggagtagaaaagaaaaacccattttctgagaagaaattcaagccggctgcagaaatttgcataagtaacgaagagccaaatgttaatcaccaaaacaatggaaaaatgtctccagggcatctgagaggtctttacagcagccctttccatcacagacctgggggcctaggaggaaaatatggtttcatgggcc

SEQ ID NO: 751808 - DNA, 650 bp, Homo sapiens
actgggtaacaggcagaggttggaacagtctgaaggactcagaagaaggcaggaagatgtgggaaagtttgaaacttcctagacctttgttgaatggctttgaccaaaatgctgacagtgatatgggcaacaaagtccaggctgaggtggtctcagatggagatgaggaactttttggaaactgaagcaaaagtgtgactctttctatgttttggcaaagagactggtgacattttgcccctgtcctagaratctgtcaaactttgaacttgagagagatgatttagggcatctggtggaagaaatttctaagcagcaaagcattcaagaggtgactagggtactgttaatagtattcagttttatgtattcacaaagctatgatggttggaattggaacttatgttaaaagggaagcaaaaaatataaaagttcagaaaatttgcagcctgatgatggagtagaaaagaaaaacccattttctgagaagaaattcaagccggctgcagaaatttgcataagtaacgaagagccaaatgttaatcaccaaaacaatggaaaaatgtctccagggcatctgagaggtctttacagcagccctttccatcacagacctgggggcctaggaggaaaatatggtttcatgggcc

SEQ ID NO: 751809 - DNA, 517 bp, Homo sapiens
cacttgaacccaggaggcagaggttgcagtgagccgagatcatgccattgcactccagtgacagggcaagacttcatctcaaaaaaaaaaaaaaaaaaacttagaatatgctaagcagtcaataaacatcagttactattatcagtagtgccattaactcctatttttctgatggggataccaaattccctggtgtctatttcttcacacactaacatgtgagagattaaaaactagctaagactggaatgcaaatcacttctaggtcctcagcacttcactgataggagatgkagtcaattcaaactctccaggccttctttaaaaaaactagatcaatcctttaaaaagcaaacattcaatagccaatatcatgtagacctaaaaaatcattgcatgtcctttgctgagagtggggaggagaagtttctttcactttttctaggttgaccacaagtaattaaatacataaagatcaagaacaacaacaaaggcaggctaactagttttgcttcct

SEQ ID NO: 751810 - DNA, 622 bp, Homo sapiens
aaatttgaccctgtagcagtagagagtagatgagtggttcctagagtctgggtagggtatggggaagggaagaatagtcagaaattggttaatggatacaaaattacaagataggaggaataagttctagtgctctataacactatagttaacagtaatttatcttgtattttcaaatarctagaagagaggtgatatggtttggctgtgtcctaacccaaatcttatcttgggttgtagttcccataatccccacatgtcatgggagggacccagtgggaggtaactgaatcatggggttggttatttccatgttgttctcatgatagtgagtaagttctcacgagatctgatggttttataaggggcttttccccctttgctcagctcattctgtctcctgccaccctgtgaagaggtgccttccgccatgatagtaagtttcatgagtcctccccagccatgcagaacagtgagtcaatgaaacctctttcctttataaattacccagtcttgggtatttcttcatagcatcgtgagaccaggctaatacaagaagattttgaatgttcccaacataaagaaataatcagtgttcaaggttgtagatatgctaattacc

SEQ ID NO: 751811 - DNA, 623 bp, Homo sapiens
ctgaagaccccagaatttccccagattaagttcaataaaagatgtttgcatcattgaattttagtaaacattagttgaataaactattaaatggttagattgattataaatgtatgagattattttccaaaatatacatttgctcatctaatttagaatgagtaaatcccagttttctcccyttttcccatttcccacagcctttataacatcttttttagcatattagggaactaaatttttttaaaaaacctggtaacttaagagaaccctatatagatctccaatgggtctatcctaaagagtttatctcagaaattcaaggctatctggtttcctggcacccataaatcacagcttaaccaaatcacatcatagtgaaagcattctaagtttaattttaccttgagatttatgaagcttctaatgatatttacagtcacgcatatgataaataaatgcataacaagttctatagaatgtttggatattcagagaaattttccaagaacgctttgtgaaagtttattaaacgcctagagatcagaaaatacaaccactcatttgattaactatcataactcttcattttctgttgcctgtaagcattgtcatgcagattt

SEQ ID NO: 751812 - DNA, 507 bp, Homo sapiens
aaggtacttttaagctttacaaactacatatctcagtgcatttaaataatagtcttaatctaaataaagaaaacacttaaaatgaaaaacctttttaaaaattaatttgcagtagaaacaaaactattgaaggataaattgtagaaactgaagattctttacagttagatgggaaacatgcaagtcatttaaaaataattagttctgcaaaagtatacatgaatggaaggtctyggaaaggaggcaaagaattaatttccccaaagacgctgcaaataaaattgtggttggcacttttcattctgcagaaacaccttttattggtattttgtctgttcccttgggtgacattttaaaatagtgtgtgcactaatgattgtccagtaacacaaatgagaaaggcaattttgaaacattccactctggacagacactctgagcccagccttggttggtctcttcttaaggaggcctaaaaataaattgcaaaagtagctattcagacct

SEQ ID NO: 751813 - DNA, 586 bp, Homo sapiens
gctatatcctgagtgattttctccctgctggatctgtccttttctgatagagggacattaaagtctccaactgtaatgattcatctatttttccttgcagttttgtcagtttttgcctcatggtttttgactatttttaggcatgtacacattaaggattattccgacttcttcagataattaacccttttattattagcaaattgtttaacatgarcaaactgttaattgttagatcaattactaattaaaaacttaaaagttttaattttaccttcacatattccttctctgtgttctgcctttctttatgtaatgtagatctgagtttttgacttttataattttcttctttctaaagaatttctttaaacatttcttgcaaggcaggtctacttgcaacaaattccctcaatttttatttgtctgagaaagtctttaattctccttcatttttgaaggataacttgtcagggtacagaattctaggttagtattttttttttttgtttcctcttaacactttagatatctcactccactgttttcttgattgcatgatttatgaggagaagctggatataat

SEQ ID NO: 751814 - DNA, 527 bp, Homo sapiens
aattattcttcagtgttcaatgcatatcttactactaccacattgacctaagccagtgtggctatgccctactcttaggttctttttggtaggtaatggtagcctccaaagaaatttgaaaaagataagggctagctatttcttacaacctcattattagggtctcatgaaagcaaatctcagaccaaattttgctgcacatataaacrtagcatatagaaatgtattaactaaatattaataagcaggcacaggtagttctcgtaacctgaggaaagcccatcctttagtcctaagagaggctctgaccaacaccttgcaggaaaggggtcatgtaagggagaattctgcttccttcatagcctgcaataggcaaacagtcttccacatatcacagtgggatattggaatattcagcttaaaggaaggcatcatccataaggaaaaaacatccatgctccactgcattctgaaaggatgagtcagatctttaaaatactttttaaccagatcatatttcttaaatg

SEQ ID NO: 751815 - DNA, 621 bp, Homo sapiens
gccaccttacactgaggcaagtcttctgaactaccagatgtttaaaaaaaaatagatcagattctggttctgaattttttcagcagcaatcacaagagttgaatttttattcatttgtctgctcattcattcattcattcatttattcatctattcatcactcaacaggcattcattgtgctaaattccttgtgctaaattctgcttggtgaatatttgcaatcttcgtattattgttcaagtgattgccygttttttgaaaaataacaaacagaaagaagattatgaaggccaggcacggtggctcacgcctgtaatcccagcactttgggagggtgaggcagttggatcacctgaggtcaggagttcaagaccagcctggccaacatggtgaaaccccgtctctactaaaaataaaaaaaaattagctgggcatagtggcagatgcctgtaaacccagctatgaggcaggagaattgttttaaccccggaggcagaagttgcagtgagccgggaccgtgccactgtactccagcctgggtgacagagaccctgtctaaaaaaaaaaaaaaaaaaaaagattatgactttgcatagaattcagttgggggatggagagga

SEQ ID NO: 751816 - DNA, 642 bp, Homo sapiens
tgacatcatttttatgacaaactgtacccatatctttggaatttttgcaaatttagcatcaatcatgcatttttccagtcattttcattgaaatttcattctatttatcttgttggcaaagtgaaaagcaatttttgtttgctaacgctgccttttccctcgctgcattaaaaagtgatgatggtaaaaaaaaggggggtttttcttttcttcttcagggaagcccccagtgtgctcatttgtatgtacagtctatcawtgctattttagcctattttcattttatttatagctttgaatcatttattatttgcttggaaagattttgcctagaactcttaattggtacacatagcaattaaaactttattacttaaatatttttcagaacaggaaagaaaaggtacccaaatcagcataatcaatttagccataaaaccctaagtctgactttttattttatttatgatacgcattttgttctaatgctttgtaagtagcatagctcttctttctagttctacataaatgagattcatgcctaatgtgcctccaattttcaaaaacaatccctcaaatacagttttaacttgccattaagactgtgtctacccatcataaaatgaatgtttgggaaggaat

SEQ ID NO: 751817 - DNA, 365 bp, Homo sapiens
cttggtaacagtgtggatttcaaatattattaaaagtatacagttaattagcatgattgaggtaatctgttcacaatgaatacttacatagcattgtacaccttagatctacacaattttcctttttcaatcatacgtcaataaagctggaaaaaaaattaatgcattggctcatattacccttctgctgaaatttttcactgscttccaactcattcagagaaaagtccaagtccttatttactgttatttctggcagcccacaaagacagaagtgattgggcctctctaatcttatatcctgttattcttcacctcattcactgtctacaggcatgacagctttgttactaatccttgtttat

SEQ ID NO: 751818 - DNA, 624 bp, Homo sapiens
gtaagtttgtttaagtttcttatagatgctggataattgataatgaactctagaatgtgggagatttttaataaaagaaaatttaattaaattttcaaacaaaaagtttagctttatttaaataatttttatttgaatgtttgttattcattaatattattttacatcttaatgcttattattttgaatatttagaagaaatttgaatatttagaagaaaactaatttaacatatagaaataactttaatgtttggaatttttacacggtaagtcatatttgtgtaaaaatctattaaaatatttgtatactttgaatacgattgcctttatttttttaatcatttagaccctgttagaagaacaaaaattgtaaagaaattttgatggcaaagccataattagcaccttcactacaataaakatttttttaaatttggaagtaatacagaattatttataatttatgcacatcttcattttattactcattcaaatattgccaaccaacataataatcacatttatgcagtcatggttaaaattcacacatctttgctattttgctgataaactatagctttacacatttaaaaaattttattgtgattaaagaatcatttgt

SEQ ID NO: 751819 - DNA, 557 bp, Homo sapiens
ttagacagaaagtgcaggccctgatagctgactgagtgagactagcctgttcatgaggcttgtaggcagcttgcactggccatgggccaataagcaggagccctcaccagttgctgcctatctctcacttgtgtatgttttaacaaggcattgcatttgtaagtgtatcaatataagacaattctagaagagttaattacaaaggaagtaacactacccctgtagatagtgcagaacccttgcgctagaagcagccaagttggtaccactgggagagaagcggccagaacccaggagagagattaaaatggggaagggcggactaagaggggyagtggtcttgggtggggaaacaaacctaaaatgatttcacaaggaaagaatgagggggaatagttctcttatttcatttgacatgtccctctgatccccaaccagggctttccattggtgaaatccacctggaagtgagagggtcagagaccttgaagatgcagtccttatcagtcagcactccagagcagagaggaggtgaaaaggggtggaaatggatttga

SEQ ID NO: 751820 - DNA, 596 bp, Homo sapiens
caatcatgaacatcctgaatatctcattacaactaaatggtgagacatttgtaagtaatgtaccagccttcattaagtaccatctatgtccataaaccagtaattttcatttttgaaaacttgtgcacactgttcagaagctagatctgaatcctgcaataaaactcaaacttctaattttatggatactagtgcaaataattctgacttaatctataaaaattttaagattacatgtaagaaaaagttgtaggcgctaggcatcaaagagggtcagggaagttcccctaacatagaattgtcaaagaaataatcaagatgaccatgatgcatggcaagaatgatccatgaaagtgatatctacaatatagtaggaagractttgcggagctcatcttgcagaaacgtcaatttgaacaagtatttacgcataactatacaatcacaagagctgaggagtccaggtgagagattatagcacctggatgtagcacagatgtaagaagagatgcaataaagagggcagaatgaacagtgtcacattacccacatcaccccttccccaagcttgcacagtattgcatttatagagaaac

SEQ ID NO: 751821 - DNA, 635 bp, Homo sapiens
cagcctaggtggtgatttcacagggaaaacatggtgaatcactttttcactgcctcattgacataatgaggataatatacatatgaagattatatatatacatatgccatttactacttaaaggctgggacttgacaagtccttttcttgaacacaaagactaatatcacaaagggcatcttttttttcagtacctggtttctagttgctaataatctatcaggctcataatataaaataaatttatgttattttatgtgccctaaaagggctataaagtacaaataaaccttgagctatctttcctggaagttcagaagaatactgtgagagcatagtaacacgagtagaagaaagaatgcctgtacaatgaagacatattcctttatggatcattcctgagagtaaaggtttcataaaatttgttgggaaacaaagaaaataggtcatttaaaaaatgtatgaggctkgtttaaaataagccaaatgattgcattctcttgattatcccagatttatctctttctttcctagaattaagtgggtctgaaataatgtttgattgatgtttttctggtacaaaacacgtataacctatttgcttattaggaggaaattcagttcaccattgaaca

SEQ ID NO: 751822 - DNA, 647 bp, Homo sapiens
cttatccctggtattcacaaactctgccatggataggtaatgaaaacactatctccttgataacattctgcttcttgatgtgggtgctggttacgctggtgtatttagtttttgaaaactcatcaaatgcaaatgtatatgtactatttctatatattatgcatcaatttaaaatgtaaaagaaaaaaaagaaagattacctcctaaatgctttcaacattgaggtttggacatagccctgtatttttttcgaatgagttgaaaagggacatctagaggcagcttggcttgtaacttgagacgatgttttccagagaaacaaatactctctttcatgttacccatggtcccagmccgagcacactcctcttcccagtcctaggaatgaaagaaggaatcatccagacactactctgctaaatctggcagaggctcctgagtgcaatgacactgaccaggaaaaacaaagatgaggatcctgctggactgtaactaggactctggagtgcaaaatgaatgttgactttctcaatgtggacagtgacatacgttttactacagtttctccagaaatgcttcttaaccatttattgtgagaattacagtcaagagagtaaattattacattctttagatggtccttgcag

SEQ ID NO: 751823 - DNA, 520 bp, Homo sapiens
tgtatttttttcgaatgagttgaaaagggacatctagaggcagcttggcttgtaacttgagacgatgttttccagagaaacaaatactctctttcatgttacccatggtcccagcccgagcacactcctcttcccagtcctaggaatgaaagaaggaatcatccagacactactctgctaaatctggcagaggctcctgagtgcaatgacactgaccaggaaaaacaaagatgaggatcctgctggactgtaactaggactctggagtgcaaaatgaatgttgactttctcaatgtggacagtgacatacgttttactacagtttctccagaaatgcttcwtaaccatttattgtgagaattacagtcaagagagtaaattattacattctttagatggtccttgcaggtaaatgacccaatctgtggaaagtcaggttctatcagtcctcaaggggactgggctttgttttatggtgactgagacatcaaactactttggtggggtctggatatattca

SEQ ID NO: 751824 - DNA, 670 bp, Homo sapiens
aacatgacttcaagtaatacaaggatccaaaagagactgtaaaatagggatgtttcaaataatcacagagaggaaaacagacatgaacaataaggaaagaacaggagaatatggggaaaaaatagatttgaggagaaaaagaaacttctggaaatgaaaaacaaagtcatggacatctgctgagatcaacagcagattaggtggtgctaaagrgagcataaagtaactgaaagacctgaagtaattgaccaaaacgtagcacagaaaaacagagatggaaaatataacggagagattaaagacaagaatgctaagatttaaaattggtgctgtagggattctatcaggagatcacagagaagaggagaaagtcaatattgaaagagataaaggatgagaatttaacagaattgatgaaagatccactagtttcctatggctgctgtaaaaaattactataaatttggcagcataaaataacataaacttattatcttatagtcccttaggtcagatgtctgatgcaggtttactgggttaaaatcaagttgtcagcaagactgcattcctttgtggaggcgctaagggagaatcattttcttcccttttccagcttatagaggccacccacattccttggttcctggccccttcctccatcatcaaaggc

SEQ ID NO: 751825 - DNA, 670 bp, Homo sapiens
aacatgacttcaagtaatacaaggatccaaaagagactgtaaaatagggatgtttcaaataatcacagagaggaaaacagacatgaacaataaggaaagaacaggagaatatggggaaaaaatagatttgaggagaaaaagaaacttctggaaatgaaaaacaaagtcatggacatctgctgagatcaacagcagattaggtggtgctaaagggagcataaagtaactgaaagacctgaagtaattgaccaaaacgtagcacagaaaaacagagatggaaaatataacggagagattaaagacaagaatgctaagatttaaaattggtgctgtrgggattctatcaggagatcacagagaagaggagaaagtcaatattgaaagagataaaggatgagaatttaacagaattgatgaaagatccactagtttcctatggctgctgtaaaaaattactataaatttggcagcataaaataacataaacttattatcttatagtcccttaggtcagatgtctgatgcaggtttactgggttaaaatcaagttgtcagcaagactgcattcctttgtggaggcgctaagggagaatcattttcttcccttttccagcttatagaggccacccacattccttggttcctggccccttcctccatcatcaaaggc

SEQ ID NO: 751826 - DNA, 670 bp, Homo sapiens
aacatgacttcaagtaatacaaggatccaaaagagactgtaaaatagggatgtttcaaataatcacagagaggaaaacagacatgaacaataaggaaagaacaggagaatatggggaaaaaatagatttgaggagaaaaagaaacttctggaaatgaaaaacaaagtcatggacatctgctgagatcaacagcagattaggtggtgctaaagggagcataaagtaactgaaagacctgaagtaattgaccaaaacgtagcacagaaaaacagagatggaaaatataacggagagattaaagacaagaatgctaagatttaaaattggtgctgtagggattctatcaggagatcacagagaagaggagaaagtcaatattgaaagagataaaggatgagaatttaacagaattgatgaaagatccactagtttcctatgrctgctgtaaaaaattactataaatttggcagcataaaataacataaacttattatcttatagtcccttaggtcagatgtctgatgcaggtttactgggttaaaatcaagttgtcagcaagactgcattcctttgtggaggcgctaagggagaatcattttcttcccttttccagcttatagaggccacccacattccttggttcctggccccttcctccatcatcaaaggc

SEQ ID NO: 751827 - DNA, 622 bp, Homo sapiens
gcaccacgctgagggttctgactgtcagccagggtaatcaggagccatcgacacatttggttggggaggggtgtgtgtataaagggttgacttggccacagctgcatttctggaagatcattctgcctgccttatgcagaatggattacagggcaggaagcatgaaaggaggcagacttatgagacggctaattacagcagtccagacaaaatagcctagtagtggactgtaatggttatggtggaaatagaagtaaacatatgaaagagctattcaagaataaaggtgaaccggccttgagacaggtttgcacatggggccacgacaagagcggtgtgaaaagggactcctgcatgtctgctgtgttcctgagagtagtggtaggattgtgggctgaggccaagggcactgaaggaagacctggagtcttctcccartggggaagtggataagctttcaatcaaggagactgtgtcatctgtttcactgactctttccttaaggggcatttctgttcatctcctggttctctgctgtatcccagacaggagaaatattacagcaaacccactagcttcagaatctacttaatgcacacagtaatgtatgaatttctgccca

SEQ ID NO: 751828 - DNA, 614 bp, Homo sapiens
tataccaggctgcatagggagtgagaagtgagttttgttttgtcttcacacaaaattgaaggaccaatttgaagtaaaatattaatctaaaatcttcattgtcaaaatcatcttaaaataaaattcattacttgtttaaagatggatggcaaactcacataatagttaaaactgaactattaccttatgtgcacaatcccatttaatcctcacatcaacccactgaaggggaggttaggactatcatacmtaatttacaggtgtggaaactgaggctgtgagaattaaagtgctcaccctaagagccaaaagttgaacccaagcctgcccactctgatgcctaagatctgcatcacctggctatattaaaacagagctgatttactgctccgtgacaaggcaagctggatggcagccaggctcaggagctagaattggccactatggaaaaagaatgcagctgaaggagctggaagtccagtctggcaagtgtaacctgacactcaaggccacagcagtagatggtaggtggtgtcccaacagacacgtggatagtgggatggagaacccagaacaatgggccagagggcagcatccggaaatcctgcccagca

SEQ ID NO: 751829 - DNA, 562 bp, Homo sapiens
attcatataccttcagaaccagcggaggcccagcacaaagaacgacacaagtcattctttgttgaataaatgaatgagtgaataaatgaataaacactagacttacaatggaggacctacagaagttcttacctcttgatcaaaagacataggggaaaaaagcaagaggctggaagataggataaaaaaattgtggtgttgggggtctccttctagccccctaaaagacacaggtgcaaagcactttccttccagtccattctccccagtgttccaatcactcttatcatcttggggagcagatacaattaacagagagaacagaccaacccagggggagttcagcttgascacttccggtcatcaatcatgtcaggaggtgaggtggaggggagagttaaataaaagagaagactcatcagttctacagttgagtggaaccaaaagcccctagtcccatgtacagaatccttgctctcaggacctgaatgcaatagcagggctcaaattcacaggtgcattcaagaaaaaaaaaaatcttagccacagttaactgtcatct

SEQ ID NO: 751830 - DNA, 557 bp, Homo sapiens
actacaaaacctagaagaaattgataaattcctggaaatatacagcctctcaaggatggaccacaaagaaattaaaatcctgaaaagatcaataatgaattctgaaattgaatcagaaataaaagcctacaggccaaaaaaaaaaaaaaaaaaaaaaaaggccctaccagacatatgaagaagagcgaataccaatcctactgaaattatttcaaaaaaatcraaggggatgtagtcctctctaattcattctacatagccatcatcattctgacaccaaagacttccagagacacaattaagaaaagaatacttgaggccaatatctctgatgaacctagacacaaaaatcctctacaaaatactggcaaagcaaatctatcagcataccaaaaaattaatttgccacagtcaagtgggccttatttctgggatgcaagatttgtttaccatatgcaaatcaataaatgtgattcatcacataaacagaattaacaacaaaaacacattatcatctcaatagacacagaaaaggcctttgataaaatttaacatct

SEQ ID NO: 751831 - DNA, 636 bp, Homo sapiens
ccctacatactcagtctgcctctggatagggggaccacaggaccagttgagtcatgagtccacaacgggccagtgagttgtcagaatgcaaaaatctgaaatacacctcaaaaggcgactatttgcctgtacaatactgatgttatctatagaagccattgagaaaatcacaagtcctgtgacatctgaccacatgactccagagcaaaaaggaattataaaaattatgcatacattttagcagaactcaggcccttcccacaatcctcatctcgtggcctttcattagtcttacaaaagttgttttgtgcccctaagcaaggaagcgtttagttttagggagggactattataattcttgctttcaagttaaactataaactaaattcctcccatgattaacttggcctatacmcaggaataagcagagacaatcagcctatgagggtagaagcaagatggagtcagccatgctagacttctctcactgccataatctctgcaaaggcagttcaacaccataatataaaaaatgctaagtattcaccaacatgagatacatggtgtcatatatcaaataataagtacacattcagctagagcagtgcttctcagcttaaatatacatatggatca

SEQ ID NO: 751832 - DNA, 543 bp, Homo sapiens
ctattgtctcgtatatggttatattaaacatttttgttcaccagccaggaaaaaatactcttagatactatatactttcaagagtcagcctgcgaataacttttcatatcctttcctgctcttactttgatgctaacctaaggctgcttccaggtggtaacttagtgaggtatattgctgtccaatcaattgactgattgcattctttttctcatcacttcccttgtcttgctttcctttcggctgagaaaattctgcgtttcttaacacattatcatttcaacaccctatctattggcctacaggtttttgtcgttgarcacatacttagcagtagcagcaggttgctgaaatcttgggatccaacataaaactatttgtaatagccggtagatcctaaataacacagtttctccagagctagaaatggtagctacttttctttatatttcatgaagaaatagagctgcaatctcaaataactagaataggcttaaagacctggatagttaacatgatagatttgaagagacaaattaaaaa

SEQ ID NO: 751833 - DNA, 589 bp, Homo sapiens
tagaccaagaattttattccagggctttataaaatcaagtttagtgtttgacccattcttccttatttaaattggtcctgattctcaaagtagtggtcaataattaaacaggtttccgtaattctaataaagcccctcccatatttgtagaaatattctccaaaggcatgctttaaacacagtggggtggggatacgttgattaatcatcatatttaattttgtgggaaccacatggacagtgtagctaaaagagtgatgcctctattgtcccctgattctccaggtaaattgctacctgaaatattcagctcccaactttttttccctgctgaaatattaaataatttagcccttatagtctttcacttagactctgttatatatatttagatcattgcaatatgactcatctacttacatgtttgctgtcyccataaaaaaagaaatcttgagaaaaaggacaacattagattaattttaatattccagtatatagaatggtgacaggtaagtcttattaaatgttcaacaaatgaatgaacagtaacccagagttttctgtctcattaactctaattattccccct

SEQ ID NO: 751834 - DNA, 577 bp, Homo sapiens
ctgcaaattaacctaacttttatgctctgtttttctttaaaattgaatgcctttaacagcacacaagtcacctcttaaatagtcttccaccagatacccgaaatcatctctcacaagttcaaagttacacaaatctctagggcagggaaaaatgccagcaggctttttgctaaagcataacaagagtyaccttttctccagttcccaacaagttcctcatcttcctctgggactacctcagcctggaccttattgttcatatcactatgagcatttttgtcaaagccattcaacaagtctctaggaagttccaaactttcccacatttttctgtcttcttcggagccatccaaactgttccaacctctgcctgttatccagttccaaagttgcttcacattttcaggtatcctttcagcaatgtcccactctactgattcaaatttgctgtattaatatgttttcataaagctgataagaacatacatgagactgggcatttacaaaagaaagagatttaatggataactcacagttccatgtggctgtggaagcctcacaatcatggcagaaggaa

SEQ ID NO: 751835 - DNA, 577 bp, Homo sapiens
ctgcaaattaacctaacttttatgctctgtttttctttaaaattgaatgcctttaacagcacacaagtcacctcttaaatagtcttccaccagatacccgaaatcatctctcacaagttcaaagttacacaaatctctagggcagggaaaaatgccagcaggctttttgctaaagcataacaagagtcacctttkctccagttcccaacaagttcctcatcttcctctgggactacctcagcctggaccttattgttcatatcactatgagcatttttgtcaaagccattcaacaagtctctaggaagttccaaactttcccacatttttctgtcttcttcggagccatccaaactgttccaacctctgcctgttatccagttccaaagttgcttcacattttcaggtatcctttcagcaatgtcccactctactgattcaaatttgctgtattaatatgttttcataaagctgataagaacatacatgagactgggcatttacaaaagaaagagatttaatggataactcacagttccatgtggctgtggaagcctcacaatcatggcagaaggaa

SEQ ID NO: 751836 - DNA, 606 bp, Homo sapiens
tgatttctggaggatatttttacctggttcatttaaaattctgggttgttagcattttacttttggtcttttccttctgtttggtttttagcaattttagtatgaggtgccaagatgtggcattctttgtatttatcctactttgggcttgtagygcatcttgaatctgtggtttaatgacttataccatttgggaaaaatctgagtcagtttctcttcagatcttgcttttccctcacttgcttttccttctctttcagtgattccagttagacgtgttagacctttcaccatatccgtttcatttacacttgtttcctgtattttctttctttttatctatctgtgcttcattctagatattttcctttaacctacattttaactttttctctttttttagtggctaactgtagctaaccacttgctcatttcttaattttgttcatttttcagctctacagtttcagtttggttcttttgtatatagtttcatattctctacccaaatatttagtcttagccattcatcatctctttgatcacattaagcacatagcagtttaaaagtctgtatctgttcactgtattgcctgttcctgtgtg

SEQ ID NO: 751837 - DNA, 606 bp, Homo sapiens
tgatttctggaggatatttttacctggttcatttaaaattctgggttgttagcattttacttttggtcttttccttctgtttggtttttagcaattttagtatgaggtgccaagatgtggcattctttgtatttatcctactttgggcttgtagcgcatcttgaatctgtggtttaatgayttataccatttgggaaaaatctgagtcagtttctcttcagatcttgcttttccctcacttgcttttccttctctttcagtgattccagttagacgtgttagacctttcaccatatccgtttcatttacacttgtttcctgtattttctttctttttatctatctgtgcttcattctagatattttcctttaacctacattttaactttttctctttttttagtggctaactgtagctaaccacttgctcatttcttaattttgttcatttttcagctctacagtttcagtttggttcttttgtatatagtttcatattctctacccaaatatttagtcttagccattcatcatctctttgatcacattaagcacatagcagtttaaaagtctgtatctgttcactgtattgcctgttcctgtgtg

SEQ ID NO: 751838 - DNA, 493 bp, Homo sapiens
cttttctcttccaggatcccgtccaggatcccacattccatgtagtcactgcctccttaggctcctcctggctgtgacagtttctcagatttcccttgtttctaatgattgtggcagttttgaagagcaccggtcaggtattttgtagaatgwcccttgtttgggattttgcaaatgttttcttttggttagactggggttatgtgttttggggaggaagatcacagaggggaagtgacacttttatcaaatcataccaagggtgcatatcaacatgacttgttagtgtcaatgctgaccttgatccattggctgatgtagtatgggtcaggcttttccacagtaaagttgctgtctttattccccttttcattgttgtattctttggaagtcactatgtacagccaacctttaaagggtggggagttggctgggcaaggtggctcatgcctgtagtcttagcattttgggaggccaaagcagatggatcgct

SEQ ID NO: 751839 - DNA, 477 bp, Homo sapiens
aaacataagattagaagtgtgtactataccaacatatcaatcatggtaatcaatgaatggcaagattatagatcttagctttatgttgttatattttgttttttgctgctgttttcttaattttctattatatctgccatcttcagccagacagaaaaaaaaattcgattataaatataacaatttcatgagatgaaaaaataataaaatcaatctttaaatgtatgactttgaggtgctggtgaaaagcagtaaatactggaagcaggtatatttaatcaagagattaaacacttcttgagctaaaaataaaaagawaccctgagaatctgtgagaggctcgaagagcagaaaaatacacaggaacatttcactcccctccccctgccaccctccttctagcattgcttttattttttaaaattagcgtgatgatttgcctgtgtttttcctttcaatagtatcactgtttcattg

SEQ ID NO: 751840 - DNA, 648 bp, Homo sapiens
ggaaaacataagattagaagtgtgtactataccaacatatcaatcatggtaatcaatgaatggcaagattatagatcttagctttatgttgttatattttgttttttgctgctgttttcttaattttctattatatctgccatcttcagccagacagaaaaaaaaattcgattataaatataacaatttcatgagatgaaaaaataataaaatcaatctttaaatgtatgactttgaggtgctggtgaaaagcagtaaatactggaagcaggtatatttaatcaagagattaaacacttcttgagctaaaaataaaaagaaaccctgagaatctgtgagaggctcgaagagcagaaaaatacacaggaacmtttcactcccctccccctgccaccctccttctagcattgcttttattttttaaaattagcgtgatgatttgcctgtgtttttcctttcaatagtatcactgtttcattgaacccaagtgactgcctaacagccttctccattgctgccaacttattgatttagaagtactcctcagatgtgcaagtgtggaggaagactccaaaccccagactgtcttttgtcattccacatgtatgtaggaagatgaaatcaaacacctttgtgctttagacccac

SEQ ID NO: 751841 - DNA, 606 bp, Homo sapiens
ttttgtttttttttttttttttttgattatggccattcttgcaggagtaaggtggtatcacattgtggttttggtttgcatttccctgatcattagtgatgttgagcattttttcatatatgtattggccatttgttatcaagcactttaaactttattctaaaccatgcatgtgaaaaatgattattttctgtaaaaaccaagtgattttttcctgagattaactcagttttagttttgtgagataattagataaacacagtcctgtattgaatttaraaacacagcctctattactcaggctcaagtagaagattctaaatagttatataaactgatgacatctttaagtctacttccccagccctttctgggtatcttgcatatttggtctcactgtacttccttgttacattcactgttgcagtcagccacactagctggcttggccctgatggaacctacttgcacctcacctgtgactcctgttgcagttggaggctgataaagtttttatcatggaagtttttgccttcttcctctcagtcccaagataaagctaattcaagtggttcttttgtttgttttctagtcagtgttctctgc

SEQ ID NO: 751842 - DNA, 480 bp, Homo sapiens
gacaaaagtgactccatcttggatgctaatctgccatgttgacttctgattaaccccagtctggggaatgcctctaagatttctatttttatctatgtatactgtctgtaaatcctgttcttaggccaagacacccttgatgttatcaaatcctgcccttargctatgacacacatagcattcttcccttttcctgagaggtggacttcaattgtccttatacattccttctaaagcacatataccctttctctgtggtatatatctgggagaaaactgtggaaatctacctgtctggcagctgcccaagaccatccttttgtccataagttccccagtaaataaccctctactgacaaactggatttgtctgccttgttctttggtttcttggttccttctgcatttgggggttggtttgcgtatatggccctttcatgaagcacacatcatgtcttttgtttttttatttttaagata

SEQ ID NO: 751843 - DNA, 591 bp, Homo sapiens
agatcttatctgttagactagaaatataccctgaagtatttacaggtgaaataaaacaaatgtctgtgatttgctttcaaacataccagcaagaaaaacaaataaaaaacaagagttggagaggggtaagagggatgaaagaagaatggcagaartttgcgatttttaaaactgaacaatgagtacctggcattcatcttactcttctacatgcttttcaagtgtgtttgaaactttctgtaatgaaatgttgaaggccaagctaaggagtatggactttactgtttggcacccagaaacctgtgaagagtgttagcctgaggagggacgtgagagggactgtgagatacccagagagtttagcctggcaacagtgggtgaagtggccaggaaggaggaggactcaaccttgatgaaggtggccatgaggatggaaacttttttgagaacagatagaggaaatagtggcaaaagaggaactctttggtgtgttggcagtagagaagtgaatcaggtgcatgacagggaaaattcccttcttcctcttcagtaagtagcatttattgtcctgaaaccactgcactggatact

SEQ ID NO: 751844 - DNA, 535 bp, Homo sapiens
ggagattgagaccatcctggttaacatggcgaaaccccgtctgtactaaaaatacaaaaaattagctgggcgtggtggctggtgcctgtagtcccagctacttgggaggctgaggcaggagaatggcatgaacttgggaggyggagctggcagtaagccgagatcatgccactgcactccagcctgggcgacagagcgagactccgtctcaaaaaaaaaaaaaaaaaatccatgtttaatatttgactcccccaaaactttattaatagcctactgttgaccagaaaccttactgataacatgaacagtcaattaacacatattttgtatgttatatgtattatatactgtattcttacaatagagtaaggcagagaaaagaaaacgttattaagaaaatcaggccgggcgcggtggctcatgcctgtaatcccagcactttgggaggccgaggcaagcagatcacgaggtcaggagttttgacaccagcctggccaacatggtgaaaccctgtctctactaaaaatacaaaaat

SEQ ID NO: 751845 - DNA, 639 bp, Homo sapiens
taaatttatttatttatttatttatttatttatttgagatggagttttgctcttgtcacccaggctggagtgcaatggcacagtcttggctcactgcaacctccgcctcccagattcaagcaactctcctgcctcagccttcccagtagctgggactacaggcacccaccaccatgcccagctgacttttgtatttttggtagagacagggtttcactatgttggccaggctggtctcgaactcctgacctcaggtgatccacctgcctcggcctcccaaagtgctgggattacaggcatgagccaccatgccaggcttaaaacagtctaaatttcaaggaagaagaaacatgttctacttcataaagctgcatgtgatagggtgctaactgggaaatcggagatgctctccatagactccactgtcagtgtctgtgttcctagtgaatgagggagccagtgactagtttgcctgtttgttakcaggagtgtctgctacatgctgtggcatgaagcaagttatcaattttctttggactttgtagtgagcatactcaggtgatgagcacttgtttttttttttctttcttcttcttcttcttattatactttaagttctagggtacacgtgaacaacat

SEQ ID NO: 751846 - DNA, 536 bp, Homo sapiens
aactttgaatgcaatcgaagggaatcatcaaatggaattgaatgcaatcatcgaatggaatcgaatgccatcaccgaatggaatccaatggaatcaccattgaatggactcgaatggaattatcattgaatggaatcgaatggaatcatcgaatggactcgaatggaatcatcatcgattggaatcaaatggaatcatcgaatggaatcgaaaggaatcatcatcaactgtaatgaactggaatcactgaatggaatcgaatggaatcgtcatcaaaaataatcsaatggaataatcaaatggaatcaaatgcaatcaacatcaaatggaatcgaatggaatcctagaatgacatcgaatggaatcctcatcgaatggaatcaaagggaatcaatatcgaatggaatcgaaagcaatcactgaatggacttgaatacaatcatcaaatggatttgaagggaatcctcattgaatggaatagaacaaaaacattgaatggacacgaatggaatcatcatcgaatggaaacaaatgga

SEQ ID NO: 751847 - DNA, 461 bp, Homo sapiens
gactcaagtgatccaggacaggataacaggcgtgagccaccacacctggccatgtgcatgaacttttaagacaaacacagggccccacaaaagttaaggttttcccacctaatttccaggagatcttttggtgcaaggatgagaaacccttaaaagtacacagamaactccaaagattcaagagagttcattcgggctgagccagcccactgggcagactgaccttcaaacaaggcccacccatgacatacaccagatggctctccaagaatctctctagttctcagggtccctaaggtactggacagagctagggaggcaaacccatttgcttcttcctgcaggaaaccccttgaggtcaagaccccacaatcagacgaggatggagtggctcaccctcagtcaacaggccagactcaaggtgttataatgtcttaaccaagggtgcgggcctccaggtc

SEQ ID NO: 751848 - DNA, 461 bp, Homo sapiens
gactcaagtgatccaggacaggataacaggcgtgagccaccacacctggccatgtgcatgaacttttaagacaaacacagggccccacaaaagttaaggttttcccacctaatttccaggagatcttttggtgcaaggatgagaaacccttaaaagtacacagaaaactccaaagattcaagagagttcattcgggctgagccagcccactgggcagactgaccttcaaacaaggcccacccatgacatacaccagatggctctccaagaatctctctagttctcagggtccctaaggtactggacagagctagrgaggcaaacccatttgcttcttcctgcaggaaaccccttgaggtcaagaccccacaatcagacgaggatggagtggctcaccctcagtcaacaggccagactcaaggtgttataatgtcttaaccaagggtgcgggcctccaggtc

SEQ ID NO: 751849 - DNA, 603 bp, Homo sapiens
tattttattttatttttcagagagggtttcactttgtcacccaagatggggtgcattcatgtgatcagagctcactgaagccttcacatactgtgctcaagcgattctcccacctcagtctcctgagtagcagggactgcaagtgcatgacaccatactagctaatttttgtaaagatggggtttcaccatgttgccctggctgatctccaactcctggactcaagagatctggccaccttggcctcccaaagtgctgggattatagatttgaggcaccgcaatcagcccagccttaaaaaagggtgactagagatctttatctatgtatatctrtctataaaataaacatatgtgtttcttatataaaaatatatactattaatattatataaaaatttttttcaaggtagaaatatataaagagggtgcatgtagagcctggggcattgtgtagtgaagctcaaggcctctgaagaaatgatccttgcctcttttgtctgggctagaatccgagaagggaaagcagcagatgcactggttcccaggttcttggcatcctacagagagaaacttgtttgagctagggtagcgttaaacaccc

SEQ ID NO: 751850 - DNA, 458 bp, Homo sapiens
agtcatacagaccaaaaggaggaatgtcgcccagccctctaaactgacccagaacccagctcatgtctcaactgctacctctcctacttagaaagaagtaactccgccaaagcagggttctggacaaatatatttttattgatcatatacaaatagatgaagatggacttggatgttaagaaaaataatactatacaaaatcaagagtagacagtcaccmctagacttaaattaagggtgtgtacattagataatttaatccaatgtatcaggtaaaaacttgaacgaaccttttagcctcttccttaaaattcaggaaagcatgtcctccacaaaacagaatcaaaatataaataaaagactggcttaagatgaaaggaaaccttacaaatgaaaagaagccagatgagaggcccttaactgagaatgaaaagaaattgagtggacaaaataattat

SEQ ID NO: 751851 - DNA, 458 bp, Homo sapiens
agtcatacagaccaaaaggaggaatgtcgcccagccctctaaactgacccagaacccagctcatgtctcaactgctacctctcctacttagaaagaagtaactccgccaaagcagggttctggacaaatatatttttattgatcatatacaaatagatgaagatggacttggatgttaagaaaaataatactatacaaaatcaagagtagacagtcaccactagacttaaattaagggtgtgtacattagataatttaatccaatgtatcaggtaaaaacttgaacgaaccttttagcctcttccttaaaattcaggaaagcatgtcctccacaaaacaraatcaaaatataaataaaagactggcttaagatgaaaggaaaccttacaaatgaaaagaagccagatgagaggcccttaactgagaatgaaaagaaattgagtggacaaaataattat

SEQ ID NO: 751852 - DNA, 610 bp, Homo sapiens
acatgatcatgcaattcttgtttcttattctatggataagatgtattaccttaatggattttgggctgttaaaccaacctgagattactagtataaatttcactttgtcatagtgtataattcttgtatatgttgctagatctgatttgttagtagtttttaaggaattttgcatttatacttatagtagttttatttttctatgctatttggactaatttttgtatcaaggtaacactggccccatagaataaattgggaagtgaatatttctcttttttawaaaagtcagtcaagaattaatattaattagtcaatactaacaaatatgattaatattataaattattaatttctctaatttttattttcttccttctgcatgctttaggtttagtttgctattctttccagtgccttaatgtggaaggttatcttatctcatcctttcctttgtcttttcattttcgaaatagtgtctttttagcatcaggtgagctccccaggttggtagtactccatgtttattgctgtacaacaatgacaggtaatatgtcctgaagacaatggaaatttaacattcaaaatcctcctagattccaccttatgt

SEQ ID NO: 751853 - DNA, 513 bp, Homo sapiens
ttgactccattcaatgatgattccattcgattccattcaaagattcaattcgagtccattcaacgattccattcgattccacttgatgatgattcctttcaagtccattcaatgattccattcaattccattccacaataattcctttcaagtccattcaatgattccattcagttgcattcgatgattccatacgatttcattcgatgatgattccatttgwgtccatttgatgattccattagattccattcgagcataattcctttcgagtccattcgatgattccattcaattccattccatgatgattccatttcattccattcaatgatgattccattcgagtccattctatgattcctttgtattccattcgttggttccattcaattccattcgatgatgattgcattcgactacattcaatgattccactcgattccatctgatgattggagtccattcggtgattcctttagattccactcaaagacgattccattcaattcc

SEQ ID NO: 751854 - DNA, 563 bp, Homo sapiens
aatatcgaatggaatcgaaagcaatcactgaatggacttgaatacaatcatcaaatggatttgaagggaatcctcattgaatggaatagaacaaaaacattgaatggacacgaatggaatcatcatcgaatggaatcaaatggagtcatcaaatggactcgaatggaatcatcatcaaataggatcatcatcaaatggaatcgaatggagtcatcgaatggacacgaatgaatgaacaaatggactctaatggaaacatcaaatagaatcgaatggaatcatcgaaaggaattgaatggaatgattgaatggacwcgaatggaatcatctaatggacacgaatggaataatcataaaatggaatcgaatgtaatcatcaaatggactcgaatgaatggaatcattgaatggactcgaatggaatcatcgaatggactcaaatggaatcatcatcaaatggaatcatcatcaaatggaatcgaatggaatcatcgaatggactcgaatggaatcatcaaatggaatctaaccgaatcgtcatcgaatggaatcgaatggaatca

SEQ ID NO: 751855 - DNA, 547 bp, Homo sapiens
tgagccatgatgcgcagacacaaagacatttttaagcaaaaaattaacttcaactctcacttttactgaagcaacacagcatttaaaaacataggcatggggtgcagtggctcacacctgtaatcccagcactttgggaggctgaggcagatggattgcttgagcccaggagtttgagaccagcctgggcaatgcggtgaaactccatctctactaaaaatacaaaaattagctgggcatggtggcacatgcctgtaatcccagctacttgggaggctgaggcatgagaatcacttgagcctgggaggtggaggttgcagtgacccgagatcgcaacattgcattctagcctggrcaatgggagtgaaaccctgttttaaaaaaaaaaaaaaaaaattctatggccggacactgtggctgacatctgtaatcccagcactttgggagggtgaggtgggtggatcacctgaggtcagaagtacaacaattagccagacgttgtggtgggcacctgtaaccccagctccttgagaggctgaggaaggag

SEQ ID NO: 751856 - DNA, 547 bp, Homo sapiens
tgagccatgatgcgcagacacaaagacatttttaagcaaaaaattaacttcaactctcacttttactgaagcaacacagcatttaaaaacataggcatggggtgcagtggctcacacctgtaatcccagcactttgggaggctgaggcagatggattgcttgagcccaggagtttgagaccagcctgggcaatgcggtgaaactccatctctactaaaaatacaaaaattagctgggcatggtggcacatgcctgtaatcccagctacttgggaggctgaggcatgagaatcacttgagcctgggaggtggaggttgcagtgacccgagatcgcaacattgcattctagcctggacaatgggagtgaaaccctgtttwaaaaaaaaaaaaaaaaaattctatggccggacactgtggctgacatctgtaatcccagcactttgggagggtgaggtgggtggatcacctgaggtcagaagtacaacaattagccagacgttgtggtgggcacctgtaaccccagctccttgagaggctgaggaaggag

SEQ ID NO: 751857 - DNA, 607 bp, Homo sapiens
gtcatcattacaggtgatgtgaagagagaaaagttttaactttttacaatcttgaaaggtgttgtcctgtatgatcagtataaacctacttttttgtgttgggttaatttttttcccactcatttgcataaaatccagggttctctatgatcccagcataaaatcacatttaaagaaacacactcttttgtttatccmttcatcttttaatgagcatttgggttggtttcagctcttggctattgtgaatagtgctgctatgaacacacatgtaccaatatctcttcaagatactgctttcaattcttttttggatatatgcccagaaatgggattgctggatgtattagtccattctcacaatcctataaagaactacctgagactgggtaatttatgaagaaaagtggtttaattgactcacagtttctgcaggctgtacaggaaacatgactgggaggcctcaggaaacttacaatcacagcagaaggtgaaggggaagcaggcatatcttcacatggtggcaggagagagagacagagtgaaggaggatgtgctacacacttttaaaaaccagatctcatgagaactctgtcatgagacaata

SEQ ID NO: 751858 - DNA, 647 bp, Homo sapiens
agatggctagaatgcaccccacctatgaagagcagtggacatggctgggagtagagccagaacaagccctcaaaagaacacaggccaaactggagactcggggcagccaagtggaaccagaacaggacataaagtgagcttgtacatccaacagccatgagtaatatcaaaaaggttgtagcctggccaacacagcgaaaccccatctctacaaaaaatacaaaaagtagctgggcgtggtagcatgcacctttaatcccagctacttgggaggctgaggcaggagaatcacttgaacccagggtgcagaggttgcagtgagctgagattgtgccactgcactccagccagggtgacagaatgayaacctgtctcaaaaaaaaaaaaaaaaaaaaacaggttgtaacctgtccaagataccccccatacatctaaaacaattaaacacattcaacaaagtaaacatgtttctgtcctctgtctcatgtctctcaggcagcagggcttcccatgtattttatgctggcaggcactgtcccacacccacctgaagccacagtgtcttaaggcttcttctgttgtaaaacatgcctttggatccactaccaacaacttcttgacaaggtccagagctaaagcaacaattg

SEQ ID NO: 751859 - DNA, 566 bp, Homo sapiens
ctatgaacatttgtgtacaaattttagtgtggatgtatattttcatttcccttgggtatatccctaaggaatagactatctgggtcatatgataattgtttaagactacaggcacgtgccaccacacctggcaaatgtttaaaaattttttgtagataaagggtctcgctgtgttgcccaggctgatcttgaactcctggcctcaagagatcctctcacctcagcctcccagaaagtgttgggattacagatgtgagtcactgcacctataaaagaggctcatacctctttttacatattttttttgagacagggtttcacyctgttgcccaggctggagtgcagtggtgggatcacagctcactgcagcctggacctccctccatatgattctagctgtgggtgtctttcctgtagtttttattatgttgtggtatgtttcttctgtacccgtttctttgaggattaatagcatgaaggatgttgaatttcaccaaatgctttttcagtttcagttgacatgatcatactgtttttgtcatttatttgattgatatgatgtatca

SEQ ID NO: 751860 - DNA, 633 bp, Homo sapiens
gtgagtttccttttctccacatttgccaggatttgctattgtctggcttttagataaaagccactttaactgaggtgagataaaatctcattgtagttttgatttgtacttatctgataatcagcgatgttgagcaccttttcataggcctgtttgccatttgtatctattttttttgagaaacaaatattcaaaattttcygattttcaaattggattattaaattattttctatagagttgtttgagctccttatatattctggttattaatcccttgacaaatgggcagtttgcaaatatttttttcccattctgtggactgtctcttcacattgataattgtttcctttgcagtgcagaagttttagcttccgtttgtccatttttgttttggtttcctgtgcttgtggggtattactcaaggaattttttctcaaaccaatgtctgaaagagtttccctaatgtttcttgcagaattttcatagtttatggtcttagacttatgtctttagttaattttgatttgatttttgtaaatggctagagatagaggtccagtttcactcttctgcatatgaatatccagtttcctgggcaccatttattgaaagactgtcctttccccagtg

SEQ ID NO: 751861 - DNA, 580 bp, Homo sapiens
ttgtatgtgtctaggaattcatttattgtatctagattttccaatttgttggtatgtagttgctcatagtagctgctaatgatcctttaaatttctgaaataccagttgtaatgtctccattttcacttctaatcttacttgcatcttctctctttttctattagtctggctaaatatttgtccacttactttaactttttaaaaagactactttttgttttgttgacttttgttctattttttatttcagtttcacttatttcttctctattttttattatttattttcttcagccagttttgggtttgatttgctcttgcttttctagttctttaagatgcrtcattagattgtatatttgaagttttttctcttttttgatgtaggcatttagagctatcagctttcatcttagtactgcttttgctgtgtcccataggttttcgtatgttgtgttttcattatcatttgtctcaagaaatcttctaatttttctcttaatttcttcattgatccactggttattcaggggcacaatttttacttttcatgtattcatgtagttttcaaattcctct

SEQ ID NO: 751862 - DNA, 615 bp, Homo sapiens
tagtaacactagtcatagcaatcagacaagagaaagaaataaaggggatccagattggaaaagagggagtcaaactaacactgttcacctatgatatgatcatatgcctagaaaaccctaaagattcctccaaaggctcctagatttgataagcaaatttggtaaagtctcaggttacaaaatcaacgtacacagattaatagcaccactaaataccaacaatgaccaagcmgagactcaaatcaagaacgcaatccctttacaacatctgcaaacaacaacaacaactactactactactactactactactaggactatacttaaccaagcaggtgaaagatctctacaaggataactgcaaaacactgctgaaataaataacagatgacacaacaaatggaaacacatcacatgctcatggatgggaagaatcaatattgtgaaaataaccatactgcccaaagtacaaattcagtgcaattcctatcagaacaccaatatcatttttaatagaattagaacaatcctaaaattcatatggcatgtggaaccaaaaaggagcccaaatagccaaaacaaccctaagcataaagaataaatctggaggcatca

SEQ ID NO: 751863 - DNA, 615 bp, Homo sapiens
tagtaacactagtcatagcaatcagacaagagaaagaaataaaggggatccagattggaaaagagggagtcaaactaacactgttcacctatgatatgatcatatgcctagaaaaccctaaagattcctccaaaggctcctagatttgataagcaaatttggtaaagtctcaggttacaaaatcaacgtacacagattaatagcaccactaaataccaacaatgaccaagccgagactcaaatcaagaacgcaatccctttacaacatctgcaaacaacaacaacaactactactactactactactactactaggactatacttaaccaagcaggtgaaagatctctacaaggataactgcaaaacactgctgaaataaataacagatgacacaacaaatggaaacacatcacatgctcatggatkggaagaatcaatattgtgaaaataaccatactgcccaaagtacaaattcagtgcaattcctatcagaacaccaatatcatttttaatagaattagaacaatcctaaaattcatatggcatgtggaaccaaaaaggagcccaaatagccaaaacaaccctaagcataaagaataaatctggaggcatca

SEQ ID NO: 751864 - DNA, 619 bp, Homo sapiens
aaagtaatttgcccttcagcaaaccctctgtctttcatcactgcaaataatcagtagaatttatttacctttatttatcaaaccagtagtgctcaacagaggcagaggtaggaaagaagggggaagtaggttacccccagggggattttttaaatatgtgtggggtttcctgagtggcatttaaaggacacagggccaatgctgctagcattcccatatgtgggacagttcttcacagcaaaatatcatcttgccttttgcacagctggagcaacccacttgacatttatgcgtatgaaaaacctatttatgcttctctaaaccttaagcctacttccattttacatatcatcagaaagtatttttgcatatttaactaattcctgtctctcccaggaatgcaactctgtgtatattragtaaaggctttactttgttttgtgcagaactttagcaaatactgttcaccatttcagaaaatgatatcatggaacccaatgctgttcaatgactctccctccccgatgtagtccaccaataaagcattttcactggtcaccttcacggtgaatctattataacctattatattggatacaatctatatattggatgcagg

SEQ ID NO: 751865 - DNA, 591 bp, Homo sapiens
atttttgcccagaccaatgtagagagtttcgctgatgttttctcatagtagtttcatagttttaggccttagatttaaatctttaatttgttttcatgtgatttttgtatgtggtgacagataggggtctagtttcattcttctgcatatggatatccacttttcccarcaccatttattgaagagactgtcttttccccagtgtgtgttcttgggacctttgttgaaaacaagttcactgtaggtatgtggatttgtttctgggttctgtattctactccattggtctatgtgtctttttcagagccagtcccttgctattttggttactgtagctctgtagtataatttgcagtcaggtaacatgattccttcaggtttgttctttttgtttaggttgtctttgtctattctgggtcttttgtgcttccatataaattttaggattcttttttctatttctgtgaataatgtcagtggtatttttgaaagagattgcattgcatctgtagattgctttgggtagtatggacattttaacaatattgatttttccagtaaaaaaatggaatatctttccattttttggta

SEQ ID NO: 751866 - DNA, 627 bp, Homo sapiens
tgtagtataatttgcagtcaggtaacatgattccttcaggtttgttctttttgtttaggttgtctttgtctattctgggtcttttgtgcttccatataaattttaggattcttttttctatttctgtgaataatgtcagtggtatttttgaaagagattgcattgcatctgtagattgctttgggtagtatggacattttaacaatattgatttttccagtaaaaaaatggaatatctttccattttttggtatcctcttcaatttctttcatcagtgttttataattttcattatagagatctttcacttctttggttaattcctaggtatttaattttatttctacctattgtaaaagggattttaaaaaaattctctttcagattgttcactgttggcatatagaaatgctactgatttttgtaggttgatttagtatcctrcaactttactcaatttatcatttctaatagatttttttgtggagtctttaggtttttccaaatataagatcatatctccaaacaaagatagtaaaaatcttttaagaaacttgctgagtgtgttcctgacagaattcattttaaaaacatatcactgatatttttatttaattacatctgct

SEQ ID NO: 751867 - DNA, 627 bp, Homo sapiens
tgtagtataatttgcagtcaggtaacatgattccttcaggtttgttctttttgtttaggttgtctttgtctattctgggtcttttgtgcttccatataaattttaggattcttttttctatttctgtgaataatgtcagtggtatttttgaaagagattgcattgcatctgtagattgctttgggtagtatggacattttaacaatattgatttttccagtaaaaaaatggaatatctttccattttttggtatcctcttcaatttctttcatcagtgttttataattttcattatagagatctttcacttctttggttaattcctaggtatttaattttatttctacctattgtaaaagggattttaaaaaaattctctttcagattgttcactgttggcatatagaaatgctactgatttttgtaggttgatttagtatcctgcarctttactcaatttatcatttctaatagatttttttgtggagtctttaggtttttccaaatataagatcatatctccaaacaaagatagtaaaaatcttttaagaaacttgctgagtgtgttcctgacagaattcattttaaaaacatatcactgatatttttatttaattacatctgct

SEQ ID NO: 751868 - DNA, 561 bp, Homo sapiens
taacagcttaggccacagctcaataaattttcatgcactgaacacatgtaactagcttccaaatcaagaaacagaacatgtgaatgtgtacccttggtcactacttcaatcaaggcaaatcttgatggttgtcccaccttccaacacaatagatgacttctgtttcttttgtttctttttttcttttctttttyttttttttttttttgagacggagtttggctttgtcgcccaggctggagtgcagtggtgcgatctcggctcactgcaagctccgcctcctgggttcacgccattctcctgcctcagcctcccgagtagctgggactacaggttctcaccaccacgcccggctaattttttgtatttttagtagagacggggtttcatcctgttagccaggatggtctctatctcctgacctcacgatccacccgcctcagcctcccaaagtgctcggattacaggcctgagccaccgcacccagccttctgtttctttttatacactctagaaatggaattacagagtatttgtctttgtccattttctgttgcttat

SEQ ID NO: 751869 - DNA, 574 bp, Homo sapiens
aagcacctgctcttctttgaaagcattatttgaatgttaattttcaatgaatcctcctcttcccaagggaaattttagccaacacatctgaactttttgtgctctcgtgatgctccctatgtactgtgttcaagggcagggacattatcttctacaggtattactgatctcttgcataggtctgcatgggccagatacttaataaatattggctgaataaaataactgtgagtggtagctcatttggaataggaacctaggataactttagactggtgagaacaaaatggcagccctgttcacatatacagaggytggcacttaggagtccctcctgtgtgaagcagagaattgttgctgtagcaaacctgttttcaaaaacctcttcattcatgaaaagagagtaataacaacagggaaaattatgtgaatttggaacaagagcaaaataagacaatgtagcaatagtagacagtgtaattacttgatatgaatgttaggcagtgtattaatgtatttcttttgcaccgtaaggtccaaaatagtagcattgaatgccacagcctatgaggta

SEQ ID NO: 751870 - DNA, 456 bp, Homo sapiens; identical to SEQ ID NO: 739131

SEQ ID NO: 751871 - DNA, 613 bp, Homo sapiens
gattaatattttcaaaggatgtggatcccatgttgacagcttttgccttcaagtactctaataatgtcttatgactgtcttctggcttacataatgtcttatgagaagtctgcaagtatccttatctttgtgataatgagtccttttccccctctgctgttaaaacrttctctttcttactcatttttagcaacctaattaagttatgctttggtgtagtttgatttttcttcatccagcttgtggctagttaggctgtttggatctgtgggtttatacttttatcaaatttggaaattccaatgatttatacaaatatgttttaaattcatgctctcttcttggactcagattacatgttagactacttcatactgtcccactgatgctttattaatgtttccagacttttttcctactctttgcttcagattatagagattctatttccaccttccagttcactaacattttcttctggaaaacttaatgtgttgttactcataggcagtgatttattcatttcatatactgtagcttttatctctagaagttctatttgattttttatatttttatactctttgtgtccaagtatttcttgaaattctta

SEQ ID NO: 751872 - DNA, 629 bp, Homo sapiens
tctctttccactttcccacttttttttttttttttttttcttaaaattagacccaaaaacctgtccttgagacagccaagttggcctttaagggcagcgtttacatgacttccagtcttttcttaattgactatctctgaaaaatgtagtaggccactttaattttcatacttttagtctttcttcccacatattgcagcatcacaccttctattcctcaatgcctcttgtcctccttgcccaacatgttcagaatctatgctaaagaaagggctgttcctatgtgagtgcatgctatgtgcataagagaatggtactttctcattgcagagaaaaatagataaataaataaaacctttttcctctcttgtgggctgaaatrtgttctcccaaaatttacatattgaagccctgatccctagtacctcagaatgttactgcatttgtaggtagtacattacagaaggtaataaagttaaaattaggccatagtgtgagtcttaatggtatctcactagtgtccttacaagagaagattagggtttacagagaaacactaagatttcacaggcacacactaagaaaaaaagaccatattaagggacagtgagaagatggtcatttccaag

SEQ ID NO: 751873 - DNA, 542 bp, Homo sapiens
tcctttgtttttattatcattgcttgactgtaggttttatttcctttgtgttattatataagtttatgttatcttataatacaaatgtgatttataaacatatatataatttaaatgtaaatattatttataaataattgctatgtgctctaaactggtttmtctgcccccaacttctccccactgttacccactgttcacatttcactttctgaggtacaattatggtattttatactcttctgaaagatctctatttatcatttgcagagattaaaattcctttgcatggagtacaagtcctttcataatcttctcccaacttatttttcaagtttaattttcttcaatcactcagcatgagctcacactccaaatataaacaactacttgtcattcctgtataatatgtgtatctgtatatagattttaccttaggactttctcataactacctcttgaatttctgtctgatttcttttgactccacatttcacgtttctgggaagtcttaactgagttagtcattccttcccctgtcc

SEQ ID NO: 751874 - DNA, 696 bp, Homo sapiens
tactcttattgcaagtttatacaaacagtaaatagaaagtggacatttaactatataaataaataactgaaactatgtttttgaatgaaaatgaacattttctaattaatttttgaattaaaaaaaacagcaacaatagccataattttaacactacaaaaagatttcactttatcagcaatataagaattttataaagtaaaactgcatgtaaaatagcattaccacgaaatattttattgtcttttagaaaayttgataaacctacagaaaaaattctcggaaaataaattttttttcatcaaattaatgctgtggactgaattgtgtccccaccaaattcatatgttgaagccttaccctctattgtgactgtatttgcagatagggttgctaggagctaattaaggataattgaggtcgtaagggtgggatcctaatctcataggattggtggccttataagaagaagaagagagagaatgatatctctctttctccaggtacacacatgcaagaaagaccatgtgaacacatagcgataaggcagttgcttacaagcttggaagagatccctcaccagaaaccaaccagaatggtgccctgatcttggatttctaggcttctgaactgagaaaattagttccttggtttaagtcaccttgtctgtggtattttgttttggcaacccaagca

SEQ ID NO: 751875 - DNA, 696 bp, Homo sapiens
tactcttattgcaagtttatacaaacagtaaatagaaagtggacatttaactatataaataaataactgaaactatgtttttgaatgaaaatgaacattttctaattaatttttgaattaaaaaaaacagcaacaatagccataattttaacactacaaaaagatttcactttatcagcaatataagaattttataaagtaaaactgcatgtaaaatagcattaccacgaaatattttattgtcttttagaaaacttgataaacctacagaaaaaattctcggaaaataaattttttttcatcaaattaatgctgtggactgaattgtgtccccaccaaattcatatgttgaagccttaccctctattgtgactgtatttgcagataggkttgctaggagctaattaaggataattgaggtcgtaagggtgggatcctaatctcataggattggtggccttataagaagaagaagagagagaatgatatctctctttctccaggtacacacatgcaagaaagaccatgtgaacacatagcgataaggcagttgcttacaagcttggaagagatccctcaccagaaaccaaccagaatggtgccctgatcttggatttctaggcttctgaactgagaaaattagttccttggtttaagtcaccttgtctgtggtattttgttttggcaacccaagca

SEQ ID NO: 751876 - DNA, 633 bp, Homo sapiens
gttttcattttattatttttatactctattataacacacacccttatgtccattttttctagtattagaaacatttctggcatttaaacttaccctcttctgtctcagtccatatagcttgagtgggattgacctgtccccaaggcatgagtgagcttgtgactcaggactgtgcaatcaatcactgtagttttggttcaaggacaggcatatcaactgtattgggccagttaagtttgctgtaggattttctgggggaaagtggagaaacagaatacattagatgactattgtctygatgtcataataatatcgtaagcacttggatatagctaggctgcagattgctctcttgacttccatccttttgaaagttattttgacttaggcctctgttgtttttaacagtaagagcccttttttaatgcatatagttcatttaatgtactactaagacaaatattggacccttttaaatgacttgtactgtagatggcaggtagataaatcatgcaaggcaggtcaccttgttagccaatgttcctctgatgtccattgtagatgctggggttaggatccactctagggacatggattttttacttgttgccactggcagtggtcattagtgct

SEQ ID NO: 751877 - DNA, 633 bp, Homo sapiens
gttttcattttattatttttatactctattataacacacacccttatgtccattttttctagtattagaaacatttctggcatttaaacttaccctcttctgtctcagtccatatagcttgagtgggattgacctgtccccaaggcatgagtgagcttgtgactcaggactgtgcaatcaatcactgtagttttggttcaaggacaggcatatcaactgtattgggccagttaagtttgctgtaggattttctgggggaaagtggagaaacagaatacattagatgactattgtcttgakgtcataataatatcgtaagcacttggatatagctaggctgcagattgctctcttgacttccatccttttgaaagttattttgacttaggcctctgttgtttttaacagtaagagcccttttttaatgcatatagttcatttaatgtactactaagacaaatattggacccttttaaatgacttgtactgtagatggcaggtagataaatcatgcaaggcaggtcaccttgttagccaatgttcctctgatgtccattgtagatgctggggttaggatccactctagggacatggattttttacttgttgccactggcagtggtcattagtgct

SEQ ID NO: 751878 - DNA, 557 bp, Homo sapiens
cccaatattatatgtaatgttcagttaaatttggatttcagataaactgtgcatttgttttagtatgtgtccgaaatattccatgggacatcctcatattataaatgtgtttgtctctttttatctgaaaatcaaatttaactggatataaygcatttgtatttgttaaatctgggaaccctaatacctcgtaacaacctatgaggaagttagagcaggtgttagacttttctaattatacagacaagaaaactgaaattctaaaagtccgtaagtattagcgagctgtggagcagaaaccagagctagattttctcacctctgatccaggactcttatgtttcacccatctggcttgagcaatagtttaaaaggatgattgtgtgctcctaagtacttcacttagctactccattttagcatatattaggggcattggggttataaggatgatttagtctgtgttctgcctttgagttgatgattagattatgacaagtactttgaaagaggcaaactatatttctaatatatacatatatatattctaatatatt

SEQ ID NO: 751879 - DNA, 557 bp, Homo sapiens
cccaatattatatgtaatgttcagttaaatttggatttcagataaactgtgcatttgttttagtatgtgtccgaaatattccatgggacatcctcatattataaatgtgtttgtctctttttatctgaaaatcaaatttaactggatataatgcatttgtatttgttaaatctgggaaccctaatacctcgtaacaacctatgaggaagttagagcaggtgttagacttttctaattatacagacaagaaaactgaaattctaaaagtccgtaagtattagygagctgtggagcagaaaccagagctagattttctcacctctgatccaggactcttatgtttcacccatctggcttgagcaatagtttaaaaggatgattgtgtgctcctaagtacttcacttagctactccattttagcatatattaggggcattggggttataaggatgatttagtctgtgttctgcctttgagttgatgattagattatgacaagtactttgaaagaggcaaactatatttctaatatatacatatatatattctaatatatt

SEQ ID NO: 751880 - DNA, 644 bp, Homo sapiens
caacaggtgaaattattcatagcctgctcatggagcaaacctaagatataaactcaatgggcataaatggaataagttcatgacaaataggaaagtatcccaaactgctaaagtaataaaagcaaatataataaatctttcctacaaatataataaggtccctaactgtaaatgtaataaaacctatcaacagctgcaatatgtttcgaacatattatatagctttacaaagaattataccccctgctggtacagcctcaacaatgtcatgctttgtctttttccagtgagtccaaatctagcacactgcatgttgccctgtgtatattaagtatgacagagtgttactataaccaggtttgaactgaaaatgaaatgctcaatccagatgtgctctttggccattctgcaagcagagccaaaggctgcrgatctcccaccaggggctgaaatgctgccaggaaagctaagcatgggaggtgaggaattgatgaattgctggataacctttgtgtagcttggatatgatgtctgcatcaggaaagtgagcagtacatatgactaagggaatggggacagagggattggagtgggaaaagtgtggtatgaggaccttctgtaaagatcatgtatatgccaggcac

SEQ ID NO: 751881 - DNA, 670 bp, Homo sapiens
aaaataaaatcaataaattaaacttcaacatgaggaatttctgtttttggaaaaacattgagaaatgccacagactggtagaaaatagttgcatgtttcatacctaaaataagagttatttatacactgtaaaaaaaaamctctaaatcttgaaatctaatgaataaattgataaaaaagggtaaatatttgaacaattagctcaccaaagacaatatgcagatggaaaatgaacatatgaaaaattgctcaagatcattagggaaatgcaacttaaagccacaatggattctactacctacttgttatgatagctaaaataaaatagactgaccatacgaagtgctgcaagagctctcatacactgctggtaggaatgtaaagtggtacaaccacttggaaagattatgtcagcttcttaaaaaggtaaacgtaagcataaagaagttgatctagtcattgcaatcttaaatatttacccaaaagaaatgaaagcatatatccatagaagacttgtgcacaaatgttcatggtatctttattttttatagccctaagctgagagcaacccaaacatccatcaacaggtaaatggataaacaaattatggtatatacacacaatggaatgaatactactcagcaataaaaggaagtgaattactgataat

SEQ ID NO: 751882 - DNA, 714 bp, Homo sapiens
gaggagagacctgaggcaggaggatcccttgcatcccccagaggttgaggctgcagcgagctgtgattgcaccactgtactccagtctgggtgacagagtgagactctgtcttaaaacaacaacaagaacaaaacagacaagaggccaacaaacatacgaaaaaatgatccacattactaattgtcagagaaatgcaaatcaaagccataatgagacaccatctcacaccagtcaaaatggctatcattaacaagacaaaaacaacagatgctggtgaggctgtggagaagagggaatgtttacayactgttggtgggaatgtaaactagttcagccactatggaaagcaatttggagattcctcagagaacttaaactgctattcaacccaacaatcccattactggttatacatccaaaagaaaataaatagttctaccaaaatgaaatactcatatgttcattgtagcactagtcacaataatgaagacatcgactcaacctatgtgcccatcaatggtgaattatataaagaaaatgtggtacatacacactgtggaatactagccagccataaaaatgaacgagatcttgtcctttgtaacaacatggatgcaactggaggccattatccaaagtgaattaacacggcaacagaaaaccagtgccacatgttctcactcttaagtgggaggtaaacaatggaactcatg

SEQ ID NO: 751883 - DNA, 699 bp, Homo sapiens
tagaatcaggaggatccaattttaggattttaggattttaaagttcacaggggctactggttcttacccaaagctagtggcatattcactaaaaccacaacagccgtgtctattatgtttcaggttgccggagtaggtcgatgcactggtgaaataataggttatatttctggagcatagaagggagaaaaggacaaaagtactaattaaatttgaaatctgtataatcctggaataaatacacaggagaatacgttaattccaaatgtcagcctcattttcactgaacttctaaaaatttttaacaacgctttaatttttcaccttcwtatgaaagtgaaggtccagttttaacaaaggtcttgaaagagcccaaatgcaaacttagatatcatattcttatgtttagaaagtgcagtgcaagcagcccaggtatcaggttgcattttcatactcttgctactctggtggcaacgcagaataactgccataaatcatctcttggctgtatacaattaattttgtgttctgtacttatactcctctatgtttttatgctgttttttttttttatatatgacttttgaggtcactcttggttttaggtgaaatactcaagcttaatattaaaatatcactgggtgatattgtagtaacaagttctaataaccaaactcagggtcaccccttctgcaagtt

SEQ ID NO: 751884 - DNA, 628 bp, Homo sapiens
cagaaaaatacctttataatcctaatatatcacaattcctttagtgcctaatattgagggagcagcttttattcaagatggaaggaatattagatatcattcaatctagcttcctcattttacagataataaaactgaggatgagagtggtaaagtgatttgctcaaattcatgaacctgcctctcctaatattcagccaagtgtcttttccagaatgtcacagttccctgtataataagaatcagctttattttccacaagaataaaagaggttagagttagaaaaagaataagttttctggatacagagtgtcattgtgtctatgtgaaggaatgttagcaaaagtgaraaaaacaaaaaccttgtacagaataaaagaagttattcctggcaattgactgaaatggaaagaaatcataaaagacttgaatgacaggcaaatgaataatgtgatgagatatatcaaattttgactctactgagatcaaaaggaagaatagagtatagggaatgaaagatgatgtctggatttaacattcatttgggaatcatttcaaaatcttgagataaaaggttctttagaaataataaatgttgtgtttctttaatttttagggactgagaga

SEQ ID NO: 751885 - DNA, 663 bp, Homo sapiens
tgatcggtgatgttgagcttttttgcatatgtttgttggctgcatgtacagaatgggaggaaatttttgcaatctgcctatctgataaaggtctaacatccagaatctacaaggagtttaaataaatttacaagaaaaaaacaaacaaccccattaaaaagtgggcaaaggacatgaacagacacttctcaaaagaagacatacatgtgttcaacaaacatatgaatcacatttattgatttgcatatgttgaaccaacctttcatcccagaaataaaacctacctaatcagggtcaattggctttttgacgtgcctttagattaggtttgctagtatatttagagaatgttttgtttttttaattggggatattggcctgtagctttcttttttgttgtatctttgccaggttttgatattggagtgatgctggcttcatagagtcacttagggaggagcccctcctctttgtctttttggaatcatttcagtagaattgatatcagctctttyttgtatgtttggtagaatttgtcagtgaactaatctggtcctcagtgttttttggttggtaggtttttattactgattgcattttggaactggatactggtctgttcaggcttttaatttcttcctgattcaatcttgggagaatgtg

SEQ ID NO: 751886 - DNA, 699 bp, Homo sapiens
aagggaaatgtggggttggatcccccacacagagtccccactggggcactgcctagtggaattgtgagaagaaggccactgtcctccagacctcagaatggtagatccaccaacagcttgctccgtgcacctagaaaacccacagacactcaatggcaggccatgaaagcagccagtaggggaggctgtaccttgcaaagccacaagggtggacctgcccaagaccatgggaacccaccttttgcattagtgtgacctaggtatgagacayggagtcaaaagaggtcactttggagatttaagttttgaccaccttcctggattttggacttgcatggagcctgtagccccttcattttggccaatttctcccatttggaatgtgtatatctacccaatgccggtaccctcattgtatctagaaagtaactaactttcttttgattttacaggctcataggcagaagtgacttgccctgtctcagatgagtctttggactgtggacttttgagttaatgctggaataagttaagactgagtgactgttggaaaggcattattggttttgaaatgtgatgacatgagattttagagggaccagggcagaattatatggtttggctctgtgtccccacccaaatctcaccttgaattgtataatccccatttgtcatgagaggagctgattgggaggtaat

SEQ ID NO: 751887 - DNA, 637 bp, Homo sapiens
gaaacattttataaaagggaatttatgcaagacatgttaaacaatttaaaagtgattaggcctcctgaatgcgttataaaatgccactataacccttagctgtacaacttgcctggtttacagctaggtaagacccaggacacatggagttaaatgctggaatgagtcagaccttatctgcacttctgtctaggtyctaggctctatacctagtacataattaaaatcccaaacttaccaacaaaagtaaagcttgctaaaagttaacagtgtaacatgcatgtaagattattgagaaaacagtttgcatatacttttggcaaaaagattataaagaggcataagagtgtgactttttacctagattaaaagtttaaagaattgttctaagttgaataaaataaaaatgaaagtttaagaacattttggaaggttaattgtaaaggaaatgctgggtataaacatattggctaaagttgaaggggcatcatccagtttttctgtaaattgattattaaagtaagagcacaacaggtttctcttaaagcactaacctgctctttaacaaaaattataaagggttaaaaagggtccataaacatcttaccttacagtccaatattaaaattgggtaaat

SEQ ID NO: 751888 - DNA, 637 bp, Homo sapiens
gaaacattttataaaagggaatttatgcaagacatgttaaacaatttaaaagtgattaggcctcctgaatgcgttataaaatgccactataacccttagctgtacaacttgcctggtttacagctaggtaagacccaggacacatggagttaaatgctggaatgagtcagaccttatctgcacttctgtctaggtcctaggctctatacctagtacataattaaaatcccaaacttaccaacaaaagtaaagcttgctaaaagttaacagtgtaacatgcatgtaagattattgagaaaacagtttgcatatacttttggcaaaaagattataaagaggcataagagtgtgactttttacctagattaaaagkttaaagaattgttctaagttgaataaaataaaaatgaaagtttaagaacattttggaaggttaattgtaaaggaaatgctgggtataaacatattggctaaagttgaaggggcatcatccagtttttctgtaaattgattattaaagtaagagcacaacaggtttctcttaaagcactaacctgctctttaacaaaaattataaagggttaaaaagggtccataaacatcttaccttacagtccaatattaaaattgggtaaat

SEQ ID NO: 751889 - DNA, 621 bp, Homo sapiens
atgaagggtgcccactgcagttgtgcagtgcaggggctgctgggcctattttatattcacagttcctcatctctcctgtcgtcatttcctttggtgtatttgttaccagaaaggggtcctgatccagaccccaacagagggttcttggatctcatgcaagaaagactctggggagagtccacaaagtaaagtgaaagcaagtttattaaaaaagtaaaggaataaagaatggctactccataggcagagcggccctgmgggatgctggttgtctatatttatggttatttcttgattatatgctaaacaaggggtggattattcttgagttttctggaaaagcaggggtggggtggctggggggttggtggtggcaactgctgaaactgagggttctttcctccactttttagccacatagggtaacttcctgatattgccatggcatttataaactgtcatggcgctgatagtgtcttttagcatgctaatgtgttataattagcatataatgtgggactaccagcggtcacttttactgccatcttggttttggtggaatttggccggcttttttaccacaaactgttttatcagcaaggtctttgtgacctgtacctt

SEQ ID NO: 751890 - DNA, 558 bp, Homo sapiens
atgtaccatagtgccatgtccagaaccctcggtagaaatggtgctcaataaatatcaaatgtgtctgacggtagggagaggcttttaaagcaatgcctctccaaaattgaagccattgagtctgatccactgtatccttgaaatcataacagaaccaaccccctatcaggtggaagtgttcactaccgaaatatgaccaagtcgattaatcatccttgtttctccctcagctcctcagcgctctctccctacattccctgtagagtgaatgtcacaacatccacattggtgtscaagtcaggcatcttggagttaacctgctgcaaggaaaaatgtgggcttcaggggaaaactatgcattgtctaaagacagccctctgagttatgtgactctatgggagctattgtacaactctgtaaaccatacataattgatgggatgcaaaatcatttttagctatagctgtgcaaattctgtcctatcttgtagagattcaactgagttctcccccactgtggaagaaaccagttttacctccatctgcacattcatttcaa

SEQ ID NO: 751891 - DNA, 603 bp, Homo sapiens
aaggctgttgttagaataaacaggtacaggtttttttggattatcaccatattcataggttcagatcagttttctcagcttttaaaatctgtattactttgtataaagatattatgtcttcctcttatgtaaaatttagaaaaacagaaataacatgacttaaagactgaggtaatggtaaaaaaattacatcaaaagatatatttcttgactttaccatgggatatgagtttgagctttggatttgcttgcttgtcacaagcttttgatccaaggaagtattgaagtttgagcagattatagatcactttcagtgttaagcttgttgtaaaaagagaaactgatatttatgaaaatggaatgatgactttatatatctcttgtttccggggttaaaaatatctctatagtgatgttctagaaactatctaagatgatcaagtcraagttaatttcacaacttcttagagtctggaaaacattgaaaatcattaagaatgtggctcctttttaaattcaaaattggaaatttcagcatcataataggaaattattgcctgattttaacttgcagaaaattaaatacgatttaatgttctcctt

SEQ ID NO: 751892 - DNA, 606 bp, Homo sapiens
ccaatgaatgttattttctccaactcacgtcactgatgtgtgttttgttacatatccattcagatattttgacacatatgcaatgaaatgttattcaaagaaatgaaaatccacttcctctaacttccaatttgatgaattagtagaagatgtttcacgtatcaggtgaataaaaaaaggaggaagggcacaggaagagtgaaaggataggaaaaacatttttaaatttatcaaaagatggccttatcaagacaaagaagaggaggtgggcatctgtgcacagagaatcaagtttaggacatgtccattagctacacctaatgacagtttagagaytgaagagaaaatggcaagagacagtggcacagaaagccaatcatgtgttcactgaaaagaaatttagattctatcctgacacttcagggagtcaatgaagatttttgtaaaagatgtatttgtgctttagaaagcacaatggctctgactatgtgaccaaagtgtaactcaggtgtcagcagcattgactctgcctaactacacaatagaaatccccttgaaccaccccctctaccccacaaaatccatgttcttcccaaagagtagtgg

SEQ ID NO: 751893 - DNA, 609 bp, Homo sapiens
atccctccttagtccactctcttcttctttccaagcatcagcctctcacccctcattttctctcttctggagccacttttactctatctttcactgagcttaacttcccccaacaaatgctgtatatctaaaactgaagttgatacaaaggaaaaagggaagggatcattgattaattggtctccaaacacactgcacatgacaatcactggaagtgcccttttaacatacatgtcttatctagtcacttttgagtggaagcgagaaattgacaggaggggccctggacaaatctgaagcaggtrgttctagagccacacttggagaaacattggcctaggtcctacaatacaaatgcctggctgacccccaggagacataggaatggaaaaatgctactcagccttttacgacaaatttacaatcagccttcaatcaggaaaataagagagttgatttcccaatctgcttatcttgcagcatgttttgtaaattttttctgtgatatagagattctgggtgtcaggatgagaatctgtccctttgaactgacaatagctcatagatcaagtcaactaacaggcaagaagcagaagaggtattaacatg

SEQ ID NO: 751894 - DNA, 515 bp, Homo sapiens
tgctgtttgccacatctataggtttagatttttcctttgagttctggtttatattccaaactacttacttgattgcttcatttcatagaagctttaattttaacatattataaactgaactcttgatttctctactctttccacctgcagtcctcttggtaaatggtaaggccatttttttttcatttattcgttggagtcttgatggttttcctatcaatttatacagatcytcatattttataaagactaacattttttacctgtcatataggctgaaaatctttttccctaggcttttgtttgtggttgttatttttgtgtttcaaattctagatttaaatcgttcattgaacaatgattatcattcacttaaggcagtaggattaataaataaaagaagaaaaagagcattattaacaataaaagtaaaatagatttttaaaattattaagtagcatgtcttgcttattagcaagatatttaaatgaatccaatgttgtagaacacaaagt

SEQ ID NO: 751895 - DNA, 614 bp, Homo sapiens
gattagaagattggaaaatttgacatgactttgatgtgttaaatgccaaatagtgctgcacaggatgaaaattctttggaagacgaccacaagtataactatttttgcaggtgttttagagcaaaaatctgttcactcagtgattccacatttttgggaaggacttaactaggaaaaattttactttgcaaggaagaaacgtgaaaatgccagaaatacagaggtaattattttgatcaagtgtttatgttaccaattataatggcaaaatcaakttttactttatggaatcatttgtcaaaaagctcatgacatattggtaatggcagcaaaagcaattacattttgtttcttgattaagaagaaagaaaatgagtattacccattaattaacaaaattatgaagagtcttaattcagatatacacttgtttccttgatgaatgcaaggtgatttgagatttgtagaaacctgttgcagtttgggtaaggaaggccagattagaaagatgaatttaagctttgctggtaacacactcaatggaatgtagaaaaaaattagagttttcaagaaggaaaactttgatttatcaggacacatgaagctactgggga

SEQ ID NO: 751896 - DNA, 535 bp, Homo sapiens
aaagtgctgggattacaggcatgagccaccacgcctggcctaaatatttttttttttaaagctacaggtcggtatatatattaaaaatgtaaaaagaaaaaacaaagataaagacaaattcttgaaataagccagaggaggaaaatacaaccttatctataggggaacaagaataataaattcttgtcagaacaatgtaagcaagaagaggggaagtaaaatatttaaagattttaaagaaaaaatatctcaacatataattctatgtatagcaaaactatctttcaaaatcgaaggataaatgaagactgttttagatagaaaaacaaaaacaaaaactgagagaaatcattgccagctgactgtccctttaagaaatgttaaaaggaattcytcaacaaggaggaagatggcataggtcagaaacttggatctagttaaataaaggatgagcattggagaagagaacatgaaagtcaaatattttaattttttagttgatcaaaagataactgtttaaaataataacagtaat

SEQ ID NO: 751897 - DNA, 611 bp, Homo sapiens
atataaaaagtgagttttatctcaacgccagtagcttaataatgggaaattcaaagcaggcagaaaggaaagagagcaatagaaagtgatatggtttggatatttgtccactccatatctcatgttgaattgtcatccccagtgttggagctggggcctagtgggaggtgtttgggtcatgggggcggacccctcatgaattgcttagtgctgtcctcacagtaatgagtgattctcagtctattagttcacccaagagctggttgtttaagagccttgtacctcctcctgtctctctcaccatgtgacacacctgcttcctcttcttcctcgatgaatgaaagctttctgagacctcaccagaagctttccagaagccagcaccatgcaaaaccattagccaaataaacctcttttctttataaattacccagacttrggcatttctttatagcagtgcaaaatggactaataaagagttttagaagacactacttaactctgtagttgcaggttaacaatttgatctctgatttttcttgctataatttgcctatcagtttaaaatgtacacagaaatgggccataatatgtaacagctgtaatcccag

SEQ ID NO: 751898 - DNA, 552 bp, Homo sapiens
ttttttttttttggagacgatgtctcgctcttgtcccccaggctggagtgcaaatagcgcgaactcggctcactgcaacctccgcctcccgggttcaagtgattctcctgcctcagcctcccgagtagctgggattacaggcgcctgctaccatgcccgrctaatttttgtatttttagtagagacggggtgtcaccatgttggccaggctggtctcgaactcctgatctcagatgatccacccgccttggcctcccaaagtgctgggattacaggcacgagccaccgcacccggcccgttcatgagattctttgtgcaagtgtttactttggcttttacttgtaaaacaacaatgatccagcaataaaataccttacgttgcctatgctcaaaagaagccaggacaagatttctgtcactctctaggtttcgtttttaaacttcctacaaccctgtcttgagagaaaattaatttactggggcagtgataggggacattccaaaagattcagaaaatatacaaatatacacattgattaaaagacatctat

SEQ ID NO: 751899 - DNA, 552 bp, Homo sapiens
ttttttttttttggagacgatgtctcgctcttgtcccccaggctggagtgcaaatagcgcgaactcggctcactgcaacctccgcctcccgggttcaagtgattctcctgcctcagcctcccgagtagctgggattacaggcgcctgctaccatgcccgactaatttttgtatttttagtagagacggggtgtcaccatgttggccaggctggtctcgaactcctgatctcagatgatccacccgccttggcctcccaaagtgctgggattacaggcaygagccaccgcacccggcccgttcatgagattctttgtgcaagtgtttactttggcttttacttgtaaaacaacaatgatccagcaataaaataccttacgttgcctatgctcaaaagaagccaggacaagatttctgtcactctctaggtttcgtttttaaacttcctacaaccctgtcttgagagaaaattaatttactggggcagtgataggggacattccaaaagattcagaaaatatacaaatatacacattgattaaaagacatctat

SEQ ID NO: 751900 - DNA, 598 bp, Homo sapiens
gaatttcataattcatttatcatgacagagaatatgctcttatctgtggaccagaacgattctaccaaaaatgaataagaccatagctgggagtgccaggtgtcaaattaatgaaggactttaactatcaaaggaggttgcttcagtgcatctggcttctttcatggaaactggcaaaacatcactagtcctaatcytacaaatgtagatgtttattatacaggttgaggcagccacattttataggccagcatgaaaaggaaaacaatcacaggaaagatataattacagggtaataaaaacgtaaacaccattaaatgcattaattttatatttgaggtttttttccgtggttgacttaccaacttatgagtgcgagattttgaaaaaattataaaagttttttatgtattcattctaatacacacatattggatttgatcatttttataggagattggtaaaattggctattgaatagaatagagaatttagaaggatttttatcaagtccagagacagaaggagagagagagaaaaatcgttgccaccttgaacttcttagatacctacaaattaatacattatcaggagtaac

SEQ ID NO: 751901 - DNA, 626 bp, Homo sapiens
tcctaactgcaaggtgacagcattgcaaatatttctttcatataaacctataaaacaaaaacataggtttttttctgttggaatgtacctaccagtaatcacagctatattattacttcatattgactgactggcctaaacattggaagatagtactggcatttaaaaattattaaagcaatgtaaacaaatatgctgtaaactctgattttgatyggtgtttaatttattgagaaaaaaatgaaggtgagattttgacacatttcagtttattccacattaaaaagaaaagtaaaaccaagcttctgactttcataaaaattaattttcttctaaggaggaaacctatttatttgtgctgttactgatgaatttatatttaactattaaattattgttgtattataattctgagcatgtttctattgaatttaagaaaggccatttgagtttagtaaaacacctgcaaactcagatgagtgtgaaatgctggctgcatctgagcacatttaaaataatgtgtttattactcaattaaaatcccaagtaatatgctacttataaattagaacttataaaataaagcctaggttatgatgcaaaatcaaactgctgtatttagtgag

SEQ ID NO: 751902 - DNA, 604 bp, Homo sapiens
taaaaccacaatgagataccattttcacctattagttggaataaagaatatgagatagcagatgctggtacagatattgggcaaatgctactctcacacattgctggcacagatttaaattgctaaagccacactgaaaagcaatttaataaatatacagtaraattaaaaatgtgtccatgctatgacccagcagttccacttgggtacatgtcttaaaaacaaaaatgaaaacattcttgatctataggctatacagagatatgttcattacaacatattttttattagcaaaaaacttgatgactgacttaatgtccatttgtagataagaaatagataaacaaatcatagcatacttttatggctgtctataccagttaaaatcattcataaatgtatctaaaaataatgttgactaaaaaattatatatttatttatgtaaatttaaaagcacaaaagtttgacagtaatggatactactacatgtatataaaagtataaaaacatatttggaagtgcacactcaaaactaattttggtaatagtttctgggaagtggggagaggaatgagcctcaggggttgtaattaagagatattt

SEQ ID NO: 751903 - DNA, 497 bp, Homo sapiens
aaaggactcaaacagtgaactgatatataggataatgaaaggatattaacctgagagagcatggtcagaagatcctcactgagatggtaatatcaaagcccaggcctgaggttgagaatgagatagccacagggaggatggaagagagtgagttttgttacaggatgcagaaatgacatggtccaagaacccagtaagtctttggattccaggaaccaaaagaagctgacaagtatggccagaactgcagtgtaatatcctgagaracaattgttggtcctagtcagtttattggctcaagctcatcacgttcttatttcaagctcatctccctgttccaggaattaccatcccaatttttccagatgctgcccttcattcttccatttgagggtctcttctttcaaatattttgggaaacggggtatagaatttggactttggtcatgctttccattttcagatgtgtcaatcaggatcccaggagaaaatagaat

SEQ ID NO: 751904 - DNA, 547 bp, Homo sapiens
gaagagcaattggataataccatttgcttatttcatagccctttaatcttgagttttgaaattactatgatcttagtggtataagtatgatttggaagtggggtatactcagattctgattttcatgtcatttcctcttttcattgggccataattttagctgrttaataatcagctcatgtttggtcttggaaaacaggcttcaaaaggtaagagctgcaaacacctctgtggtttccctttgtttctttcatgtagtagttcactctattggcgcgcactaaagtgagaagggggcctcagagatggaatggtataagcaaccattttttggccctcctaaaagcaatcatttgcttataagaccacaatagtgtggtctgtgtctccttttggcttagtttttccacaatttcagagttggggttgggggcagactgaaggaggtacgggtgggaggggtctgtttcaggttttccttggtcagggattttatgtatctaaggatgatttgtgcctccagggttgctttttatttgacatagca

SEQ ID NO: 751905 - DNA, 598 bp, Homo sapiens
caaactgtatcgctggcctctgtacgaaggtgcacagtacaaggaaagccccaagaagaattgatgctttttaaactttgtctccctcttgcgtcttagaattactcctggggcagtccaactctgtagaagagtatcccctattcgaaagtttgcattcatctataataataatttttagcttgtctttatttgtaattgcctccaattgtgcttatatcctctatttcttttcataaaccaatcaattacattaaacatggatgggaggtcttctagggttagctcatgagtgttgacttgattaagtcagtggtggctcattamgaaactatctctggcccgagtcaacacttcactgctgctgtcatctggctgaagggcatgccttgggtacagcaaccatttgggtctcaatattccatggctataggaatgtccactggactacttacttactagcagtcatgaagataaagcagggagcatgcccttagggggttctatttctgggccattgtttaagttctttaagtctttctcagaattaatttatttcaatttttagctatggtattgatgcctgtaaagagtttga

SEQ ID NO: 751906 - DNA, 623 bp, Homo sapiens
ccagcaagccatcaggatgataaggacctaacatacaaatctactctgaggctgtggttcttagccctaggtgagcatcagaactactcatagaactttgtaaaaataaacatgcctcagccccactccagataatcctgaatcagtatatctggggtgcagttcaggtatctacacttttttaaaaagtagacaggtgattccgatgtgcagccagagttacgaaccacggctccaaggtgtcgatgactgataatggctccgtataayagtgccagccacacacacgtgacctcatggataagcgtcgctacctgacatctgtcagttatctacctctactcagtggtctaccgcataggtacagacagctgtgccttatccctaggagagctggagctctgtgcctcctcctcccagtgatttctgatgtactagcttgttaccacactgtggatgagaatatctcgattaatgtgctacctctcccagaggcatttgtagttcaacagggaataatgctttaatctaagggaatgggccccaaatgatggaatttcaggaattacagaagtcagttgaaaagatattttggaagaggggcccttttccagttaacttaa

SEQ ID NO: 751907 - DNA, 439 bp, Homo sapiens
tgttgagtgttagtctagtcacagaaagaaagaaaattcgtgtatatttggacatttccacttcattcacccaataattctctctagtaattgtaaaatagaaatatcatttttaaatttcaaaaaagagaaaaagaggaataagaaaaggaaaacagggccgggcacggtggctcatgcctgtaatcccagcactttgggaggccgaggctggtggatcacgaggtcaagagatcgagaccatcctggccaacacagtgaaaccctgtctctactaaaaawacaaaaaattagccgggcgttgtggcaggcgcctgtagtcccagctactcgggaggctgaggcaggagaatggcgtgaacctgggaggcggagcttacagtgagtcaagattgcgccactgcactccagcctgggtgacagagtgagactctgtctc

SEQ ID NO: 751908 - DNA, 517 bp, Homo sapiens
tactcatcaaacagaaatatactataatactttacaataaaatataatgtcacattgcccaaaacagtgaatgacagaattttgtggattaaggatatggattaaggtaatccaaaactgcagtttattaaacttcccccccaaaaaaccatgtgttgttcttattctgaagctatgctcttggagttttctggctttcttaaaaatgcatcccagtccaattttaatatatgccttttggtgagtcatttttatgatctctttgctatctactgagactcttaaaatgtactggtttgaggcygaacttggactgtgattccttcttcttaaatatggtcttctaacctcctgactgggggcctcctgcaggtggatgattctctccaaccctccaatgtaagaggctctgccgcctcaggtaggccctccatcttctttgtaggcagccacactactaatatttttagatgtttgcagcattcatgtctcaatatgttcagtatttcaggcaatt

SEQ ID NO: 751909 - DNA, 522 bp, Homo sapiens
caacactgatcctacagaaatacaaactaccatcagaaaataatataaacacctctatacaaataaactagaaaatctagaagaaatggataaactcctggacacatacaccctcccaagactaaaccaggaagaagtcgaatccctgaatagaccaatagcaagttctgaaattgaggcactaatagcctaccaaccaaaaaaatgcccaggaacagatggattcacagctgaactctaccagaggtacaaagaggagctgatacgataccttctgaaactattccaaacaatagaaaaagaaggcctcctccttaactcattttgaggccagcatcatcctgataccaaaacctggcagagatctaayaaaaaacaaagaaaatttcgggccaatatccctgatgaatatcagtgcaaaaatgttcaataaaatactgacaaaccgaatccagcagcacattaaaaagcctgtccaccacaatcaagtcagcttcatgcctgggatggagggctggttca

SEQ ID NO: 751910 - DNA, 505 bp, Homo sapiens
tattaaggatgggacttattctatttacttaatatgagcactcttggatcctggctgagaattgtgataataatccttctataagtttttatttgcattgcagtatttttatatgtgttaacctcaaatgctgctgtgccaactttgtgaaatcaaatgatttaacaaatgatcacccaacaaaagaacggggaactgcaacagtgtagaggttgaagcaatcatccctgaaaaagtgacacatgaccatgacatcttacataacagtgaagatctgatttgatcatgtcttcaaatattaatgttcagttggcaaaacctakaaaactgatggcctccaactccatcaatgtttctgccaaggacatgatcttgttctgatggatacattgtattccatgatatatatgtgcccgattttctttatccagtctaacactgatgggcatttaggttgattctgagtctttgctattgttaataatgcttcaatgaacatacacat

SEQ ID NO: 751911 - DNA, 589 bp, Homo sapiens
tttcctaaacacttagcattataatctgcacatgtcttttcaagttgatgtaaggtgtgtgttaataatgaatgttaaaaaaggaaaagctctacctccttagagaagactttttctaactgagggaaagaatgtctgtgcttcagcaagggagtgccctgtgccctgtggcatagctcttacattacaggcttttaatggttttcggaagagttatgatttttcgtgattattaaggaaatatgtgaaaatartagaaatgtagaaatggaaataaaaatatagaaaacctacattaaaaaaaatcctatacaaacccatacctcagagaaaaataatttcaatattttagtatacttcctgcctatcatttcaatatttcattttgagattaaactatgcaatgtacacagttctctcctgattgtttcacacaagattatattgaaagtctttgggtcattcatttgaacctaattggaaacatactttagaaatgagtatgctatttagctagtaaataaccacctattaaacctgtccttggtttttttaatatttatgttgaaggtaagttctaaatactttt

SEQ ID NO: 751912 - DNA, 646 bp, Homo sapiens
aacctggatgatgagttggtgggtgtggcaaaccaccatggcacatgtatacctatgtaacaaacctgcacattctgcacatgtaccccagaagttaaagaaaaattttttaaaaaagaaaacaacataaagatgctttttatgaagagggttactggggttcttcaaataacttcaaataacgtatctgaaagaagtttctagctctgccttagtatagttacagactgtcctttgtcttgtatttaaagcccttgcatgtcagatttctgttccaagtccccatctcagccgtctcagccacctcctcttcctgtggcatctaattactactaaatgttcttgccagagcaaatgtatctgcgttctccctctatacacagcatctaaatgaaatgtacgtttttttatttgttttacgtcagacaaggaaaatatttgtaagcaaatacagggatatgtgggagagttcyattgtcccccgtatctcactgctgtctttttctttttgatgtaacagcctatctattcccaaaatgggatgccactaaacatttactttcttctcctttttttctgatttacctgtgactcttctattcagaaactattcacccctattatcaccttatgatcttagttttaa

SEQ ID NO: 751913 - DNA, 640 bp, Homo sapiens
tatctgcgttctccctctatacacagcatctaaatgaaatgtacgtttttttatttgttttacgtcagacaaggaaaatatttgtaagcaaatacagggatatgtgggagagttctattgtcccccgtatctcactgctgtctttttctttttgatgtaacagcctatctattcccaaaatgggatgccactaaacatttactttcttctcctttttttctgatttacctgtgactcttctattcagaaactattcacccctattatcaccttatgatcttagttttaaccaaattcataacccacaaactatttcttggctgagcagtgaaaacatgcctttggttgtwatgtattcaggacaaattccaacccataacatgaaatacagacatcttagaaaatgaaataagcacctatacatgcagctatttatatatttgccaattttatttgcattttttttacttttttatgttcctgtttaacctgtaaataaaaattgctaggtagtacaagccacacatatataatagagatttggaattgaaccatgaaatttgtttgctattgggaattgagaatagccatagtgcttgaagttttgattcagttcatgaaaagatttattttttttaga

SEQ ID NO: 751914 - DNA, 597 bp, Homo sapiens
cttttcatcctttactttagcaacttaccggttgctttctgtgtatgtggggccagtttatgtgagatttgaagaagggattttcctttattgggaatgtctaatgagcacttacaagcagaatttcctcccgatttttttcctctgcactctgaatactggaaagtgttttgagggccttctgacagtacaccacagtgatttttttttctgtcgtaatccatttatgactaaaaaacatgatgctttttgtttttgagatagagtctcgctctgtcacccagggcagagtgcagtgkcacagtcttggctcactgcaacctctgcctcccaggttcaagcgattctcctgcctcagcctcctgagtagctgagattacaggcatgcgccaccacgcctggctaatttttgtatttttagtagagacaaggtttcaccatgttggttaggctggtctcgaactcctgaccttgtgatccacccgcctcagccttccaaagtgctgggattacaggcatgagccaacgcatctggccacatgatgctttttttttggttgctcacatgacaagctattatttttgtgtcactttaaa

SEQ ID NO: 751915 - DNA, 597 bp, Homo sapiens
cttttcatcctttactttagcaacttaccggttgctttctgtgtatgtggggccagtttatgtgagatttgaagaagggattttcctttattgggaatgtctaatgagcacttacaagcagaatttcctcccgatttttttcctctgcactctgaatactggaaagtgttttgagggccttctgacagtacaccacagtgatttttttttctgtcgtaatccatttatgactaaaaaacatgatgctttttgtttttgagatagagtctcgctctgtcacccagggcagagtgcagtggcacagtcttggctcactgcarcctctgcctcccaggttcaagcgattctcctgcctcagcctcctgagtagctgagattacaggcatgcgccaccacgcctggctaatttttgtatttttagtagagacaaggtttcaccatgttggttaggctggtctcgaactcctgaccttgtgatccacccgcctcagccttccaaagtgctgggattacaggcatgagccaacgcatctggccacatgatgctttttttttggttgctcacatgacaagctattatttttgtgtcactttaaa

SEQ ID NO: 751916 - DNA, 630 bp, Homo sapiens
ttcagccaaagacaatgcaaaaaagcattttgtatgtgttccacttcaggcatggccaaagatgctcctgccaggccaatttccccacaaataaccactcgaaacctggataaattttttgaatagtagcctggaggcagtgcagattgagcagaggctgaaagattataggagggaatcaatttggaagaaagaatggcatggggtaattttcctgtgttctcaattattttagcctcaatgcagattgcagtcagcattaataagtaaatccttgatagaaaacccatactttttctgttctaaagaactggagaacagagtttgaaataatcatttccaccagaaagtgagggagatattccagaaaggagatggccagagasggggagcccagatcccatgcacaaatttcagccaattaactaaccaaccttaaaccatgcatacacaaggcaggatcaaagcactttggaatgaattttgagctgtgttcaaaacacaatgttcatgagtctaaaataattgtccgctaaaatttagaaaatcaatactctattaaggattataacaggattcagtctctacatcttcagagtattcaagaaacaatacaaatccagtcaatag

SEQ ID NO: 751917 - DNA, 614 bp, Homo sapiens
ggcggcacttgaggagcccttcagcccaccgttgcactgtgggagccccttcctgggctggccgaggccggagtcggctccctcagcttgcggggaggtgtggagggagagacgccggtgggaatcggggctgcgcgtggtgcttgcaggccagcacgaattccgggtgggtgtgggcttggtgggcccggcactcggagcggcyggcaagccctgctggccctgggcaatgaggggcttagcactcgggccagcggctgaggagggcgtgctaggtcccccagcagtgctggcccaccggcgctgcgctccatttctcgccaggccttagctgcctccccgcagggcagggctcgggacctgcagcccgccatgcctgagcctcccctgaccctccgtgggctcctctgcagcaggagcctccccaacgagcaccgccccctgctccatggcaccaggtcccatagaccacccaagggctgaggagtgccggcacaccgcccgggactggcaggcgccttcacctgcggccccgtgcgggatccactgggtgaagccagctaggctcctgactggtggggacttggaaaacctttatgtctagctaggggatt

SEQ ID NO: 751918 - DNA, 645 bp, Homo sapiens
gggatccttctgcctgactcctcctcaagggaagctcaggaatccaagagatatttgatggttatttggattcactgggaccaaaaacaaaaacgaaaatgaaattcctgcaggcagaaaagatatgacgaaaaatcagaagaatctctatcttgtgtttctcacttacacagactccgtattaagagttctctgttcctaaggcactgtaaccatgtgggttagcctataggtgagttagctcacactgccttacttcttttagctatctccttccacactctcattatgtagaaaaacttgtgtttttcccctcattttacttttattgactgtgacataagctaacctgaaggctccatcacagcaagggaaaaacatgaaagtaaagtaaaagaaagtaaagtaaaagaaagtaaaagaaaggggaatcaaataaatgaaaacaaacgagcacagtatcttsacaaaaataaaaaaatgaatgctggaagtaaatgtattccattgttaatcacagttgtctccatgtggtgcttatatgtgtgatttatttatttctaattacatttctatgacttttccaaatttccaaaataatgaacatatttccactgctgactacgatccacacagaagcaactt

SEQ ID NO: 751919 - DNA, 556 bp, Homo sapiens
gatgtactaccaaccactggtaattatgtctttaatcttttgaagtaaaatgttgttgattcttttcagcttgtatttttctctacatctcattaaaagcctacaatgagtaaaagtaatagatgaaaaattgatgtggatgatggaatctagaaatgagacttgagagcctgatgcatcacctgtccrtcgctggttttcaacacatttcttctgcccctcatggaaggaggtgggacccacacttccagccctttggagcccctggggaaactctgagatattccagtccccacctctgtgtgttctgatgtcacaggtccactccacaggaggactggaacacagaggtctgacacaacagccaaatctaagctgcacaactctatacctctaacaagcagtttagaaaatatgctgatattatcgtttttataaagaaaaccatttcaaaattctgcatgtttcaagaagttggagataatttcctttattttgaggaagacaatactgaactatgggaagatggacaaggttagttccagcacagagagtc

SEQ ID NO: 751920 - DNA, 619 bp, Homo sapiens
tagtgactcaaagtataaactgaatttatttaataagagtagaagaactgaggataggatactgacattattaacattaatgaaatgggcagagaagaagatagtaaatacgaatctgaaagttattccaagacatacgatgagtaagagttattatgtaaagagaagagagtgtcattaaatactcaacattgtcaaatgagtcagagaaatcaattgtatgaagagtgacgcatgactttttttacttggcaattagaagatcatggattaattttccatgtacrtattcaataaaatacaaagcacagaagctgatgtataaagcattaagctatataaggcagtaaataacagaactgattagaaaaaatatggcgcacacttaagatgaaaaactgtaaatccattaaaatgagaattgtgacaaatttgttgaaaaatcaatttaaacattgttcaattgctgctatgtatcttgaaagtggtatagtgtattcttgctattttactttatacatttttcatgtttttcaaaacaccatgcttgctagtattaagttctgaacgtcatttcttctttgttacatctcttacttaatgataaagataattttgg

SEQ ID NO: 751921 - DNA, 619 bp, Homo sapiens
tagtgactcaaagtataaactgaatttatttaataagagtagaagaactgaggataggatactgacattattaacattaatgaaatgggcagagaagaagatagtaaatacgaatctgaaagttattccaagacatacgatgagtaagagttattatgtaaagagaagagagtgtcattaaatactcaacattgtcaaatgagtcagagaaatcaattgtatgaagagtgacgcatgactttttttacttggcaattagaagatcatggattaattttccatgtacgtattcaataaaatacaaagcacagaagctgatgtataaagcattaagctatataaggcagtaaataacagaactgattagaaaawatatggcgcacacttaagatgaaaaactgtaaatccattaaaatgagaattgtgacaaatttgttgaaaaatcaatttaaacattgttcaattgctgctatgtatcttgaaagtggtatagtgtattcttgctattttactttatacatttttcatgtttttcaaaacaccatgcttgctagtattaagttctgaacgtcatttcttctttgttacatctcttacttaatgataaagataattttgg

SEQ ID NO: 751922 - DNA, 567 bp, Homo sapiens
aacctctttcctttataaattacccagtctcaggtatgtctttattagcagcgtgagaacaaactaatacaaggggattctctaaaaatggtagacagtcacctgttggctcagtgttagggaaatggataattttgttctgcaagacatctgtagtagagagagaagtgagctaagaaatattaaatattgccaaatattatcaaaatggtagaatgatcgagattgaaagagttgaaaattataggtacgtgraaatatctgtggtctggaagctctgcatgggttgtaaaactaatgtcatttggtcttttagtttcacgcagcctagttgttccttgcttatggtcaagaaagacataagtgtaggatcaaggatggaggctggtgctttgttactcttagctcatagatcctgaagcataatcaagatgcagggtttaatattattatacagcccgctatggagagggcagatctcagtgtcctgattgatggtgctgagaagagaagctaaggttgaaacactggtgttgagagaaccatgccatacctaacccactcttg

SEQ ID NO: 751923 - DNA, 511 bp, Homo sapiens
acaacatactcatggtagtacctcacggaccagttactcaagttttgcctcaggttttaatttgcaaagttgtggtaaaacaacagagattgctacaattattataaagattaaataaagtaaaatatataaagaacttaaaacattttccgrtatataacaagcgctagtaaggattaatttttgttattgttgcttctgttgataatagttatgtctttttttctttttctttttttttttttgagacggagtctcgctctgtggcccaggctggagagcagtggcgtgatctcggctcactgcaagctccgcctcctgggctcacgccatccttctgcctcagcttcccaagtagctgggactacaggcgcccaccaccgtgcctggctaatttttttgtatttttagtagagacggagtttcaccatgttagccaggatggtctcgatctcctgacctcgtgatccacccacctcagcctcccaaagtgtagttatgtcgtttttaa

SEQ ID NO: 751924 - DNA, 637 bp, Homo sapiens
agccatgagggaagggtctacaccatgaaaatcagcaaatgctgcaaaccggtcctggaaagccagttgtgagacatttaccagcacatccctgactacatcagttgctgaatttttaattgaatgatatattcactgcttcatgaacattgcacatttattcartggaccaactctctccagcaatagcatggcctgaatataataactgtaccataaatattaataatatgaacggcggtattcttttttctctccaagtcacttcaaatgtcctgtgaactgccccattgaataatatataaaactgtaagttaacctcagcattatcttgaagaattggtctttggaagtgtaagtgcctactcaatatttgaatgctgtagacacctagaattagaatgtttgggatcataaatgttcatcccaatgctactgccttgccttcccattaacctgaactacagactgttgcttgaagaaaatcctttaaaggaataaaaatccatgtgctgcttctcacacctcagtacagggaaagaagccacttccgcaaagctcaagcctgatttatgcagaaggcttctagtcttacctgcttccttaaaattgctatttaacataatttttggtttat

SEQ ID NO: 751925 - DNA, 605 bp, Homo sapiens
cagagtaaccaattaaaaactaatagtgtttctgcccaagaacaagtttagggcaactgtggctgcttggtcttgtgaaacatttttttcttgcttagtttaggttggtggttgttttgacctaacatctagggaatgcattatttgcaatctgcctggaatcaaaacaagccttggttattcttctgctgttttgtgcttgctattcccagctgagagtcaggtccaaacctgggtggcagtgagcctctgccagccgcgacccgggccaccagtcattctgcatgcctgtggtaccagaatgaatggagactgaccagctctgtgggtgggaaggaaaaagctgcaggmtgacagcgcactcattttcatgggaaaaagtttatcccaggccttacttctggttcttgaaatagtgaagtgagaaaaggttttttgaagacgaattttagctaaatagccattcaagggggttcagttcctgaaagcattcacatcccccatctgcctgggtctctgcagctgtgtggggcaggagggggccagtgtgatctcgcacaagttgtggatggattaagacaagtaatcaatatttcatttctata

SEQ ID NO: 751926 - DNA, 603 bp, Homo sapiens
tgatgcattcaaagtgaagttatctattctaagttagccttgggtttcacagagacacatgcagtaaaagcctcttgttcttccagactaccaggctggtgattctgccatatggatcctaaaggggctgataggtttaatattaaaccgtaatgaagagatgtcacaaaaatatgatgtgtatttagcatttggtctttggagagaccrtctctgtaaattgcagttccttcttggcatcttcattgtattctctgactcatatatgagtgagccctcgtggggcaccatatttcaacaagtcaccctgactcccccatctctctacacatttgctttttatattctccataaatagtaccttaccctgtaattcatcttccatgcctaattcattctaaatataagcttcctggccctgtttctgccatattaatacacttcccgtggcaagcacatgtttaaaaagaaaatcaattgttctgattcactggacgtgagcatctgcatgtttttataatttattgttcatcctcaggtcagtatgataccagcattaaatattaaggctgcttagggcacaatccttatcagaaagctttg

SEQ ID NO: 751927 - DNA, 603 bp, Homo sapiens
tgatgcattcaaagtgaagttatctattctaagttagccttgggtttcacagagacacatgcagtaaaagcctcttgttcttccagactaccaggctggtgattctgccatatggatcctaaaggggctgataggtttaatattaaaccgtaatgaagagatgtcacaaaaatatgatgtgtatttagcatttggtctttggagagaccatctctgtaaattgcagttccttcttggcatcttcattgtattctctgactcatatatgagtgagccctcgtggggcaccatatttcaacaagtcaccctgactcccccatctctctacacatttgctttttatattctccataaatagtaccttaccctgtaattcatcttccatgcctaattcattctaaatataagcttcctggccctgtttctgccatattaatacacttcccrtggcaagcacatgtttaaaaagaaaatcaattgttctgattcactggacgtgagcatctgcatgtttttataatttattgttcatcctcaggtcagtatgataccagcattaaatattaaggctgcttagggcacaatccttatcagaaagctttg

SEQ ID NO: 751928 - DNA, 579 bp, Homo sapiens
agggtgagccgaagcagggcggggcatcacctcacctgggaagcacaaggggtcagaagatttccctttcttagccaagggaagctgtgacagactgtacccggaaaatcaggatattgccacccaaatactgtgcttttccaacagtcttagcaaatggcacaccagaagattatatcctgtgcctggctcagtgggacccatgcccacagaaccttgctcattgctagcgcagcagtctgagattgaactgccaggcggcagcctggctggggaaggggcgtccaccattgctgaggcttaagtaggtaaacaaagcagccaggaagctcgaacttggcagagcccaccacagcaccacaaggcttgctgcctctatagactccacctctggtggcagggcrtagctgaacaaaaggcagcagaaacttctgcagacttaaatgtccttgtctgcactgctctgaagagagcagtggttctcccagcacggtgtttgagctctgagaacggacagactgcctcctcaagtgggtccctgacccccgtgtagcctaacagggagacacctcccagagg

SEQ ID NO: 751929 - DNA, 565 bp, Homo sapiens
cagaaatacaaactaccatcagagaatactataaacacctctacgcaaataaactagaaaatctagaagaaatggataaattcctcgacacatacaccctcccaagtctaaaccaggaagaagttgaatccctgaatagaccaataacaggttctgaaattaaggcaataattaatagcctaccaaccaaaaaaagtccaggaccagattgattcacagccgaattctaccagaggtacaaagagaagctggtaccatttcttctgaaactattccaatcaacagaaaaagagagaatcctccctaactcattttatgaggccagcatcatcctgataccaaagtctggcagagaaacaagaaaaaaagagtattttagaccartatccccgatgaacatcgatgcaaaaatcctccataaaatactggaaaaccgaatccagcagcacatcaaaaagcttctccaccaagatcaagtgggcttcacccctgggatgcaaggatggttcaacatatgcaaatcaataaacgtaatccatcacataaacagaaccaaagacaaaaa

SEQ ID NO: 751930 - DNA, 629 bp, Homo sapiens
taaatatttatccccttttatatcactcaagtacagtacatatagtatacaaattcaacaggcaataacttcttaattatacctaaaatattcaacagtttgagaggcacatttctgctattttggttccttttacctaaagggaaaaggccaagtagggcttgtgtgtgaatgcttagaacagtggctggtacaaccagtggctggtacataaactctattatttattattgttattatttaattttcaaaactacttactgaatatacacttctctgatgaattttatagaccaccaaggagcatcctgctgatgcctaggtctgtataactctgctgaacaaaatgtgctccatgaatgtgttttatatacaggtgtacttgratgaggctggaaacagcaattctcaccatcatttcaatcaagcaaaattggattttatctgctttatgaatattggacacctttgtacaaagtcatttgaagaaagattccactaaaaacaaatgaaaataaataaacaaatgtgcaaagctactgctatagtaaaatataatgataacaataatctctaatacacatattgggcttatttaagccagaaactattctaagtaattctcacta

SEQ ID NO: 751931 - DNA, 356 bp, Homo sapiens
atccaattactaagtcagataagaattttgtcatcattttacaggatatcacaaactgatgaatttctgagagacctcaatcaattaatttttaaaagatgttggatttgtacagggctttatatttttcaaaatattttattttatttgaatgtaagctttctattctaaccctttcctgggtttttctyttgaagacattagctgtacactcagaatgtacagcattctgaaactgtcaaagaacagacaatattccagtatacacaaaacttcccatctgcaatttttagttcaaagacccatggagctttggaggtgggataatgtacccaccatagcttttgttgcttttt

SEQ ID NO: 751932 - DNA, 604 bp, Homo sapiens
gtctcttctcaagacttccaatctaatagggaaggaagagaacacacacaatgcaaggactgtgagtatggaggagaaaggaatgaaatgcacagtatactgactcttaaacctataaccccatttcttcttgtcatccttgtttctcttaagtctcagatatttggcctcagtgtagtgtagataataaacctatccatattcttattggtataagaaggtggttttgtgggcgcagatgggtgtgaatcctggctttaccacttattaaaaatgtgaatttgtaccaccrttttgcatacatacacatatacatatatgtatatatacacacacacacatgcccagtctctctctctgtgtgtgtgtgtgtgtgtgtgtgtgtgtgtgtgtgtgtgcgcagttatattaaatgagtcattgtatataatgcctgacatatatcagtacagggcctgacacatatttcagtaaatattaaatattaatattatgggaacatttctcatactgatggtaaaagaaaactggtgggtttggggcagggagatgttaataaatgggtggtaagggaaacacactacccctctaagaagataagctt

SEQ ID NO: 751933 - DNA, 601 bp, Homo sapiens
gtttctgggataatgtaggactactgagctgcatctataagacaacagtatattgttaaatattctctgaagtgaggatgattgcaaggaagagcttgtttcatggtaaaataagccatgggttacaaaaatatgcaaagaatgacatcatcttccactcacacgaaggaaagaaggacgagaagagagatgatgataagaaatataatagtcctcatatttatcaatttttattgagtgccaaccacaagcaagcacacagtatatgacrgtaaataaaacaggtaaaagatagctaaacaaactattaaattcagaatagaaaactctgtaatagatatgaaaaagatgactaataaagaatatcggctgggtggggtgactcacccctatataaggccgaggcaggcagatgacttgaggtcaggagttcgagagcagcctggccaacatggtgaaaccctgtccctaccaaaaatacaaaaattagcagggcatggaggtgggcacctataatcccagctactcaggaggctaaggcaggagaatcgcctgaacccaggagtgggaggttgcagtgagccgagatcaccgcactcca

SEQ ID NO: 751934 - DNA, 612 bp, Homo sapiens
agaaggtgtctcttctcaagagcttccaatctaatagggaaggaagagaacacagacaatgcaaggactgtgagtatggaggagaaaggaatgaaatgcagagtatactgactcttaaacctataaccccatttcttcttgtcatccttgtttctcttaagtctcagatatttggcctcagtgtagtgtagataataaacctatccatattcttattggtataagaaggtggttttgtgggcgcagatgggtgtgaatcctggctttaccacttattaaaaatgtgaatttgtaccaccrttttgcatacatacacatatacatatatgtatatatacacacacacacatgcccagtctctctctctgtgtgtgtgtgtgtgtgtgtgtgtgtgtgtgtgtgtgtgtgcagttatattaaatgagtcattgtatataatgcctgacatatatcagtacagggcctgacacatatttcagtaaatattaaatattaatattatgggaacatttctcatactgatggtaaaagaaaactggtgggtttggggcagggagatgttaataaatgggtggtaagggaaacaaactacccctctaagaagataagctt

SEQ ID NO: 751935 - DNA, 505 bp, Homo sapiens
ttaaaaaagggactcatttcgtaggtgggaaaggtaaccagtataattgtattggtggaagctgataaggcattcatacatccataatggaaatattcttggacagctgggggcatacacagattatatctagagatgaaagaattgagagccataatgtggaagaacacagagggagtgactgtaccaagaaaagatcagagacttgaggataccaaaaactagggaatagacagacaaattagaaacaccaaaataaaggtgatacgccagagaaraaaaatggaaaaaatgaaagtagaaggtcagagagacaaaaaaaaagtttcaaaggaaggtggtttgatatcaatatcacaaaaatgtcaggggcgatgagtccagtggacttgacatagaagttattgttgacctttgtaagagaagatgcaacagaatgatgatagaggctagaatgcaggagtctaaacatgaaaagaatgaataggaagcaaaggtgatagaa

SEQ ID NO: 751936 - DNA, 629 bp, Homo sapiens
cagggacctcatggacttcctggaccaaaggtaatccaacaaatcccttgattatttgatttctgcttccttgataatcatggagaagcatgacagaagcatgtctgtcctatcttatttatttgtcaagtaatgttgataatctttgagcctttaagcatccatatgtttaaatctcataacacaaaatgacttataacaaatttaaatgatatcacctggagaaaaattattcttcattttgcctttttcctggtcactatgtaacctctcaaattacaaatcataatgtactcaagtcaaccatttagaagtgaatctgatgwgattctcagactagtctagatgcttttttttaatggtgtctctaactgtatatttggatgttattaattgatatttcttgcttgccatgtagtcatatctcatctaaatgctttgcctctccagcatcttaattttgtactcgcccagaggtcattggtctagaagtgggtggggtatttcaggtgtgctatactgggaagaagatcacatcacttacatgcattctatacttttgggttaagaagagaacaagggataaaagctcctctttgtcagaattagtgtagcttgcatgatgaaga

SEQ ID NO: 751937 - DNA, 504 bp, Homo sapiens
acagggacaacaaataagtagatagataactcctaactttaaatagtaatttccaggccaggtgcggtagctcatgcctataatcccagcactctgggaggccaaggcgggtggaatacctgaggtcaggagttcgagaccagcctggccaaaatggcgaaaccccrtctctattaaaaatacaaaaattagctggcatggtggcaggcacctgtaatcccagctactcaagaggctgagacaggagaatcgcttgaatccaggaggcagaggttgcagtgagctgagatcaagccactgcactccagcctgggtgacagagcaagacttcatctcaaaaacaaaaaaagagagagagaaaaatagtaatttccaaagacagggatttcttacattttattgtatttttgacccataattttgcatacttatgggacacagtgtgatctttaaatacatgtatacattgtgaaattatcaaatcagggtaattggcttaccttc

SEQ ID NO: 751938 - DNA, 504 bp, Homo sapiens
acagggacaacaaataagtagatagataactcctaactttaaatagtaatttccaggccaggtgcggtagctcatgcctataatcccagcactctgggaggccaaggcgggtggaatacctgaggtcaggagttcgagaccagcctggccaaaatggcgaaaccccgtctctattaaaaatacaaaaattagctggcatggtggcaggcacctgtaatcccagctactcargaggctgagacaggagaatcgcttgaatccaggaggcagaggttgcagtgagctgagatcaagccactgcactccagcctgggtgacagagcaagacttcatctcaaaaacaaaaaaagagagagagaaaaatagtaatttccaaagacagggatttcttacattttattgtatttttgacccataattttgcatacttatgggacacagtgtgatctttaaatacatgtatacattgtgaaattatcaaatcagggtaattggcttaccttc

SEQ ID NO: 751939 - DNA, 646 bp, Homo sapiens
ggtttccagagggtctggactggtttgggtgctttaaaatagatatttagttcagtggtgcttatggaggcgatgggaatagaacttaagtgtgagacttgggtgaatggttgttaaatattggtgtcttcaagtttttcgttttttttttcttttgctgttgttaccacttatcactgtctctatgttaaaatgccaaaagctatctagttgttgttgcttttttcccaagtttccaccccatcactccttaccgtgactcctgctggcggagggtacgaagcagtgtctgtccctgcagtccaaaggccctgtgggaggagactggcctgcatctctctaagacttagtctgacaccatgctcatctcttgttctstgttcaatcagtagtccaggagagatcttctgccacttcagagctttgttaaactaacctaatttgtccaaatcacccccaaaccaccatctctgattcaatcttacatgcgacagcctgatccgtttctctggacaggtgtctttcctggaatgcagcccaagcactgttgctcctcgcacccttcaggtctctcctttgagtcgtggtcactgagagggttgaggaagcagcacctgaggtcccagcctttgcaggagccgccttg

SEQ ID NO: 751940 - DNA, 540 bp, Homo sapiens
gcatccatttcttcctcttttcgtaactgttctctgatttctctatggacagtcactgcctcccgcatgctcagcccaagaattctgaaacggttttgggcaggggtaggaacatgtatgacatagaactaagtcagagcattgtgcctctccgaccatagaggaacctggtctgatcagakttaagaagatagagtggaccctcttcctaggaatcctggccaacagactctcatggtttgctgtactttgaataaagaggagataaggtctggagctgctgttgtggccttgagccacagtggtggaacttctttgaggatgaagccaacaacctggaaggctgaactgaaaggatgagagaaactgaatcaagattacattatttagggtttgagaacagctgtatctgaaaccaacaatattcctgacattattattatgttaacagataaatacccatttttacttcagcatgtgtgggtagactacttttaatttgcagttgaagagtctgataccccctctcccgtaatacct

SEQ ID NO: 751941 - DNA, 617 bp, Homo sapiens
gtggggccagataagggaataaaagcaggccagggagccagcagctgcacccactcaggtccccttccacactgtggaagatttgttgtttagctctctgcaataaatcttgctgcttctcactctttgggtccacgctgcctttatgagctgtaasactcaccacaaaggtctgcagcttcactcctgaagccagcgagaccacgaacccacagggagggatgaacaactccggatgggaggaacgaataactccggacgcgccccctttatgaacagtaactcactgcaaaggtctgcagcttcactcctgagaccagtgagaccacaaacccaccagaaggaacaaacaactccagacccaccgccttttaagagctgtaacactcactgcaaaggtctgcagcttcactcctgaagtcagcaagaccacgaacccatcagaaggaagaaactctggacacatctgaacatctgaaggaacaaactccggacacaccatctttaagaactgtaacactcaccgtgagggtctgtggcttcattcctgaagtcagtgagaccaagaacccaccaattctgggcacaccttgatccctattaaaaccagagcctta

SEQ ID NO: 751942 - DNA, 617 bp, Homo sapiens
gtggggccagataagggaataaaagcaggccagggagccagcagctgcacccactcaggtccccttccacactgtggaagatttgttgtttagctctctgcaataaatcttgctgcttctcactctttgggtccacgctgcctttatgagctgtaacactcaccacaaaggtctgcagcttcactcctgaagccagcgagaccacgaacccacagggagggatgaacaactccggatgggaggaacgaataactccggacgcgccmcctttatgaacagtaactcactgcaaaggtctgcagcttcactcctgagaccagtgagaccacaaacccaccagaaggaacaaacaactccagacccaccgccttttaagagctgtaacactcactgcaaaggtctgcagcttcactcctgaagtcagcaagaccacgaacccatcagaaggaagaaactctggacacatctgaacatctgaaggaacaaactccggacacaccatctttaagaactgtaacactcaccgtgagggtctgtggcttcattcctgaagtcagtgagaccaagaacccaccaattctgggcacaccttgatccctattaaaaccagagcctta

SEQ ID NO: 751943 - DNA, 672 bp, Homo sapiens
tttcctacctgtaaaatagggatcctgaaagctgcctggcgtacctcccaggtgacaggtggattaaatgagaagtaacaaatgcatgttttgaaaggaagatgctgtacaaattccagttattattacatgacagaatgtaagcaatgttaggaaggcatcttctcctatctagaaatattgttttgccaaggcatgttaaagggcctgaaatgtcattattagaaatttattccctgggatgttaaaggcttttacatgtttaagacattttcgctaaaatgcatttgggaggcatcaatattcagccattatctctgggcctctgagagtctggcctgagacatggacttttcctggctggcagcaaaccagcaaaccattgcggayggggctgaggaaggaggggtgtgataaagagaagccagtgtcccaggcaggtgctccccaagtgtgggatagaccaacgcttctcacccctgtgtgtgcccacgaatgacaagcggagggagttaaaatgcagaatcccattcagagggcctgagcggggcctgagaatcctcatttctagggagatcccaagtgatgccaacactacgaggaccacatttggaagagcagtgatacataacagcaagcccaaatgtccccagaaaaccaggctttggtgga

SEQ ID NO: 751944 - DNA, 596 bp, Homo sapiens
caggccattcccaatacaggtgagggagcatctgctacagtgtggatcggtcagaatgggggccaaggtgggcatggagaagcagagggtaatcccccctacagatgacagaagggtgttccagagcagtggtagggcctcaccttaccaggctaagtaaggtatttcttcctcactcatgcatcctaggaggtgagagtgccattgacacaagatccccacaggcgctatagctatatatagtttgttattttagatctatatgtatgtttaaatggttggttagaaactctatgcagttgattctatggtctgcattcagtccttaactaattcccttttctctttataaaaccctgagcttcaagaatcattcttgtcattatgaagagaggtaatccagccaggcagatcctatagcaattacggttaaggatctggtacctacccrtggaaaatattggtggacttgtgagttgctacaaactagttggatggcaattaaacttaatggatcaaactcttttatacttctcaagttggtcattcttattctgaaaatatgcactaatagcccaatatatggtgatgttcca

SEQ ID NO: 751945 - DNA, 521 bp, Homo sapiens
acgtactcccctctgaataagaaagctgaatctcattggtcagcaatgagggagattcattttggtattttttcttttttcttttataggcaatctttcttctcttccttctagattaacaggattctttcagtcagctttcaaaactcattcagtgtagatctggtttgttttcttccttgaaaaaaattattaatataataccacagtctctgcaccgaacatcatgatgcatgcctataatcgcagctactcaggaggctgaggtgggagaatcacttgacaccaagagtttgagcattttttagagatgggaccccatttcttaaaataaataaataaataaataaataaataaaaaggtgtctgtgtrtgtgaaaccacaatctccacgttctgaatgtaattatgccaaatatattttcttcttacattctttgcatttcttttaaacatgttttaaaatttaattttcttttaaaataggttttgttttcccattttcttcacaatttccttaa

SEQ ID NO: 751946 - DNA, 548 bp, Homo sapiens
gacagaggaacacgacagcgactctgcagagcacggggatcctgctggtgaggggaaagaggtcctgtgtgacttctgccttgatgacaccagaagagtgaaggcagtgaagtcctgtctaacctgcatggtgaattactgtgaagagcacttgcagccgcatcaggtgaacatcaaactgcaaagccacctgctgaccgagccagtgaaggaccacaactggcgatactgycctgcccaccacagaccactgtctgccttctgctgccctgatcagcagtgcatctgccaggactgttgccaggagcacagtggccacaccatagtctccctggatgcagcccgcaggtacaagcaggtgagtgcttggggaccattcatccatttgggagagggcggtggggtatggtgtgcccagctggctgcagctgataggtccactgacgccactactatgctctgagcatacctgaaaaagactagcttcagcgtctgcctgctgggtcagtgtaaatatacattgcacttggttttggaaactgtgtgga

SEQ ID NO: 751947 - DNA, 545 bp, Homo sapiens
ctgcatggtgaattactgtgaagagcacttgcagccgcatcaggtgaacatcaaactgcaaagccacctgctgaccgagccagtgaaggaccacaactggcgatactgtcctgcccaccacagmccactgtctgccttctgctgccctgatcagcagtgcatctgccaggactgttgccaggagcacagtggccacaccatagtctccctggatgcagcccgcaggtacaagcaggtgagtgcttggggaccattcatccatttgggagagggcggtggggtatggtgtgcccagctggctgcagctgataggtccactgacgccactactatgctctgagcatacctgaaaaagactagcttcagcgtctgcctgctgggtcagtgtaaatatacattgcacttggttttggaaactgtgtggagtaggttgctccgtccccatctctgtcccactgtctctgtgcgatctctgtctgtgtctgtctctcctccttcttgctagtttcctgctgtgccttatacagcttttggtgatgtgtgtt

SEQ ID NO: 751948 - DNA, 599 bp, Homo sapiens
ttattgtaagtttgtttcataaagaggattccccatatccaggaatcagccagatcagtgctgcctctactggataggtggattatttgtactttgtcagtgccgattttaggtagtgtgattgagttgagttggagatgatcactccasgttctctgcctttttccagcccgttgctagctgtgtcctttgccacttgttgtgctgttccaggagttgccattctgaccttgggggtgaatccactcacaggagccctggggctcttcaacattttcctgtatacctgctgctacacaccactgaaaaggatcagcattgccaacacatgggtcggagctgtggttggggccatcccgcctgtcatgggctggacagcggccacgggcagcctcgatgctggtaagtgtcccgcgatgtggagtctcatatgagcacactcggtcaaggaggcatttcctccctgagctgtagcacttggttcgattccattccatcccacgttaattcttttagcaaatgtgctgatgtggcagactgaaattctgtggatgcagagtaaagagagaccgtgtcatcctggctggtgggtgcacatg

SEQ ID NO: 751949 - DNA, 545 bp, Homo sapiens
ctgcatggtgaattactgtgaagagcacttgcagccgcatcaggtgaacatcaaactgcaaagccacctgctgaccgagccagtgaaggaccacaactggcgatactgtcctgcccaccacagaccactgtctgccttctgctgccctgatcagcagtgcatctgccaggactgttgccaggagcacagtggccacaccatagtctccctggatgcagcccgcaggtacaagcaggtgagtgcttggggaccattcatccatttgggagagggcggtggggtatggtgtgcccagctggctgcagctgmtaggtccactgacgccactactatgctctgagcatacctgaaaaagactagcttcagcgtctgcctgctgggtcagtgtaaatatacattgcacttggttttggaaactgtgtggagtaggttgctccgtccccatctctgtcccactgtctctgtgcgatctctgtctgtgtctgtctctcctccttcttgctagtttcctgctgtgccttatacagcttttggtgatgtgtgtt

SEQ ID NO: 751950 - DNA, 655 bp, Homo sapiens
atttttcatagaacgccgattttttaaaattttcttttttttgaaaaagcagatgatgtggagaaagcacaaaaacaaggacaattggaaactcctggaaaactgcccagtcacccaaagaaaaagtcttggaaaatccctatgtcacctgaccaattcctcctgactgttagcgccctgcagcacgcccgtaattccggggaatttgcctatccctgtaggccccaaacagaaattactgatgtctggggaccttcaatttcatacccaaggaaggtcttgaatttcaaaggaaaatcaatccaacgtgcagttgatcggttgagattgagcaatcctcctatagatgtgaaacgaaccagtattccccttgaaatccagaaactgcagcccaacttgaagatctctttgcacagtcctagagcccagtccaccatacccsagcccatgattatccgctccaggttctctggcagcttaaagggtggagaccaagtgaccagttcaattgaaagggctgtgtgcagtacgggtcccctgaccagtatgcaggtcattaaaccaaaccgcatgctagctccacaagtgggcacagccaccctgtctcttaagaaagaacggcctcgcatctatacagcccttgatccttttagag

SEQ ID NO: 751951 - DNA, 619 bp, Homo sapiens
cctcctcctggaggcactttgtttggtttccaggacactaccccctcctggctcaccttatgttccttggtacttctttttcagtccccacagcctattccttcttatctttgtgatctctaattattggaatgcyaggagtctgtcttagccatctttatctttttagttgttcaggacaaaaactttggaatcttccttgattccttttatttacccttcctccacctccccagtcagtccatcagcaaatcctgtcagctctaccttaaaatgtacttggaatctatttctcatcacctccactgcatccatcttagaccaagccactacttcttggcctcgtgattaaagtagtttcctaaccagtctcctagcgttgtgcttttgtccctccttcttctcccctccccctccagatttttactacagtagccagaattctctttctaacaggtgagtcagaacatgcagtcttacacttaaaacactccaatggatctccctttcaatgcttttttggttttagcatcttaaaatgtcgtttagcatcttaaaatgtccaaaatcaaactgctgattttgccccgaaatcttttgtgtccatggtcttccccat

SEQ ID NO: 751952 - DNA, 619 bp, Homo sapiens
cctcctcctggaggcactttgtttggtttccaggacactaccccctcctggctcaccttatgttccttggtacttctttttcagtccccacagcctattccttcttatctttgtgatctctaattattggaatgccaggagtctgtcttagccatctttatctttttagttgttcaggacaaaaactttggaatcttccttgattccttttatttacccttcctccacctccccagtcagtccatcagcaaatcctgtcagctctmccttaaaatgtacttggaatctatttctcatcacctccactgcatccatcttagaccaagccactacttcttggcctcgtgattaaagtagtttcctaaccagtctcctagcgttgtgcttttgtccctccttcttctcccctccccctccagatttttactacagtagccagaattctctttctaacaggtgagtcagaacatgcagtcttacacttaaaacactccaatggatctccctttcaatgcttttttggttttagcatcttaaaatgtcgtttagcatcttaaaatgtccaaaatcaaactgctgattttgccccgaaatcttttgtgtccatggtcttccccat

SEQ ID NO: 751953 - DNA, 619 bp, Homo sapiens
cctcctcctggaggcactttgtttggtttccaggacactaccccctcctggctcaccttatgttccttggtacttctttttcagtccccacagcctattccttcttatctttgtgatctctaattattggaatgccaggagtctgtcttagccatctttatctttttagttgttcaggacaaaaactttggaatcttccttgattccttttatttacccttcctccacctccccagtcagtccatcagcaaatcctgtcagctctaccttaaaatgtacttggaatctatttytcatcacctccactgcatccatcttagaccaagccactacttcttggcctcgtgattaaagtagtttcctaaccagtctcctagcgttgtgcttttgtccctccttcttctcccctccccctccagatttttactacagtagccagaattctctttctaacaggtgagtcagaacatgcagtcttacacttaaaacactccaatggatctccctttcaatgcttttttggttttagcatcttaaaatgtcgtttagcatcttaaaatgtccaaaatcaaactgctgattttgccccgaaatcttttgtgtccatggtcttccccat

SEQ ID NO: 751954 - DNA, 619 bp, Homo sapiens
cctcctcctggaggcactttgtttggtttccaggacactaccccctcctggctcaccttatgttccttggtacttctttttcagtccccacagcctattccttcttatctttgtgatctctaattattggaatgccaggagtctgtcttagccatctttatctttttagttgttcaggacaaaaactttggaatcttccttgattccttttatttacccttcctccacctccccagtcagtccatcagcaaatcctgtcagctctaccttaaaatgtacttggaatctatttctcatcacctccactgcatccatcttagaccaagccaytacttcttggcctcgtgattaaagtagtttcctaaccagtctcctagcgttgtgcttttgtccctccttcttctcccctccccctccagatttttactacagtagccagaattctctttctaacaggtgagtcagaacatgcagtcttacacttaaaacactccaatggatctccctttcaatgcttttttggttttagcatcttaaaatgtcgtttagcatcttaaaatgtccaaaatcaaactgctgattttgccccgaaatcttttgtgtccatggtcttccccat

SEQ ID NO: 751955 - DNA, 433 bp, Homo sapiens
ggaaggtgcggccgctgctgggccagatagaggacaatgtgtcacacccatccggctctgatgtcacacttgacactgcaccagaggacctgagcctctgctggctccagcccagcccctttgccttcccctactgccacctggcctggccagccagcagggactcrggaaagcacacaggtttcagagtaggagggcaaggaatgaactgggctctgccacggagcagcttcatatgcctgaataattcacttgctagtctcagcctgctcctcttccatgaagtagagaccacggtcctacctagctcataggtggctgtcggggtcaaatgagtagacttttacaccatgtgaggagctaacaagtattattagtatcattagggagtgtggaaaaagtgtgatatctcatctctcgccttcccatcatg

SEQ ID NO: 751956 - DNA, 433 bp, Homo sapiens
ggaaggtgcggccgctgctgggccagatagaggacaatgtgtcacacccatccggctctgatgtcacacttgacactgcaccagaggacctgagcctctgctggctccagcccagcccctttgccttcccctactgccacctggcctggccagccagcagggactcgggaaagcacacaggtttcagagtaggagggcaaggaatgaactgggctctgccacggagcagcttcatatgcctgaataattcacttgctagtctcagcctgctcctcttccatgaagtagagaccayggtcctacctagctcataggtggctgtcggggtcaaatgagtagacttttacaccatgtgaggagctaacaagtattattagtatcattagggagtgtggaaaaagtgtgatatctcatctctcgccttcccatcatg

SEQ ID NO: 751957 - DNA, 541 bp, Homo sapiens
acttcctatcttagtaccagaagaaaaagcaagatagagagccagccttgttgggagatgaaaaagaaggaaatgggacaaactcctagatattaaacaagtcctcccccagcccagcaccacctcagagctccatacatctatctccttcccaaacatgtaaactgatgtcaaataagataatatgaactgatttgtgcaaatgattgcaactactttataattaaacatctagggaattatatatgtgaaatagatatctctgcacatactagagatttaattgcatcctggattaaaagaaattttgacccaagattgaaaacagatgctcaatcacttcargtcccaacggttgctttgtaagcaagggacactggattctgtgccttcaaaaatgttttccccaacttcattgttttttgccaaatactcattaaagaagaaacacaaagaactccactgttagattttttttctgggcttcttgaatgttagaaatcaacaggattagcaatatttgattggaaaattttcttag

SEQ ID NO: 751958 - DNA, 590 bp, Homo sapiens
aggttctcaagaggtgcagcagcttgcagacaagcttttgaaaattactccaagtgtttggagctgtaggcttcagtgtcaaccactctgacctttggggctgttcccctgatcttcaggggtagttttatgacctgtgcaccagtgcagccctccctcccagctattcaaaggttgcatgaattcctaattctcaattaaactctttatatctggaatacatagagtggcttctgtattcctgagcaagccctgatttgtccactcgtttaggaagtgtgagtttaccctgtccctgcatctgaccacactcacctgaatagtctctatctctgggacaattcatttgagtgatttcagattacctttcctttggtacaaaaagaaaccagtggacatagagaaatcctttttggttttttttgaaatggagtctcactcygtcgcccaggctgaagtgcagtggcttaaccttggctcactgcaacctccaccttctaggttcaagcaattctcctgcctcagcctcccaagtagctgagactacaggccaccatacctggctaatttttgtatttttagtagagagg

SEQ ID NO: 751959 - DNA, 646 bp, Homo sapiens
aactgttaagagtttgtatcaagaaaggatactgaattttgtcaaatagtttttctgcatcaattgagaggttcatgtggtttttctcttttagtcttttaatagatgtgttacattgattgacttgcatgccatgcataaatcccacttgtacaccacagggaaatcccacttggttccgatgtataaccttcctgatgtgttgttgaatctggtttgctaatattttattgaagattttagtatcaaagttcaagacttattggcctgtaggttttttttacttgaagtatctttgtctggcttaggtatcaaggtgacactggcctcatgaaatatatttggaagtattccctctagctctatttttttttttggaagagtttaagaagtattggtaataattcttttttaaatgttttgtgaacttcttctctgaagtcatctggttcagtgcttttcattgctggaaggtgtttaattactttaatatctttgttattggkttgttcgagctttctatttctttttgagtcaattttagtaggttatatttttctaggaatgtattcatctcttctaggttatccacattgttgacatataatttttcataataatcctttatgatcttttttatttctga

SEQ ID NO: 751960 - DNA, 595 bp, Homo sapiens
cacaagtgagactggcctataattttcttttcttgtatatctttgtctgatttttatattggggttatattaccctcataaaatattatgggaagtgattctcatttttcttacttctgtcaaaattgctataaagttggtcaaagttggaaaagctggtgtaatttttgaataatgtattttttttattctttkggtaaaactgccctataaatacatctgaatgtggtggtattcattttgtgtatggatacttaacttgattcagtttctttgataggtcttataagattttctctttcttgtggggtctgttatgataattacctattttgcctaagttttcaaattgagctattcatattttttccttaggattaaaaaattcccattgtatctgtagttatgtccccttttcatgtattcctaatatcaacatttaaaactaatttgtccttttaagtacctacctcagcttatcccatgtattttgatataaatgacagcacttttatttttctgtcacttctaagtatttccaaatttacattgttatttcttcttaaacccatgatttagaaacatttaacatttt

SEQ ID NO: 751961 - DNA, 595 bp, Homo sapiens
cacaagtgagactggcctataattttcttttcttgtatatctttgtctgatttttatattggggttatattaccctcataaaatattatgggaagtgattctcatttttcttacttctgtcaaaattgctataaagttggtcaaagttggaaaagctggtgtaatttttgaataatgtattttttttattcttttggtaaaactgccctataaatacatctgaatgtggtggtattcattttgtgtatggatacttaacttgattcagtttctttgataggtcttataagattttctctttcttgtggggtctgttatgataattayctattttgcctaagttttcaaattgagctattcatattttttccttaggattaaaaaattcccattgtatctgtagttatgtccccttttcatgtattcctaatatcaacatttaaaactaatttgtccttttaagtacctacctcagcttatcccatgtattttgatataaatgacagcacttttatttttctgtcacttctaagtatttccaaatttacattgttatttcttcttaaacccatgatttagaaacatttaacatttt

SEQ ID NO: 751962 - DNA, 614 bp, Homo sapiens
atcatgcctggctaatttttgaattttttatagaaatggggtttcgccatgttgcccaggctaattctttcttattagttgagatttactttgtggtttcatgtgaagtcaaattttctaaacatttcatttgtgcttgagttgaatttttttttcctaattagcggattcaggatactatataggctcacaaggttttctatattcttttaacacctttattgaagtgtaatttatatattatacaactcatcccttttaaattgtacaatttaaggkttttagtaaatttacaaagttgtgcaatgatcactacagtacagctttagaatgttttgcctcaaaaaggcaagtacaaaaggcaggaaaagttatgggagaaggaaaggaaacctttctgtttttggtaacccttgtttccatctttttaattgatttttgtatgcttgactcatcagtttcagagagacataaatataaatatgcacccactatgattgtggttttgttgatttctctttgtaatactgtaattttttgctttacatattttgtggctattttattaagtacatacaagtttgaaattattatattttagaggcaaattgttc

SEQ ID NO: 751963 - DNA, 565 bp, Homo sapiens
caaagcactggaattagagatgtgagtcactgcacctagcatggcaagattctgttttgtggttttcacagaaaggaattgttagggtaagcacaattaggattttctagttagaataatttcagtggcttctgggacatargtgctgttcctagttgcctgatacctggccctggcataactaaggcaagggaataatatccctgagtatgagagcctgctaaagtagttgtgggtgagggtctggcttgggacctgtcagtatccatatgaaagtcacatttgctggcaagcattttgccatctgtaataattagctaaccgtgtgtgggaggaaattggggaacggaggatggtgggcagtatctccagggtatgcaaggctgcagacatcagagcatcaaaaatatagatcataaaaagacatgcttattataaactttcataattatttttaaactatgcatttttgatccttattgtgatccattagattattacatatcaaaccaagtactcacgagatgttaggcaaactttcagaaatcttgttgacttttactta

SEQ ID NO: 751964 - DNA, 565 bp, Homo sapiens
ctcttattattgtggtttataggctcaaaaggaaatttgtggaatgactttatgcacatatgaaaaaacaaaaatcttgacaccatttctattctgtcagggtactagaaagaatcaaaaatcaaaatgactcaattttcctttttctcaacatttttatgaagctttagtataagaagtccagttaattcactggyattgtcttaatccacaaggtttaaggataatcagtttttacaatttcagtggtttcacaaaggaacattaattatttatcacaaggtcagaataaacataggacattattgattctatgtttacaaagattatacatttttaaattctaccatattttgtaactatgaagcagacttttaaagaatatgtcatgacttaacaagtaaacgtgttatgtattttgaaataattatgttgactttaactttcgacgtatactggtattctaaacatttcaaatgtgtcttccctacattgtatatttacttgtgctaacctttcaggatattgaactcttcagttgagaataattttttaacaaacctcg

SEQ ID NO: 751965 - DNA, 565 bp, Homo sapiens
ctcttattattgtggtttataggctcaaaaggaaatttgtggaatgactttatgcacatatgaaaaaacaaaaatcttgacaccatttctattctgtcagggtactagaaagaatcaaaaatcaaaatgactcaattttcctttttctcaacatttttatgaagctttagtataagaagtccagttaattcactggtattgtcttaatccacaaggtttaaggataatcagtttttacaatttcagtggtttcacaaaggaacattaattatttatcacaaggtcagaataaacataggacattattgattctatgtttacaaagattatacatttttaaattctaccatattttgtaactatraagcagacttttaaagaatatgtcatgacttaacaagtaaacgtgttatgtattttgaaataattatgttgactttaactttcgacgtatactggtattctaaacatttcaaatgtgtcttccctacattgtatatttacttgtgctaacctttcaggatattgaactcttcagttgagaataattttttaacaaacctcg

SEQ ID NO: 751966 - DNA, 565 bp, Homo sapiens
ctcttattattgtggtttataggctcaaaaggaaatttgtggaatgactttatgcacatatgaaaaaacaaaaatcttgacaccatttctattctgtcagggtactagaaagaatcaaaaatcaaaatgactcaattttcctttttctcaacatttttatgaagctttagtataagaagtccagttaattcactggtattgtcttaatccacaaggtttaaggataatcagtttttacaatttcagtggtttcacaaaggaacattaattatttatcacaaggtcagaataaacataggacattattgattctatgtttacaaagattatacatttttaaattctaccatattttgtaactatgaagcagacttttaaagaatatgtcatgayttaacaagtaaacgtgttatgtattttgaaataattatgttgactttaactttcgacgtatactggtattctaaacatttcaaatgtgtcttccctacattgtatatttacttgtgctaacctttcaggatattgaactcttcagttgagaataattttttaacaaacctcg

SEQ ID NO: 751967 - DNA, 614 bp, Homo sapiens
acataagccattcctgttttgtaaaaccacagaatccatgagaatccctggttctcgtcagttctcttgtcccattctcaccgttctatgtatttccttcacacatttgatgaagatttgtaaagaggagttgttgggcagaggaggacttgcttgtgttttggttgtgccttaaatttcaagacttaagtttaaaatcatcataagttatgctggccaaaacatgactgacaaacaatatttatatatmtgtcagtttcttcctttccattctctatgggatattctttctccttcggccagtccaccaagttgacagcagtattggtctctcctctgctgagaaagtcttgccacattctggaatttagttcatttagcattgatactatatcttacacagcagttacaatgagggtaatactttgttgaactaaagtcagtcaatagtaattcttcagaatttatgataggaagactatttctttagggctttaatgggatttctaatacgatatttccctggtatgcaatgttgtttttgacttacaatcttggccaatgttaaaggacagatttaaaggtctcatttgggctttatacactgtgatagt

SEQ ID NO: 751968 - DNA, 621 bp, Homo sapiens
tggctttaaaatgcagagtttccctacataagccctctttttccctgtcgccgtccacgtaagatgtgacttgctcctccatgccttccaccatgattatgaggcctctccagccatgtggagctgtaagtccactaaacccttttttctgcataacttacccagtcttgggtatgtctttatcgcagtgtgaaaacagactagtagagtaaattggtactgggagtgggttattgctgaaaagatactggaaactgtggaagcaactttggaactgtgtaacaggcagatgttggaacagtttggagggctcagaagaagacaggacaatgtgggaaagtttggaacttcctagagacttgttgaatggctttgcccaaaatgctgatagtgatatgaacaataaagcccagacygaggtggtctcagatggaaatgaggaacttgttgggaagtggagcaaaagttactcttgttatattttagcaaagagactggtggcatttttacttctcccctagcgatttatggaactatgaacttgagatagatgaattagggtatctggtgaaaaaaaaattctaagcagcagagcattcaagatgtgacttgggtgctgtt

SEQ ID NO: 751969 - DNA, 626 bp, Homo sapiens
acttcaatggtactttacagctaatatcaccaccacccaacacccatctgcataatgcatttaaccttacaaagaatacttttatctattatattacttcattttcaaaatggtcttataaaacaggtagagcagggattttaactgaatttccattatgaggaaaataaggtaacaacccattcctggcaaaatctggactagaattcaratcatttggctccaaactaacacatgcttctccaaaaagcagcccagtatttccagcgacttaatttaatgaacagattcaagacatgggttaaaaatgttgaggatgtcaggctgactgtcactgagtatacttcttgggtaaggggcatccttactcctgttaagatgatcttactaacagctaaagcagactgggagaattttgacaggagaactactattcttttcagacacagatagttcccttttggtgaaacttgttgcaatgttccacaaagtgttaccgcatctggaaagtccataataattttgatttatctgcactgacagtcagcagtatgttatattcactgttgcataatattattatctgttgatcttcccagtagataatatattcctcaaaggaagaa

SEQ ID NO: 751970 - DNA, 626 bp, Homo sapiens
acttcaatggtactttacagctaatatcaccaccacccaacacccatctgcataatgcatttaaccttacaaagaatacttttatctattatattacttcattttcaaaatggtcttataaaacaggtagagcagggattttaactgaatttccattatgaggaaaataaggtaacaacccattcctggcaaaatctggactagaattcaaatcatttggctccaaactaacacatgcttctccaaaaagcagcccagtatttccagcgacttaatttaatgaacagattcaagacatgggttaaaaatgttgaggatgtcaggctgactgtcactgagtatacttcttgggtaaggggcatccttactcckgttaagatgatcttactaacagctaaagcagactgggagaattttgacaggagaactactattcttttcagacacagatagttcccttttggtgaaacttgttgcaatgttccacaaagtgttaccgcatctggaaagtccataataattttgatttatctgcactgacagtcagcagtatgttatattcactgttgcataatattattatctgttgatcttcccagtagataatatattcctcaaaggaagaa

SEQ ID NO: 751971 - DNA, 465 bp, Homo sapiens
tgtatattttactttatgtttcccagactttataaaggaaggtgcatagcttgtagacagcagtccccaagtgtagtttttactctgccactaacgagcattgtgatcttgagcaaaccagttggtctcttcaaggttccattttgttgtttgataaatgaaggacgtggaatagaagaacgttgaagttccttccctccttcaaatgtaatgatcatgtaaggtagattgctttaattacatkatactttgaaaaattaaattaaacaaatattaaaaaatcattaaattaaccaacacttcagtaccaaccctgcaatctctaaataatagagtgacttaaataaataataaattactgatgacttgaattaaaaataaactaatcttagattaagctacactaaaggtttggaatttagggtaataatatgacttcctgagccctgaaatattttaccagat

SEQ ID NO: 751972 - DNA, 659 bp, Homo sapiens
cccctgaccacccccacaggtctcagggtgtgttgttccactccctatgtccatctgctgtcattgttcagctcccacttataagtgcatgttcttagatatactctcttactaatctgtgtagggtagattcactccctgaagtcactcatggggttctaatttctatagctgagaaatgccttttagatgcccttgttctatcatacaaaaacactgttacttattagaattccagaaaagtttcctaaacaccatcaaaaattgtatggcaaagaacatgtttgtacctcatcaaattttatttatgttttgattatctaatgtgctagtcatgtttgtgactytccacacgaaatgatttcccatgttttctttctaccatgcaccatccttatcattaaggaacacaaatacatttaatatcaatgcaatcagtgtagaagtgaggcaatatgacacagtataaaacaggcagatatacagttatatatttatcaacatgtcccatagataacatatatctatattccttcaactaaaaagatttgtttaatattgccatttattatcccatatttctattttaaaatgttttgcagccataaaaacaaatgagatcatgtcttttgcaggaatatggatggagctagaggcca

SEQ ID NO: 751973 - DNA, 614 bp, Homo sapiens
atcaaaagacaaagcttaggcttctgaccactagaatgtccacccagacttcttcactgttttagagaataagacacagcagagtagcggctgggacttaaaagagttgccttctttccttctctgcaaccctactgctctttgtacaagcaaatcaggactcttctcaagtgaaactgaaaattcagcttaaaaaaaaccccttttcaagactgtgaaatctaccacatcrgtagcttttaaaatatcatgatgtaactttatattccactacatgcctgtgaacatgtcaacagaatgacacagtggtgaatgaatgaaaaatatcacgatgtaacttcatattccactacatgactgtgagcatgccaatagaatgacacagtaatgaatgaatgagaaaaactaacagtgagcacctactatgtgtccaatctattctatctcaccctttctcacaacaacaaatgtgcacagggaattcttgtcatcatcatttacactgagaaaactgaggttctgtttccattccgtgtgccctttcacaattccttataaaggcactttaccatagccaacacatcctggttaaactacagaattataatctgcat

SEQ ID NO: 751974 - DNA, 503 bp, Homo sapiens
taacacttcaatttctaaaatatctacagttgacacttggtatgtgccacctccttaccaatggatatgaattacttttgatttatccttattcattctaaatgtctctttttggaactgccttagttactagtgcaacattagtataactttgagaatcctcatgcaaggttattttaacaggatacaccgctaaaataaaagtgatcctcaccaacaaaacaaaataatttagttatktgtgtcaaactttgaaggtatatagaaacaacgcagtggatatcagaaataaaaacattctatcatcatgcactcctgaaaattcgaagttagagagccgaaaattcgaagttagagagccataaattcagtctagattctccatcttattgggcatcatcaatttcatcatcatcatcatcatcatcactagccatcttctacacttatgaacagaattttcacacattatttcattcattctcaaaagcaactaagaggaa

SEQ ID NO: 751975 - DNA, 503 bp, Homo sapiens
taacacttcaatttctaaaatatctacagttgacacttggtatgtgccacctccttaccaatggatatgaattacttttgatttatccttattcattctaaatgtctctttttggaactgccttagttactagtgcaacattagtataactttgagaatcctcatgcaaggttattttaacaggatacaccgctaaaataaaagtgatcctcaccaacaaaacaaaataatttagttatgtgtgtcaaactttgaaggtmtatagaaacaacgcagtggatatcagaaataaaaacattctatcatcatgcactcctgaaaattcgaagttagagagccgaaaattcgaagttagagagccataaattcagtctagattctccatcttattgggcatcatcaatttcatcatcatcatcatcatcatcactagccatcttctacacttatgaacagaattttcacacattatttcattcattctcaaaagcaactaagaggaa

SEQ ID NO: 751976 - DNA, 611 bp, Homo sapiens
ggttagatggaactggtcacttgtttgaaaacatttattaaaatttctagttgttttgacagcctgaagatctaatcaatacagagctctgtagctcaccacctacaactatgactggtgtctatttacactcattgtgtgaagagtgtaaggatcaagaaaactacttgaaaggctattataataaataagtcaataaataaacaggtgcacactttcctaataaagccttgtctatayttacattgtaagacatttaatacttcctaggccatctttttgatgaattgtttgaaacgttgtaagaaaacttttgccctgggaaattcagttcagccaaataggctgactgacaacgctgtaaaatgctcgctttgtgacctgctgctctggtctcaggcctctttagaaaacaaactgccattttcgcagtgattctgtgatatataaaaacaaagatgaggccataaaataacaactctattttatcaatttagaccagaacttgaattcccatctaatgtcatagcactcatattctttgcaaccagggagctgaaaagaagttttgtgacctcaccaaccccatcctccccatttcaagaacgcag

SEQ ID NO: 751977 - DNA, 611 bp, Homo sapiens
ggttagatggaactggtcacttgtttgaaaacatttattaaaatttctagttgttttgacagcctgaagatctaatcaatacagagctctgtagctcaccacctacaactatgactggtgtctatttacactcattgtgtgaagagtgtaaggatcaagaaaactacttgaaaggctattataataaataagtcaataaataaacaggtgcacactttcctaataaagccttgtctatatttacattgtaagacatttaatacttcctaggccatctttttgatgaattgtttgaaaygttgtaagaaaacttttgccctgggaaattcagttcagccaaataggctgactgacaacgctgtaaaatgctcgctttgtgacctgctgctctggtctcaggcctctttagaaaacaaactgccattttcgcagtgattctgtgatatataaaaacaaagatgaggccataaaataacaactctattttatcaatttagaccagaacttgaattcccatctaatgtcatagcactcatattctttgcaaccagggagctgaaaagaagttttgtgacctcaccaaccccatcctccccatttcaagaacgcag

SEQ ID NO: 751978 - DNA, 638 bp, Homo sapiens
caattttaccatatttattggtaacttttctgttctgcacgacaatttctgccctcctacattgtctacaaaccaccagactttcacagaaacctcattcccagtatattgcttcaccttctactacacagagtaaatagatgcaatgagaggaaaatttcctgccatcaaacctatgaacatactttcatttgtcacagtctcatattatttcttttttaaaataggtgttttcytacagccaactcgagttccatttccctcccacttccccatgtttctcagtatcagtgacccctcctctaactctatttttcaatcttgttttccatcaactctatttttcttctttccctgtatttttcaccaacatgtatatcacaattcagtattgtatttatttaaatgattttgaattaatatctgcctccaccaacactgttaacactaaaaggtcaccattatgatacatataggagctcaataaatctttgataataaataacaatagcagaaagcctttgtacagcatatacaatatgtcaagcactacatatattaacttatttaatacaaacttatcttcattttatagatgagaaatctcaggcacaaagacacaacagagaagttgacag

SEQ ID NO: 751979 - DNA, 638 bp, Homo sapiens
caattttaccatatttattggtaacttttctgttctgcacgacaatttctgccctcctacattgtctacaaaccaccagactttcacagaaacctcattcccagtatattgcttcaccttctactacacagagtaaatagatgcaatgagaggaaaatttcctgccatcaaacctatgaacatactttcatttgtcacagtctcatattatttcttttttaaaataggtgttttcctacagccaactcgagttccatttcyctcccacttccccatgtttctcagtatcagtgacccctcctctaactctatttttcaatcttgttttccatcaactctatttttcttctttccctgtatttttcaccaacatgtatatcacaattcagtattgtatttatttaaatgattttgaattaatatctgcctccaccaacactgttaacactaaaaggtcaccattatgatacatataggagctcaataaatctttgataataaataacaatagcagaaagcctttgtacagcatatacaatatgtcaagcactacatatattaacttatttaatacaaacttatcttcattttatagatgagaaatctcaggcacaaagacacaacagagaagttgacag

SEQ ID NO: 751980 - DNA, 588 bp, Homo sapiens
tttctcatgtacatctttctatactcaacagtgaaaattctgctaaccagataatcagagcaagaccaaatgagaccagccgctctctggaaatgactttttgatgaggtataaaagtagaaaagcagaagtaattttcaaacacaagacacctggggaggtactaggtgatatcacctttactatatgtctttcacttttaaattaatatttttactttcttctttcttctagtctgcaacaatcttattttctctgctctagtttaatttctattccagtgctctaytaattatttattttcctctgtaataattctgacattcatctaattctaaagatatatacctccacttaaaataattcaataccaagtactgcttatttttactttattttatttcagttttcttttacatatagtacaatttattctttttaaggtacaattgtatgtgttttgaccattacatagaaacttgcaaacaccaccacaatcaatatatagaatagtttcattatgtctaaagattacctcatgcttccctttatatcaaacctcttcccccacctctagcccctggcaac

SEQ ID NO: 751981 - DNA, 629 bp, Homo sapiens
ttgttctatgaaagaatgaagatgattgacagagcactatctaaattaatacagaaaaaaaagagagaagattgaagtaaacacaatgagaaatgacaaagtggacattgccattgaccctgcagaaatacaaacaaccctcagagactattatgaacatccctatgcacataaactaaaaaacccagaagaaatggacaaatttctggaaatagacaacctctaaagatcgaacaaggaagaaattgaaaccttgaatataccaaatgacaagtagtaattaaattagttattaaaaaacctcccaacmacaaaaggccaggaccagatggattcacagcccggttttaccaagtgtacaaagaactgctggtagcaatccttccggaactattttagaaaattaaggaggaggaactcctccctaactcattctatgaggccagcatcattctgataccaaaacctggcaaagatacacacacaaaaaaaaaaaaaaaagaaaaaagaggactttaggccaatatccccgatgaacttaaatgcaaaaatccttaacaaagtgctagcaaacttaatctagcagcacatcaaaaagctatccacaatgatcaagtagggtttattct

SEQ ID NO: 751982 - DNA, 629 bp, Homo sapiens
ttgttctatgaaagaatgaagatgattgacagagcactatctaaattaatacagaaaaaaaagagagaagattgaagtaaacacaatgagaaatgacaaagtggacattgccattgaccctgcagaaatacaaacaaccctcagagactattatgaacatccctatgcacataaactaaaaaacccagaagaaatggacaaatttctggaaatagacaacctctaaagatcgaacaaggaagaaattgaaaccttgaatataccaaatgacaagtagtaattaaattagttattaaaaaacctcccaaccacaaaaggccaggaccagatggattcacagcccggttttaccaagtgtacaaagaactgctggtagcaatccttccggaactattttagaaaattaaggaggaggractcctccctaactcattctatgaggccagcatcattctgataccaaaacctggcaaagatacacacacaaaaaaaaaaaaaaaagaaaaaagaggactttaggccaatatccccgatgaacttaaatgcaaaaatccttaacaaagtgctagcaaacttaatctagcagcacatcaaaaagctatccacaatgatcaagtagggtttattct

SEQ ID NO: 751983 - DNA, 629 bp, Homo sapiens
ttgttctatgaaagaatgaagatgattgacagagcactatctaaattaatacagaaaaaaaagagagaagattgaagtaaacacaatgagaaatgacaaagtggacattgccattgaccctgcagaaatacaaacaaccctcagagactattatgaacatccctatgcacataaactaaaaaacccagaagaaatggacaaatttctggaaatagacaacctctaaagatcgaacaaggaagaaattgaaaccttgaatataccaaatgacaagtagtaattaaattagttattaaaaaacctcccaaccacaaaaggccaggaccagatggattcacagcccggttttaccaagtgtacaaagaactgctggtagcaatccttccggaactattttagaaaattaaggaggaggaactcctccctaactcattctatgaggccagcatcattctgataccaaaacctggcaaagatacacacacamaaaaaaaaaaaaaagaaaaaagaggactttaggccaatatccccgatgaacttaaatgcaaaaatccttaacaaagtgctagcaaacttaatctagcagcacatcaaaaagctatccacaatgatcaagtagggtttattct

SEQ ID NO: 751984 - DNA, 616 bp, Homo sapiens
tttttgctctctatgctatgtgcagtataagaatcacaggctttacagaaaggcacatatttcccctcagtgttcaagatctaaaatgggccattaaagcatcaagagtattaaacaaagcctcatacttgttcagcctggatagaagataatcagagttctactcatcttccaatcataaacagggatgtatatacaatgaaagtaggcacagaagtcttctaaatgactttcaggtatttagaagatacccaaagccataatgtacttctctgaatatcataattggagaagaagtgaaaaataagcaaactcttgtatcttcatgagttatacraaaagaacaacacttataattatagatgttctccatttgattgatatataaataaaaagtgacactctataaacagaacagaaacctaagccagtgttgttaaatagaaagtaatgcttgagttttaacccttattccaaagcttttgccttgacataaaggaagtttatgtcttagtcctgctaaacaaaaaacacagatgacattttcaacctatttaagaatcattgccaccctcaaatgctaagacacatgcttatatactgtttgacttttttc

SEQ ID NO: 751985 - DNA, 616 bp, Homo sapiens
tttttgctctctatgctatgtgcagtataagaatcacaggctttacagaaaggcacatatttcccctcagtgttcaagatctaaaatgggccattaaagcatcaagagtattaaacaaagcctcatacttgttcagcctggatagaagataatcagagttctactcatcttccaatcataaacagggatgtatatacaatgaaagtaggcacagaagtcttctaaatgactttcaggtatttagaagatacccaaagccataatgtacttctctgaatatcataattggagaagaagtgaaaaataagcaaactcttgtatcttcatgagttatacgaaaagaacaacamttataattatagatgttctccatttgattgatatataaataaaaagtgacactctataaacagaacagaaacctaagccagtgttgttaaatagaaagtaatgcttgagttttaacccttattccaaagcttttgccttgacataaaggaagtttatgtcttagtcctgctaaacaaaaaacacagatgacattttcaacctatttaagaatcattgccaccctcaaatgctaagacacatgcttatatactgtttgacttttttc

SEQ ID NO: 751986 - DNA, 620 bp, Homo sapiens
ggatttgttgatctttttaatggttttttgtgtctctatctcatttagttcagctctgattttggttattttttgtcttctgctagctttagaatttgtgtgctgttggttctcgatttcttttagttgtgatatcaggttgttaacttgacatctttctaactttttgatgtgggcatttagtggtataaatttgcctcctaacactccttggctgtgtcccagagattctgktatgttgtatctttgttctcattagtttcaagaaactatttgatttctgccttgatttcattatttgcccaaaagtcatttaggagcaggttgttcagtttccatgtaatttatggttttgagtgaatttctcagtctcaatttccaatttgattgtgttgtggtccgagaagctgtttgttatgatttcagttcttttgcatttgccaaagagtgctttacttcgattatgtgattgatttcaaaacaagtgccacatggcaatgacaagaatgtatattctgttgtttaggggtagagaattctgtagatatctgtcaggttcatttgatgcagtgctgaattcaagtcctgaatatctttgttaattttctgtctcaattatc

SEQ ID NO: 751987 - DNA, 636 bp, Homo sapiens
gaaaatttattaaatatgtacttatgtttcttttctgttccggttgctctctgtgactctcctttctttttttcttaacatatgttagtcccattcaatttctctctcagtcctccactaacacttcctctcaattccaacttaatcttctatctgctttcccattaacctttaatatacacacttgctacctcctctttatttcctatctggcccattcatctctcatttatttcctaatataatagatgtgagcgaggaaactcaattctctataaaacaaatacaaaaattaaggtctcagagattagaaaacagtataactcagttgcactacttgaaaacaaacatacttacctatcatttttttctcagatcttttttcaccttttcctaaaccaatattttaagaaaaaaaaagtcatgtactaatttttaattcttctttgytccatcaactgcaatttctctaaactgcccttgaaatcacctgtttgaaagatttaagtatatctggaatttatcattgtacctctagcacctactagagtgattgccacaaagtaggccctcgatgagtgatgaacagaactgaaataagtaagtttaatacttgataggaaagtaaatggttaa

SEQ ID NO: 751988 - DNA, 405 bp, Homo sapiens
tgctgctccagagtgaccactcagaaatgttgtctattattactgttgtgattctcctcacttggagactcaggagactggaagtctcagttctgacatagttgggctttgtgattttatgacaatagcttgacctgacaaggtctcakcatcctcatgtttaaattagtgggttttgagctaagtaataaagtttttcccagtgatgtcatattattcttctagtaataatagtgttttaaccctcccagagataatttgaatttttaaagcattattattttttaagaaagaataatcccatggtggaattgagacagcgtgacaaatgaagtaaaagtattcaggtatttaggggaagagtattttggttcaggggcccctgcataggcagactagctctgt

SEQ ID NO: 751989 - DNA, 599 bp, Homo sapiens
tcctgctatccaacccctcactcttctctctgattatcttttcccctaacacctaggctatctatagttacaggctcaaagactccagcagctgaggctacaatgagttgcttggttttgatccctaagtaaatggtgactcaaatctaacattcacctaaaataaaaatctaaatttaaaactctctttaatcattttgtttttctattattcctatctccttgtaacagattttgatgcacattgtctgaattaaatcytcacatactctccatacaacttggactcatgtgaagttagaagttcaagtaatgctccagatcatgcagaacagtgattttcaaaatggacttttttaggggctcctttcaggggttttgagtttctcatccccttctcaacactttagtcagagaagatctgatttactttatacgtttgacttcagtgtgcattttttatttgcagaaagaaaactgttatcataaattgtgaaatcaaccaagctaattcaaccctaccatctaaaaatgaataaaatcagaactgggaacatcaataattgacacttcaaaaacaagctggtagcagaaccaaa

SEQ ID NO: 751990 - DNA, 595 bp, Homo sapiens
gacccactagtaaattcaaaagagcaaaagcctgaccctctactggagaaggccttcagagtctccagtgttgtgctggggagcaggggaaagcagggagatcagcatcaacagaaaagaaactcagccagagatccagaagagggaaacaacactgtgtacatttccttcaaattaataatctggcaattaatttttgaactgattgtaatttgtatgtggcaccttctgtcaacgctatcaacaaaagttgctttcatttcacactggcttgttagctggaaggggcrgcgttggtccaggtttcactatgctaacatgggctgccatcaatttgatctctttggctggaaccattgggcaatgtcatgagcaaaagcaggtgaccatttataaatgtgatttatgtttaaagagataaggtacctcaccctacctccacccctataccttttatttatacacccaaagttccaaatcttggagaagagtctgtaaggaacataggcaggagagtggattggtgatggttctagaagttagggcatcttgagtttagtaattctatagtcttagccaactatgggattttgag

SEQ ID NO: 751991 - DNA, 629 bp, Homo sapiens
tgatttgagacttttcctattttgtaatatatgcttttggtgctatgcattttcctctcagtggtgctttggctgcatcccacaagtttttatatactgtagttccattttcattcacttcaatgcttttaaaaaaatttaccttgaggctgggtgtggtggctcatgcctatgatcccagcactttgggaggccgagacaggcagattgcttgagctctggagttcgagaccagtctgggcaacatgacaaaactctgtctctacaaaaatacaaaaattagctgggcatggtggtgcactcctgtactcccagctrctcaggaggctaagttagggggattgcttgagcccaggaggtggaggctgccatgagctgagattgtgccaaaacaaaaaacaaaacaaaacaaaacaaaaaaacacaaccatttaccttgagatatccttcttgacccatgtattatttgaagtgtgttgtttagtttccaaatgtttgaagattctcctattatctatttttatttctattttgatttcatcatagttggaaaacacactctgtgtgagtttaactcttttaaattatgttctaattaattctgttaactttgtcctatgggctagaat

SEQ ID NO: 751992 - DNA, 607 bp, Homo sapiens
tctcccacccctttcccactgccttcttctcctctggactatagaacatgtctgcacataggcatgtgttagcctattcaacttggcaactatcaactgtcttgtccccaagttttaggatgtgtttgtattcattcgttcgttggttcatgcattctatccatcaaccatacaatgagcaccttccaggaaccaggctctgtgccaggcaccaggtgtgatgcaggggccagacaggcacattcccagttcacgtgagctcactgcgggagacagacaattgaacatgtaattgcgacccagagggtaggggttgcaggacgatgtggggwtggagctgaaggcacatgcagacgttgggaggtgccatgtaagctgacacttgaagaccccacccatgaatcgccgagggtggcaagcaggagaagtgtcctaggcagaggacagggtctgggcacatagcctggggcaggagagaagatggagtgtctcagacactgaggcttagcctggtttgaatgtccagtggtggagggagggcagaggtgaagtcaagaagtgggagatggtgggtgggtggtgggggttgggggagcaactcacgaca

SEQ ID NO: 751993 - DNA, 512 bp, Homo sapiens
aaatgcaccaatcagcgctctgtgtctagctaaaggattgtacacgcaccaatcacagctctgtaaaatggactaaccagtgctctgtaaaatggacccatcagtgctccgtaaaatggaccaatcagcaggacgtgggtggggccaaataagggaataaaagctggccaccagagccagcagcagcaacctgctcaggtccccttccaggctgtagaagctttgttcttttgctcttcacaataaatcttgctgctgttcattctttgggtccacactacctttatgagctgtaacactcaccatgagggtctgtggcttcattcctgaagtcagtgagaccacgaacccaccaagargaacaaacaactctggacacgccaccgttaagagttgtaacactcactgcgaaggtccgtggcttcacttctgaggtcagtgagaccacgaacccaccagaaggaagaaactccggacacatctgaacatctgaaggaacaaacttcggacac

SEQ ID NO: 751994 - DNA, 529 bp, Homo sapiens
caatcgggacctgggccccttccagagcttcgcttccccagcccagggcctccccacttcgcaggctgcaacttcaagtttccaagaaattaaacaaaaacagggcatgaaccagtatctgaaaaagggaatgtgcattttttccatccttagccatccaaaaaaaactcaactttgaaaacaaaagtctccaacatttagctgaaaaaaaaaaaaagcagcaatatgccaagagtggcctctccctcctagtatgccaagcagagggcaggggagtctgggcaagaaactcccgccaatctccttcctccckgagcccttctttgcagactcattcttgctcctcccctgtaggagttttagaagatgtgttggaagcttgtcattgcaatgaagattgtctttgccaccgcaaaaatctgaatttgtatccctagatcaagggaggtatatgagcaaggacttggatatttttccttatttcttactttctgtcactgaaaatatttcccaaagaccaactgaaaga

SEQ ID NO: 751995 - DNA, 579 bp, Homo sapiens
ggtttgccagacaccaactcttgtcagagttattccatttgcctgtttggaaaaggcagccttcacccctgcattcctagctcctgggctgacggcctgcctgacatctgagggtagtggagtgaggttggcacttgccctgcgctgagagtggaggggagataatggtttaggtgggaaagtacagcccctccagcttcagggatcagctcacagcagggggaaaagtcctagaggaagactggggtggggcatgtctgctcactcacaaaagcagattcattattacagggcctttaaagaggratgtgtgtgggtagatgggatcctcaccgaggtgtgacctgctttttctagtgtttgcgaggatgtctcattaacctgcaggaaagtgctggtttcaattcgatggtttgttttctgttctgtttcctttctgttacaaacacaaagggtacattaaagagcctttccccatcatcttgttttttaaaaaatatttttttacttgttagagtttattttaattatggaaagaattcaaatccatagcaacacatagctaatgacaaacaattc

SEQ ID NO: 751996 - DNA, 422 bp, Homo sapiens
cttgcttacatgaggttgggaaggtgaaggtcagagggacagcaagccaaggttaccgccttacaggacggatcctgtggtctggctgctcacccatttgttctacgcgtttatcttttgcaaagggctgtgcagttcaccaagccctctccatacatcaaggcttcctgtggacattgctggccatggaaccatggggccgtgtttctattcccatttcccttcttccttccttcattaattcagcaaacaggcatggaccccttctcgcrtctgggccttggataggtgaagggcagggtgagggtgcagggcttccctgtgatgtaagaacttttgtggggccctgaggcctggggccagaagaccttgcccgatccaccctgagaaggcctcgcaggggagacctcagtgttgcattt

SEQ ID NO: 751997 - DNA, 471 bp, Homo sapiens
gatggaaggaggacaaagaaaactgagtcctcttgtctccattcttggtccactccattccatcctcaacactatcctcatagtgatttaaaaaaaaattccaaaggacaactctagacccgttgtgccctgcttattagcattccctccaagctcccagctgcttagagcaagactcaaaaaattttctgcaaagggccatatggtaaatattgtagacgtaatagtccaagagacaaagttgaggctactaggtaggtgcagcacttatataacaagagagaagacaaatttccacaaatttcttytgatgaaattcaagatataataataagcacatttttgggggcaatatagttctatatagttctactaacaagaaaaatagattcattttggggggaggataacctttcacttacttgaagttcaaagttagtgttccctatcatcaaatgggttgcaaatgat

SEQ ID NO: 751998 - DNA, 600 bp, Homo sapiens
cattctgggcataaatgacaaactacagactcagatataaaacttctttttgggcctagcgtggtggctcacacctataatcccaacactttgggaggccgaagcgggcggatcacttgaggtcgggagttcgagaccagcctggccaatatggcaaaaccctgtctctactraaaatacaaaaaatagctgggcatggtggcgcagacctgtaatcccagctactcaggaggctgaggaacaggaatcacttgaactcagtaggcggaggttgcagtgagccaagatcatgccactgcactccagcgtgagcgacagagcgagactccacctcaaaaaataaaataaaaataaataaaactgctttatgaactgtaattgcacagtgcagctagtaagggcgtcctgggtgctcctcgcagctcccctcacccctggccgggtccccgacctgcctctctacctggcagggagatactgcggccttctgaatcccagacctagaccagtgcccaccacatacaagtcacacagcacatagctgctcaattatatttaaaatgaaatgatcaagatcatatcaccctcctcaaaatgtac

SEQ ID NO: 751999 - DNA, 600 bp, Homo sapiens
cattctgggcataaatgacaaactacagactcagatataaaacttctttttgggcctagcgtggtggctcacacctataatcccaacactttgggaggccgaagcgggcggatcacttgaggtcgggagttcgagaccagcctggccaatatggcaaaaccctgtctctactaaaaatacaaaaaatagctgggcatggtggcgcagacctgtaatcccagctactcaggaggctgaggaacaggaatcacttgaactcagtaggcggaggttgcagtgagccaagatcatgccactgcactccagcstgagcgacagagcgagactccacctcaaaaaataaaataaaaataaataaaactgctttatgaactgtaattgcacagtgcagctagtaagggcgtcctgggtgctcctcgcagctcccctcacccctggccgggtccccgacctgcctctctacctggcagggagatactgcggccttctgaatcccagacctagaccagtgcccaccacatacaagtcacacagcacatagctgctcaattatatttaaaatgaaatgatcaagatcatatcaccctcctcaaaatgtac

SEQ ID NO: 752000 - DNA, 519 bp, Homo sapiens
aaaaatgataaattctggctgggtgcagtggcttgtgcctataatcccagcactttgcaaggctgaggcgggaggatcacctgaggtcaggagttcaagaccatcctggccaacgtggtgaaaccccgtctctactaacaatacaaaaatcagttgggcgtgatggcaggcgcctgtatacagtcccagctacttgggaggctgaagcyggagaatcacttgaacctgggaggtggaggctgcagtgagccgagattgtgccattgcactccagcctcggtgacagagcgagactgtctcaaaaaacaaacaaaacaaccaaaaagataaattccatgtgcaatcttgtagagttcattccttggtttcacagacatatttattatggaccctcagcatcttgccgggtgcctttggtgaagggattccagcagcaatgaacataatattccctctcccagtagtcttaccgtttttgaattctacaaagataaatgtttataggtctagcttagttta

SEQ ID NO: 752001 - DNA, 560 bp, Homo sapiens
caattcaaaactttccttagccatctgcactagcatagcaaatgagatcagcaggacttacagacttgattaaagcagcaagaagcacagtttcattcagggataggacaaaaagaacagaaaactggattcccagctccaggtgatctcagagcagccatatcctcaaagcagagctggcagtyttaaaacacggttccaggctgggcgtggtggctcaaacctgtaatcccagcactttgggaggcggagatgggtgaatcacaaggtcaagagatcgagaccatcctggctaacatggtgaaaccccatctctactaaaaatacaaaaaattagccaggcatggtggcggccgcccgtagtcccagctactcgggaggctggggcaggagaatggtgtgaacccgggaggcggagcttgcagtgagccgatatcgtgccactgcattccagcctgggcgacacagcgagactccgtctcaaaacaaacaaacaaacaaaacctcagctccaaaattatttgatactccttccattcagagatgggggtctatgtccc

SEQ ID NO: 752002 - DNA, 591 bp, Homo sapiens
aacggtaggaagctcgcggtcggcggtgaaaacacccggccgctggggcagcgccgcccaaggagggtggaagggcgctgctccgggatggagaccagaggggcggctctggggccgcctcgggcgggggaccccctgagccttcgcttgagcggcgccgtggatcggaagcagcgcgggcccgcagccacaatttcaccaaagtccaagaagcaggaggctgcgcgcgccgggggctgcagccttttccattagcccctgctccgggctggggaagcgggaatagcgagtctttcccgactcggaggacctggcayggtgtggcctgcgctccacggggctcccaggcatgtgcagttattgtggggtggggcgattaatagatctgctcttccctctccccctaccccagctcattccttctgctcactgcctgaagggaagcctatgccctagacgaaaagaaaaggcctgactggtctccaaaatccaagattttaggaactcggggaagacttctagctggaaaaaagttggggagaaaatcctgaaggaaggctgagtagcgttgggtttccgcagaggcaagaa

SEQ ID NO: 752003 - DNA, 645 bp, Homo sapiens
agcgcccttctgcacaaccgcgggatcccgttaggcacactcttgtataaccagctgttttcactcaacaatatgtcatggacatttttccatgccaattattcccaatctacatcaccatttaagcggccggcaaatactccattatacggatgtattctaaattaatcaaatccccattgataaacatttagtgttgcggtcaagggcacagactctggagcctcagagcgtggcatcattcctggctgtgcaactccccagctgggtgatggtcagcagaaacctagcatctctgagaagtttcctcatgtattaaatggaggtgcggttgtccctcggtatgcgtggggaattggttccaggagccccatacyaaaatccacagatgctcaagttccttatataaaatggtgtgatatttgtatataacctgcacacatcctcctgtacactttaaatctctctggattacttataataccccatacaatgccaacacttcatttcattcttgtggattcaatgtagtagtaattggcgcatggcaaattcgggttttgctttttggaacttggcggaatttttttttctggaatattttccatgcatggttggttgaatccacagatatggagggttggc

SEQ ID NO: 752004 - DNA, 593 bp, Homo sapiens
ggcgtgatctgttccaccttctgtaagtttctcagaagtgaggactctactctcagaaacagcgtcctccctgccacagccatcaatgtgcatgtggtcgacacacgcattcacacacactcacggctcattaaaatgcgttgtgaacttggcgtaatccccaggatgtttcttcattagctattttggatggcctctaccgcacacacatttcaagagccacgttcctttaattctcaaatcaatacactcttagcaattgcaagtggccagaaaggtcaccctcgaaccccttcggtcctagaagagtggcagaggagggataggaaaggacccgtgcaagatcacacagcgagaagatgaaagcagttcatcctcrgacctctctctgctccatcaaaagataaagagacatttgctaaatgtcattagtagttcctatatgtaagtggaagagcaaagacaaataagacacagttattatttttcaagagctcatagtctaagagtgagactcaaccttaaaaataggctacaacccaagacatcaaatttcaagtgggccagaaaaggcacaggggtggagcgggcag

SEQ ID NO: 752005 - DNA, 619 bp, Homo sapiens
gaaaccgagtataaattatacgggttcaagcatgctgatggtccggggtgcgcagcgcccggctccccggggccggggtacttcctttctcttggctgtcaaacaggaagcctttaaaagttggccagagagttatggaattacctgtggaaacatattgtgagggtcaggccaagggccgatttgtcaggcggccagtgtcggaatccacacatccacaagcagcatttgttttcttaacacttttttttttttttcccccttccaggatatgtagcggcagaggccaaagtctataaatttctgactctgcgccctactcattgtccgagtttccgcgtttttcatgamcgctctcggccgccgggaattctctttgatgggatttcaggtttcagcagcaagtcctgtttacttttctcgattctagacccaaaggaaaatgatactttgctaattccctcctcggaaagccctcgtctcctggttcttgttccttgggattaaaagttgtgacttcaactttttcttccttggctctaagatgggaaaactgagaaaacagcgatggtcaaaactgcgctgatgatcaaagaaagcagacagaaatgaaccccgg

SEQ ID NO: 752006 - DNA, 636 bp, Homo sapiens
cccatcagttacataaagaaactcagattatagtgattgccacccaagccagctctggtaaagtgagcaaaaaaacttcccttttcttgtttagcatcttttttttttcatggctcaaattggcacacacttagaaagtgtgctcacaggagaattttaatttattgatgcgtcttgcccctactgtacattcccagctcctagctgagtgtaatggatgaagcagatgtttgacacgcagcacctcttcataacttcactcttcaaaaacagttttacaagtacttactcgcatcggttcccattcagcacaggaaactgaggtcattgtgaaacatgaggctckagcagaagtctgaactcatgtgccctgcagctgggcctccatcttctgagcacgttagcaatttatgaaacagccataattttcagcttatggacaaagaaataaaagtgttgacaccattattgtaacatctgtgaagggaaaaatatgagccgatttctaagtgcacaaatggtaccagagttataaagattcttttatgcttaattgtattcattatcagcagtaattatttctaacgcgagcagtttcttccaatttaatgtcaacctaaaaggttaagaccttac

SEQ ID NO: 752007 - DNA, 633 bp, Homo sapiens
ggagaatgttcctgtgggccttggcagcaagtcagcattcttcgttggcatggagtcctaggaaaaagaggtacggggcaccttgaacacaccgggcaagcaaagaagaatgcacgcgtctcctctctccaggaagggctcctttcagagacacgctttgtagctcagctgtttgggggccgtggcaggcacctgggccctggtcacacagtggctgtggagcctgtccctgtcccttgggagcagcctgtgcctccagctcttcagccttccgctgctcccacttgctggctgtggctgtggctgggtggcatttgtttttgtcccagggctgctgctgccagccagcaggtctctgatgtcaccagccgcaggtctaggggtcaccctaaaaacatgcgcctcactgacccccttacagctcctctcctgagaaggtttctgggtgcatttatccatatggggagcctccccggcaggccacagrggagcaaggagagattccttcctggttacccacccaaccatgcttcatgctccagaccaagtaggttttctgggtcctagtaaagtcttccaattcccccaagctgtgaaagcccagaggcggctgtcatcttctgtgctgtggct

SEQ ID NO: 752008 - DNA, 682 bp, Homo sapiens
gcagagtcctttttaccctgtaatgtgacatatgcacaggttccagggattagaatgtgggtatttgtgaggcagctagccgccagcctgccacagctagtttcctctgaaccaagccaatctggactccaaagctagagcatgaactccaacagcttccatttttaggaagcaggacaagtgctaagacccagaatccatattcaaactcatgccatttaagaggcgctcgcagctgagctctcactaatgaggytgaggtgtgatggggagggtcgtctggaccaggtcagtggacagctcaatggggccatgaaagagagggcctagaggcattgacctgatgtgtcactgatgggcacttgtcagcgcaacatgtagctgatgagttgcaggagaagctcagccctcgcaggccggggatgacctgcatcctgcctctttctcaacagcatgcctgcttttcctcagctccagagtgacccatgccacctccctgggtctcagtttctcctggcagaggagaggcaagcacagctttcaaccccgccatagaggcatccggcggcaatgaggaggactgcttgccgggctgcgtgcagagcatcatacttaggatcaaattattgcccccaaagagtcgtttttcttcacccctggtggcatgcttcttggaagcggg

SEQ ID NO: 752009 - DNA, 682 bp, Homo sapiens
gcagagtcctttttaccctgtaatgtgacatatgcacaggttccagggattagaatgtgggtatttgtgaggcagctagccgccagcctgccacagctagtttcctctgaaccaagccaatctggactccaaagctagagcatgaactccaacagcttccatttttaggaagcaggacaagtgctaagacccagaatccatattcaaactcatgccatttaagaggcgctcgcagctgagctctcactaatgaggttgaggtgtgatggggagggtcgtctggaccaggtcagtggacagctcaatggggccatgaaagagakggcctagaggcattgacctgatgtgtcactgatgggcacttgtcagcgcaacatgtagctgatgagttgcaggagaagctcagccctcgcaggccggggatgacctgcatcctgcctctttctcaacagcatgcctgcttttcctcagctccagagtgacccatgccacctccctgggtctcagtttctcctggcagaggagaggcaagcacagctttcaaccccgccatagaggcatccggcggcaatgaggaggactgcttgccgggctgcgtgcagagcatcatacttaggatcaaattattgcccccaaagagtcgtttttcttcacccctggtggcatgcttcttggaagcggg

SEQ ID NO: 752010 - DNA, 608 bp, Homo sapiens
gcacttgtcagcgcaacatgtagctgatgagttgcaggagaagctcagccctcgcaggccggggatgacctgcatcctgcctctttctcaacagcatgcctgcttttcctcagctccagagtgacccatgccacctccctgggtctcagtttctcctggcagaggagaggcaagcacagctttcaaccccgccatagaggcatccggcggcaatgaggaggactgcttgccgggctgcgtgcagagcatcatacttaggatcaaattattgcccccaaagagtcgtttttcttcacccctggtggcatgcttcttggaagcggggagygaaggggttcctgcagtgactaacaaaatagattatggagacagccacttatcttatttgtcatctcgccaaagaaaggctgctctgatgttccaaaaaacaaactcatcatctttatcagatgagaagattcaggaaccacaacagaggctaagagtgtaaatcctttgtcttctcttctgtcgttaatactacggcaggcaaagagagcaaagagaaaccaacccttgagaaatttgaacctgggatgttggaattggaggcatcaatttccctacat

SEQ ID NO: 752011 - DNA, 541 bp, Homo sapiens
ggagaagctcagccctcgcaggccggggatgacctgcatcctgcctctttctcaacagcatgcctgcttttcctcagctccagagtgacccatgccacctccctgggtctcagtttctcctggcagaggagaggcaagcacagctttcaaccccgccatagaggcatccggcggcaatgaggaggactgcttgccgggctgcgtgcagagcatcatacttaggatcaaattattgcccccaaagagtcgtttttcttcacccctggtggcatgcttcttggaagcggggagcgaaggggttcctgcagtgactaacaaaatagattatggagacagccacttatcttatttgtcatctcgccaaagaaaggctgctctgatgttccaaaaaacaaactmatcatctttatcagatgagaagattcaggaaccacaacagaggctaagagtgtaaatcctttgtcttctcttctgtcgttaatactacggcaggcaaagagagcaaagagaaaccaacccttgagaaatttgaacctgggat

SEQ ID NO: 752012 - DNA, 553 bp, Homo sapiens
ctcaaaatatataatacaaaccaaaaagaaataaaagtaaagccacagagatccacaaatttaaatggggatgttaacacacccctttcagtggaaggtaggcaaagcagaaaaaagaaaatcagtaagtttatagaggatttgaaagtcacaatgaacagatctgacttatttaacatgtagaacactgtacccaacaattgctggatatatattctttgcaagagcacataaaacattttttaaagtagactatatgrtggattataaaataagtctcaacaaatttcagaggactggaatcatacataatataatctatgaccagagtagaattgagctagaaatcaataacagaaggttagtaagaaattattttgtaattatttggaaattaagaaaagaaatttttaataaaagcatggtaaaaaagaaattataatgaaaattagaaaatattttgaactaaataataatatatatataatatataccaaaatttgcaaataaagttagtgcctagacagaaatgtgtagccttacatgcacatgc

SEQ ID NO: 752013 - DNA, 545 bp, Homo sapiens
tgaacaagaaaactataggcttatatctctaattaacatagatacaaatatcccaaataaaatatcaacaaaccaaatccagtgataaagaaaaggtgggtgtatcacagctccacagtgttaattttaggttcaagtttggtataaatttgaaaattagtcagtataattgaccacattgatagtagaaaggaaaaaccctgaaagcattgtagcagaarcagaaaatgactttaataaaattcagcattcattcatgacaaaaatttagcaaattagcactaggaagaacctttcttaatttgacaaagcacgcacatacacaccagcaaagattacatttactgatgaaatactgaaacatgccccctgaaattgggaaagaagacaaaagtgtctgctagtatcactataatcacaacactgtactagacatgctaagtattgtaataagacaagaaaaataaaggtttaagtgttaaaagggaaaaactgaaacttattacttttagttgacgtgattatgtatgtggaaaatattacag

SEQ ID NO: 752014 - DNA, 545 bp, Homo sapiens
tgaacaagaaaactataggcttatatctctaattaacatagatacaaatatcccaaataaaatatcaacaaaccaaatccagtgataaagaaaaggtgggtgtatcacagctccacagtgttaattttaggttcaagtttggtataaatttgaaaattagtcagtataattgaccacattgatagtagaaaggaaaaaccctgaaagcattgtagcagaagcagaaaatgactttaataaaattcagcattcattcatgacaaaaatttagcaaattagcactaggaagaacctttcttaatttgacaaagcacrcacatacacaccagcaaagattacatttactgatgaaatactgaaacatgccccctgaaattgggaaagaagacaaaagtgtctgctagtatcactataatcacaacactgtactagacatgctaagtattgtaataagacaagaaaaataaaggtttaagtgttaaaagggaaaaactgaaacttattacttttagttgacgtgattatgtatgtggaaaatattacag

SEQ ID NO: 752015 - DNA, 545 bp, Homo sapiens
tgaacaagaaaactataggcttatatctctaattaacatagatacaaatatcccaaataaaatatcaacaaaccaaatccagtgataaagaaaaggtgggtgtatcacagctccacagtgttaattttaggttcaagtttggtataaatttgaaaattagtcagtataattgaccacattgatagtagaaaggaaaaaccctgaaagcattgtagcagaagcagaaaatgactttaataaaattcagcattcattcatgacaaaaatttagcaaattagcactaggaagaacctttcttaatttgacaaagcacgcacatacacaccagcaaagattacatttactgatgaaatactgaaacatgccccctgaaattgggaaagaagacaaaagtgtctgctagtatcmctataatcacaacactgtactagacatgctaagtattgtaataagacaagaaaaataaaggtttaagtgttaaaagggaaaaactgaaacttattacttttagttgacgtgattatgtatgtggaaaatattacag

SEQ ID NO: 752016 - DNA, 679 bp, Homo sapiens
aatagcactttcctatgaatgaaaaacaggattaagatcaaggaataaaggccatatttttagaagttggagataaattatttaaaaatatgtgagctgaatatggtgagctaaaatataaggaaaggtacccatctattctctgcttggaatatgtatgtgttttattaygcattatatacttggtaatatattataaaatattaattcaacatctacacttttagctactcagaatgtagtgaaaattagatacatctttgatataatctaaatttttttctgattcttcggtctagctacaatctttctaacaaagaaggttaggaatttaataaatagtcttgagacttatgagaaatgaatgaaataaaaaggagtttagattatgtaaaatgtccttgatcacatgctgatcgatcaagagttagggcagccctgcctgatgaaagacaaagcttttgaagccagaccttggtgtgagttctctgctcctaccacttacagctgtgtggcaagaacaaggcaagtatcctttccaatactggttttcctcatctgcaaaactggaataataattcataccttgcaggatgttttaggaattaaagataacatgtcaagtggccagcatgatgcctggaaccaaggtggatccttaaaaaataataaaggatag

SEQ ID NO: 752017 - DNA, 664 bp, Homo sapiens
gtgccaaaacaccctggctttgggtcacattttcaaaactttaagtgccatctctatcacttactaggtctatcactaggtacactagtaagttctttttttttttttttttttgagacaagagtcttgctctgtcrcccaggctgagtgcagtggcatgatcttggctcgctgcaagctctgcctcctgggttcacaccattctcctgccttagcctcccaagtagctgggactacaggtgcctgccaccatgcctgactaattttctgtatttttagtagagatgggatttcatcatgttagccaggatggtctcgatctcctgacctcgtgatcagcctgccatggcctcccaaagtgctgggattacaggtgtgatccaccacgcctggcctattaagttcttttaaaataaagatataatgcttatgtcaaggctaatctgagatgcaaatgacagaaccacagtagagcaagacctaatataaaggacatatttaatacataactttcttctctccgataggactgtaggggcttgaatggagttgcatagcaattgtatgttggcatgcttctctttgtttcccattagagtatcttccatttaataaactttactttgtccaagacgggacacacagaagatgctaaaaaattatt

SEQ ID NO: 752018 - DNA, 558 bp, Homo sapiens
aaaagcttgctgccttgataccacaagggaatggtctcagtcagtagataaaatgaagaattcccaagtgggcttaagagtagatgaaatactgctatcaatatttaatgggatgtgtcggattttaccaccatttgaaaggatgcaaataggggttaccatagaaatcaccttgacagaaaactgcacaaaatgcaacataaactatcccttaagcagccttgcagggattgctgtgatktccgactatagtcttctcatgtaattgttcgatagtgggaaaaaatgcctcgttcgtgtgtgtgtgtatgtgtgtgagtgtgcatgtatgcccaacataactaaagaattataagaacagtatggaaattctagaggcaggtatcttcatatttctttatatcataattactctttgataaagctataaatgccaaagttatttacagctttaacaaggtattcatcatagccatgctgctgaaagacaaagcaatctcagagatgttatatttaaatttaatattcttttttacattttagtggcaatattctttt

SEQ ID NO: 752019 - DNA, 544 bp, Homo sapiens
accattgctattgcttgcataatttccgtcgaggatgtactacactttaaccattctcttattgttcagcatttaaactaatttttgctgttaacgataattttactgtgaacatctttaggtttctaatggtttcttttggagaggtttctaggaccttactgaatgaaaagttatgggcttagttaaagctgctgaatcctatttctaaaatgcttctggaaaargtggtaagtcagcagtgttaatgccccctccactgaactcctgccaacactgagaattttttcaatcttcactaatcttacagattttttcaaaaaagttatactagacaatcttcatttctttgtttactaatggagtccaaacctctttcatatctttctcatttgaattttcctgggaaattgtttgtgcatatatttttccagatcatttattgagttttaatgttttccttctcaatttatatgaactctttacaaactaactacagtaaatctttttaggtcataattgtttcaaatacatttttgactca

SEQ ID NO: 752020 - DNA, 623 bp, Homo sapiens
ggtgccttccattaagcaaatgccaggaggtgttttcttctgaaaatgaagagagttagcaagtgatcagcaactaggaattttgtctctatccttcctgttgtgagagctctaactctgagccaggatccctgcctccagctcttaggagtttgagtgcatgtgtgtgtgtgcgcgcacgtgtgtgtgtgtgtgtgtgtgtgtgtgtgcatgcatagtcatgctttggagtgaagaggaaattcaactctgagtttccacttttcctgtggacaaagatctgttccttgtgtccccacatggcatggtggaaatggggcatgcgtcacagaaaggataacattttataggctacagtgcactagagcacrttaacttttatcccaacaacaaacctgcagaaaaagagtaggttagttacagatgttcttttgcttaccaactttcaacctatggatattcacagataaaatcccaagctctcctgtgagaacatactacatggtaacagcagatgatatggaatgtacactgctgccttttgaactcaaaaactgtgctgttcaccatcaatgcatttgctgtgtttgtgagagttttttttgagaagttttcccaagcat

SEQ ID NO: 752021 - DNA, 631 bp, Homo sapiens
ttaatattactatgagcatctacacaggttacttttcaagttgaaaagaaaactgagatgttgggaaacaagcccagtatactctaggcaagggcttcctatcaactgaaccacagaccagtaacatatctaaattttctactgtaatatagcaaaatcatgtaggcctattatacatgcataaaatgtgtataaaagatatatataaaatatgcacatatggwtataaaatatagggataatagttcagtaataacaacaacaaaaatcttttcagtcagtgcacattgaactggcctctgcggggactggctttctgtgccctggcagagttaggagatgtcaaacccagagccttgccagcatgcattgcatccttcagggtagtcctgtggcctttggttggtcttgggagcctagtacagagttttattatgagagctctagggactcaatgagaggaaaaccacctgttgatcttttatttttccccctgaaagtggatggctacatggaagctggtggtgctggtagctaaggtgatgattagagtccagcaggcagcggggagaaatggaatctctagattccatttgaatgccacctgggctaagtagataatgcagaagag

SEQ ID NO: 752022 - DNA, 606 bp, Homo sapiens
aacgactattaaagcaacacatgaattcagattgaatttttttttcttcaaggtttactccacaaatagtagattccccaggagaattactgtttcatgtgcaggccctgggcaagcagtaatcaattgtttcttaagaactttgttccttgaaaaagggaaggttaataccccatttctcactctgatgataattggcagaatgccatggctgagttgtgccaatattaagggaaagtgagagctaagaagcatgaatttattttgagggtgcttagctcctttaagggcaggccttggtgaaaatagtctttactccattttctttatttccccttttytgcaaaaaaaaaaaaaaaaaaaaaaaaaaagaatatttcgctatgattctttggtttagtaacctgtatagtttatctccctttttaaaagactgccatattgctttttttggtttgccttatataatggtaaaaagagtcatgcatttgttcaattatactgcaatatcatggaaccctttcatccttcccataacttggttatctatagccaaagttgaaacaccctgtaaattgcctttacaaaatgaatggcatatcaaag

SEQ ID NO: 752023 - DNA, 563 bp, Homo sapiens
acggtctcgatcttctgacctcgtgatccacccacctcggcctcccaaagtgctgggattacaggtgtgaaccactgcgcctggccagaaatctgaacttttaacaagacctcctagtgattccaatgctcatttaaatttgagaattcctgcttcaaagttttgttatgaaaagtcataataaacatagctaacacttgtcactacacaaaaattgttcwctagaaaacaaaagagtaccacacagattagatgacattttaatctaaatacaaactttgaaatagagtagccaaagttcaaaaaaaatatttaatttctcctttaaatgcatcttttcaatgacatctcatagagtaatatgagaattgttttctgagaattgttttatagctggttattattgtacagtcaggtttctcagtgctccagatgttgacttcacttttcctaacacttgcccacttgcctgtgcctgcaagataagcaggggttaaacatcagcatacttccaggttctgatgcttcatcaagccccagcccccagtaaacttgactgaaat

SEQ ID NO: 752024 - DNA, 596 bp, Homo sapiens
gcctccaacttcattcaagcatctgatgtcttcttttgaatactaacccattcacttaggttctgcattgcttagctggaatatctttcctgaaggagcatataattctttgaagcctgccaatttaaggaaacacccctgccaattatggtgtttttagatataccccgtaggttactgtggaaagtagttcatgacagtttgtatcatacatactgtatgtacatgtatttgcatgtaggtccgtgatattggctgtggcattgcaaagttgtcatcaaggaataattccagaaatgggaaataaaacccatagatgagaaaatctaatctaatttgcagttcagacaaaaatgttcacattatttctcaaatggtagttcctaaaatacagaagttatgctgtatttaaagtgaaagtagaagkttttcgatttaaaaaatgatgtggaactttgagtttctttcttttttgtcttattagattttgtaaaaataataccacttgtcagttttgcagctccttccatctagagagctgaaagcatttcacaatcttttttcctcatgcccttctcttcaaggcaatttttgct

SEQ ID NO: 752025 - DNA, 660 bp, Homo sapiens
cgtgggcttccttacagcaaagtggtccagggtagtcgtattccttacattatggctgccttcctccagagtgcaaacgcagaagtcccaggccttttttaggctagtcttggaactagcacagcatcacttctgccaggtcacaagggtggctcactttcaaggagagggactccatagatgtgagtcctaggaagtgtgactcattgggggctattgatgtaatcatctcccagtttggtttcctgattcttatggctgtcgctgccctgataccgaacttggcacccccgttgctcaaagtcttagggacctgccctactctttctagaactttcaaggactgaaactcttcttttcaggctttgtcctcttggtagctatcaaataccttgctctgtcttgctggcacaaccattgatttccccatgaagttttctggaggctgtcctaggcctttactatgctcctggcttgcaracagagtcctgaatgcattgaggtatacgggatggtgtgccaaggaggtggggaactgtgagacatatacatgaatcatcttaccccaaagttgattttacctgaaaataaagattttcaaaattctcatttcaatcattatatttttatatgaattaacgtggttatattatgaaataa

SEQ ID NO: 752026 - DNA, 641 bp, Homo sapiens
aatggaatcaacccgagtacaatggaatggaatggaatggaatggaatggaatgccttcaaaccgaatggaatggaaaggaatggaatcaacacgagtggaatggaatggaatggaatggaatggaatggaatggaatgatacggaatasgatggaatggaacgaaatggaatggaatggaatggactggaatggaatggaatggaatggaatcgttccgagtggaataggagggaatgtattcgagtggaatggaaaggaatggaatcaaccagagtggaatggaagggaatggaatggaatggaaactaatagaatggaatcaacccgagtggaatggaatggaaaggactggaatggaaaggaatggaatggaatggaatggaatggaatggaatcaacgcgagtgcaggagaatggaatggaatggaatggaatggaatggaatggaatcaacccgagtgcaggggaatgtaatggaacggaatgcaatggaaaggaatcatccggaatggaatggaatggaatggaatggaatcaacccgagtgcaatggaatggagtggaatggaatggaatggaatggaacaacccgaatggaatggaatataatggagagtaagggagttgaaaagaatcaat

SEQ ID NO: 752027 - DNA, 404 bp, Homo sapiens
gggttgattccattcctttgcattccattacattccattccagtgcattccattccattccattccatttcattacattccattccattacaatcggattgattctattcaactcccttactctccattacattccattccattcgggttgttccattccattccattccattccactccattccattgcgctccgkttgattccattccattccattccattccattccattccggatgattccagtgcagtgcattccgttccattacattcccctgcactcgcgttgattccattgcattccattccattccattcaattccattccattacaattcgttccattccattctattccgtaccattccattccattccataccattccattccattccattc

SEQ ID NO: 752028 - DNA, 630 bp, Homo sapiens
ttgcattccattccattccattccactccattccattgcactcgggttgatgccattccattccattccattccattccattccattccattccattccggatgatgaccattccattgcattccgttccattacattcccctgcactcaggtggattccattccattcgattccattccattccattccattccaattctttccattccattctattccgtaccattccattccattccatacaattccattccattccattccactccgttgcgttccgttccgttccgttccgttccattccattccattccattctattcggtttaataccattccattccattccattccattctattccattccattctattccattccattgcaatcgagttgaatccattgcattccattccattccattccattccattcmattccggaagataccattccattgcattccattccattccattccattccattccattccattccattccattccattgtactcgggttgatgtccattccattgcattccattccattccattccattccgttccattccattccattacattcggattgatgtcttttcaactcccttactctccatt

SEQ ID NO: 752029 - DNA, 630 bp, Homo sapiens
ttgcattccattccattccattccactccattccattgcactcgggttgatgccattccattccattccattccattccattccattccattccattccggatgatgaccattccattgcattccgttccattacattcccctgcactcaggtggattccattccattcgattccattccattccattccattccaattctttccattccattctattccgtaccattccattccattccatacaattccattccattccattccactccgttgcgttccgttccgttccgttccgttccattccattccattccattctattcggtttaataccattccattccattccattccattctattccattccattctattccattccattgcaatcgagttgaatccattgcattccattccattccattccattccattccattccggaagatwccattccattgcattccattccattccattccattccattccattccattccattccattccattgtactcgggttgatgtccattccattgcattccattccattccattccattccgttccattccattccattacattcggattgatgtcttttcaactcccttactctccatt

SEQ ID NO: 752030 - DNA, 511 bp, Homo sapiens
tcgggttaattccattccattccattccattctattccattccattgcaatcgagttgaatccattgcatttcattccattccattccattccattccattccggaagattccattccattgcattccattccattccattcccctgcactcgcgttgattccattccattccattccattccattccatcccattccgttccgttccgttgcgttccgttccattccattccattccattccattccattccgttccgttccattccattccattccattctattcggkttaattccattccattccattcgattgcaatcgagttgattccattccattccattccattccattccattccattccattcctttccattccattacggattattccattccattgattccattccattccattcccctgtactcgggttgattccattccattctttccaatccatgccattccactcgtgttgattccattctttccattccattcaa

SEQ ID NO: 752031 - DNA, 577 bp, Homo sapiens
tggaatggaatcaacgcgagtgcagggaaatgtaatggaacggaatgcaatggaatggaatcatccggaatggaatggaatggaatggaatggaatggaatcaacccgagtgcaatggaatggagtggaatggaatggaatggaatggaacaacccgaatggaatggaatgtaatggagagtaagggagttgaatagaatcaatccgaatgtaatggaatggaatgcaacagaatggaatggaatggaatggaatggaatggaatggaatggaatgcaatggaattgaatsaacccgagtacaatggaatggaatggaatggaatggaatggaatggaatgatacggaatagaatggaatggaacgaaatggaatggaatggaatggaatggaatggaatggaatggaatggaatggaatcgttccgagtggaataggagggaatgtattcgagtggaatggaaaggaatggtatcaaccagagtggaatggaagggaatggaatggaatggaaactaatagaatggaatcaacccgagtggaatggaatggaaaggactggaatggaatggaatca

SEQ ID NO: 752032 - DNA, 544 bp, Homo sapiens
ggaatggaatggaatggaatggaatgcaatggaattgaatgaacccgagtacaatggaatggaatggaatggaatggaatggaatggaatgatacggaatagaatggaatggaacgaaatggaatggaatggaatggaatggaatggaatggaatggaatggaatggaatcgttccgagtggaataggagggaatgtattcgagtggaatggaaaggaatggwatcaaccagagtggaatggaagggaatggaatggaatggaaactaatagaatggaatcaacccgagtggaatggaatggaaaggactggaatggaatggaatcaactcgattgtaatggaatggaatggaatggaatggaatggaatggaatggaattaacccgaatacaatggaatggaatggaacggaacggaatggagtggaatggactggaatcaacccgagtgcaggggaatggaatggaatggaatgcaatggaatggaatcatccggaatggaatggaatggaatggaatgcaaagcaatggaatcaactcgat

SEQ ID NO: 752033 - DNA, 491 bp, Homo sapiens
agaaaacgaaaagagaggaagatcagtgcacctgctagaagacaggtgttaggtaagcaaggaccaagtttcagatgccaggtgagttatttagagcccaatgaacaaaactggtctatagcccctgaagcacacatcctcagattttgataaagcacattaaacacaggttctacatatgcaagttatatgtataatccaggaatttgtaaagaaggagttcaaggatagaagtmtgatgaaatgggataaggatgggatctgatcctgctcataggaccatgaaagtggtgtaggggaggtgggagctggtagagatgaggagaaacagcaaaaggagatgcagaacccgagtcttagtggaaaccaaacactgaaatccgaactcaggcttgcagacactgaaaactcaggcaaacagaagtagagcagcaacagatcctagacagatctgactggaggccaggtaaaagaatgcagacaataaaagg

SEQ ID NO: 752034 - DNA, 611 bp, Homo sapiens
gactgctgaatattcattgtctggtttcactaaaacagcatgcaggtacacagtgttcctttcctaaggtagctgggttgcacctataccttttggaaatggaaaatctgaagaatgctacaacccggaaagcattttttttttttttcagaatgaaactaacaagggtagtaaatatctatgagtacagtaacaaaactatgtatttccatgggcacaatacattttgtaaattctaatttgtattctttgtcttggggttagggaggaatgattaagataaagaaatagatcagtaatctctctacttcactaagatgagggaagggaaaagtgtaatgtacaggtcaaaataatgctgaaatgcagaatgcttttcaraagtatgccattagaccttcaaatgtgctgtaggtgctaatagtacttgtctatcaagaaaatattgagtcattgtcttttgaaggttttaaactgttttatgtcccacacacatccctaccaggcgtagtaagagtagtccattaatgttttcattgattagaggttgaagtaatagaatattgtgcaagtgttttactgcattaacttttattttaattcctcttcta

SEQ ID NO: 752035 - DNA, 544 bp, Homo sapiens
attagattcagaggatagcaggcaagaccatgttagtaggatgatgctggggaggagagccaaaccttcgttttcttcagcaagaaatcatagataatgtctactattgaaaatgtaataaatagcagaattagtatgttgtttaggytcgtggaaataaatgcctaaaagaacagtaaggctgggcacggtggcttgctcctataatcccagtattttgggaggctgaggcaggcagaccgcttgagcccaggagtttgaggccagcctggaaaacatgctgaaacctcatctctacaaaaagtctaaaaaattaaccaggtgtggtggtgcacacctgtagtcccagctactcagtaggtgaggtgggagggtcacctgagcctgggaggtcgaagctacagtgagtcatgtttgcaccactgcactgcagcctgagtgactgagtgagaccctgtctcaaaaaaaaaaaaaaaaagttcatttattctttgattcactcactgaacaaatatttactgagtttctaccacatgccagggcc

SEQ ID NO: 752036 - DNA, 499 bp, Homo sapiens
gcacagcctccagcatataggataaacttaataatgtccagtttggccaaattgaacctctttaatgctattagactctcaatttttgacaatctcatcaataaaggttgtacttagaaattttcgatattcacaaagaaagagtgtctcaagtcaataaattctagttcaggctacacgtcatcacgatcggattatctattgtgcaattaagtcaactctgaaaaatttaggcacactttattgatgtaataaattcatttcatgttcctatttataatatgttcttgtttgtttaaagtatgcttaaaactttttytaatgttagttttgactactgattgaaatttaactacctaaggacagggccatatatttcctttatggccagttgcttaaagcaagcaaaaaacaaagcaaaataacaccctaagtggaattatcctgttcctctttcccacgttccaaccaactggcattgcccacctctcctctctgc

SEQ ID NO: 752037 - DNA, 496 bp, Homo sapiens
tgagcattagggtaactcattttaaatgtgcttgatttattagcgcgggggtctccatttccagcaggtcaatgctttactgaaacacacaaagtcattgtcaaggtcagcctctttatgaattttttaaacaaaatgccttgaycacatatcaggtccttcatagaaaggaaaaacagaaaggaatagcttttgcaaaaagatttcttttaaaaggccaaaggcaatgttggtcaagcttcaattatgattcctagtaagacaagaaccttaatgttcactgtttgccttcggggatgtttattacacacaactattttgcagaagcagcgtcaaatgtacagtataaaactaccattaggcagaaaaatcaatcaaaatgccattaaagtggaataagttgccaatattgctgatgtggttgcaggtcctttgattttctttcagattattaggcacagtctagtagtgactttgttaagggaaatgagtgttg

SEQ ID NO: 752038 - DNA, 655 bp, Homo sapiens
tcataaaacagtaaaaacagaattatctctaaaagtcacatcatggtgcagaaaatacaggtgctacaggattatgcatttataacacagcagatttcacaatgacaaaaaaaaaaaaaaaaaaaccaaaaccacagaaagaaaataaaaatgcttattaggccttagtccatggtggatttctggattggcctattggctttgctaatttatcacaacaggtaaaacaactcacagcatagatacttcactctgagtgtgaggtcaaactgattccctcctccacccccaatcttcttttgtttgaagtctgaatagaaggggtgatttactggaatsattttttgaacttgtggtttgttttggtacgcatagagaatggatactgacagtcaccagacttatacaggctgtcactgaatgtggacattcactatgtatatatagcctttgctgccacctccctctagttagtgtttgcctcctagaagccacagctgctgaaaggagtatctagttaaggaataaacaggttttaggtggagccagcagctgattcttggcctgaggttgagttgaactctacacagagaacacagacatacaatgtagaaggggactccagtgagccttgatgccaactctcaagctccct

SEQ ID NO: 752039 - DNA, 636 bp, Homo sapiens
tcagcacatgcggggttatggttcccacagcagtcaggaagcccttcctcatcacatctccaacaagaagcccttcctcatcacatctcctcatcacatctccacgaatgaatgaactgattattttggcaactctgtaattcgacttcattgcattgtaaactcagatcaattttagttaataatcagatcaagccatttcaggacagttgtgtcaggcttaatatttttaacaagatagggtaccaggttgaatctgatgcaaattaatttgaaattttcaaattcagttaacaaaagagtctggattatctttataccacgaattctatcatgctaaatgggtccattgcaaagttattcctgaggactgtaacttctgttctgctgaacttttattattttgagttaaaagaggtaatttttttttcctctctaattccycctttcataatttacgcaacacatttgcaatataaagagctattgagggcactgcattgaggacaatgttacagcacacaccaccagttttctttcagatgttctcatccacccattgaggttggaagtttggagagtgcatctgaaagagcctaccgatatgcctcaacttggtatccctgtcttttagta

SEQ ID NO: 752040 - DNA, 543 bp, Homo sapiens
ttgcatgaatcctctttccactttgaatctaagctttgaatattagttaaatatgtgtaacacactattctagctcctgtggtgactgctagttgtgtacgatagagttcgtatctttgaggatctcaacagtttacaaggaaatgaaaggtgctctggggatcacttaaaawttttttttttgaatgggagactccaccctttgaaagggaagtcatgtggtgactcctcttaaccgactcagacagatatccactgaatctttttgctgaagaattaagagtataaaaacatgtctgagtcccaaaccgtgattatagtcagattaattttcctaaaacagctttaatcatgttactctctttaaaaaaatcagtagtttcccagtgctcatgaaagtaagtggtttggtctttgatgaggtatttgctcctcagtacagccctaaaaagcccttacagcctcacctctgactgttttcctagtcatatcccaagttccagcctactgttcttttaatgggatccccttttatattgatac

SEQ ID NO: 752041 - DNA, 576 bp, Homo sapiens
ctatctctttctctgcatatatgtgtgtgtgagtgtgtttttcaatatttatttatttatttgacagagtcttgctctgtcgcccaggctggagagcagtggcactatctcagctcactgaaacctctgcctcccgagttcaagcgattatcatgcctcagcctctcgagtagctgggattacaggcacctgccactgtgcccttctaagttttgtattttttgtacagccagggtttcaccatgctggccaggctggtctgaaactcctggccttaagtgatctgcctgcctcagcctccccaggtgctgggattataggcatgagccactgcgcccagcctctttttttcagtttatgcattaaaggtctttatttgcagtttattttaatatagaggagtggtgagagtcatatcctttttctcagytaatttttacagcactcctgattcaatgttccctcctttttcactgctttgaagttttactttttaatcacatgtaaaataattatgtctatttttcattgttctagaatatgttttctatgtcatttaaaactacattcttacga

SEQ ID NO: 752042 - DNA, 450 bp, Homo sapiens
cctgaggatttctgatcacagagtcttggttttaatctaggtgtaccacttactggctgttaacagtgtgtcttagttaattcctgagtttgtatcttatttttcagcataatttttaggaaaagcactttgtaaactatgaagtgctatagaatattggttatgatgagggcctyggacttactggtataatccagaccttctccatgggtttattttccttgtttagttgctgtgtttttgatttcttcttttttcacagtatgacttaccctccatcccatgccctcctccagagttctctactccctctcagatggcagctcttcaaatctttgtttatgtactgatgggacaaggctcaagcacccacttcttctctttcagctgttacatttgaacagctttctagatcatatttctctaggacttctatgtttaatagtgggc

SEQ ID NO: 752043 - DNA, 569 bp, Homo sapiens
gtatggattgatggcagtccaagtaaggtacagtgcagtaccagagtaagactgcaaatgctacctcatatttctcagtaatacagtggacaaaattgtaatttttattctgtttctattgcagtgtcttaagaaattgtgtataagcatgattgtgaaaaaataaccaacagaatcagaatcaaaatttcctttggaggtagatatacaaagtgtgagtggtaggtagaccttcaaactctggaccaaactaacagtttatrgagaacatgttatttcagcaactcaagctatatttgcatagctttgagaggctatcttcgacattcaaaatttataccattttgagaaactcgtgctttctctaatgaaaatgtgttttgctcaatttgagatatttttgagtacaactatgtgctaagcattgtgccagtcaccggaaacaccaggtgaatcagtctctattctgaatgatctcatatatttgtgatcacaggtggaatggtaggttatgtctatctattgttgaaggataatgggaggagatatggatttaccatgacaaaaat

SEQ ID NO: 752044 - DNA, 557 bp, Homo sapiens
caatgcttcagacttgatgactttgaaatctgttgttcttcatggtgcactggcgcttggctgtctcgcttaatcattgtggcattaatgatgccactagtggcttgaggctttaactgggtactcagacccagctagacgaaaaagggaaatctattaagccttacaataatgctaatgcwgagcaaacagagactgagtgcccagcaaatcacaaatttgttgagattaaaaaagcatgagtaggttttatacattgagacatgattgaaagaatctgactttgaaatccacatagaaattgagtggtaatcaagtttgacataaaatatattaagtgcataacaaatcacatcgttttatataaatcttctgttcattaaatatctttgattttttcttgtcttaaaccagccttctctgagaggagggctcagaaaagacatctctaacatgtactcgtccaacattgaacaaaactctggccactttcttgagggaagttttgaaacctatcatgagaggagtggaatgagaaggcattggaaatgccattg

SEQ ID NO: 752045 - DNA, 632 bp, Homo sapiens
aaatgtcacctctcccatgaagctgtgtcagattccccacctgggaagaaatggttcactctgagtttccacaactctcccatgaagctgtgtcagattcccccacctgggaaggaatggtttactctgagtttccacaactcttttagattttaattttgttgttgttttaaatctttargtcccttagcccttttgccctcatattatgttgattctcatacccattatctccataaagacatgacctttgattgagcttgtaactccccgcctctcatgacgccttgcacaaagcaggtgctcaatatatatcaaatgaatgaatacgactttattaggcaaagctacagaatttcacgtgtaagttaggttcaaaatttattgactttttcaaaatttgcagaaccgtaagtgtttcttttatggaatagatttctgtctactgaaaaaagaagtacagcttaaaacacttaaaattcttaaactcttttagttcagtgaagagggagaaaaaaaacaatatttttgctaggatttgaaaactagcacccacatgaaacagatgccaatctaaactttaaggatcttttttttttttttttaactaggaatcttacttgtacattctt

SEQ ID NO: 752046 - DNA, 632 bp, Homo sapiens
aaatgtcacctctcccatgaagctgtgtcagattccccacctgggaagaaatggttcactctgagtttccacaactctcccatgaagctgtgtcagattcccccacctgggaaggaatggtttactctgagtttccacaactcttttagattttaattttgttgttgttttaaatctttaagtcccttagcccttttgccctcatattatgttgattctcatacccattatctccataaagacatgacctttgattgagcttgtaactccccgcctctcatgacgccttgcacaaagcaggtgctcaatatatatcaaatgaatgaataygactttattaggcaaagctacagaatttcacgtgtaagttaggttcaaaatttattgactttttcaaaatttgcagaaccgtaagtgtttcttttatggaatagatttctgtctactgaaaaaagaagtacagcttaaaacacttaaaattcttaaactcttttagttcagtgaagagggagaaaaaaaacaatatttttgctaggatttgaaaactagcacccacatgaaacagatgccaatctaaactttaaggatcttttttttttttttttaactaggaatcttacttgtacattctt

SEQ ID NO: 752047 - DNA, 618 bp, Homo sapiens
tttcattgtgtacatatatggttcattttctttatccattcatttgctgacggaacttagactgattccctatcttggctatcacgaatggcgttgcaatcaacatgggagtgcagctatctcgtcgatatactttttttttcttttagatatatactcagcagctggattgctggatcagagggtaggttctatttttagtttttgaggaacctgcatactgttctccacagtggttcccaacaacactgtatgagagctcccttttctccaaaatacttttagactttagaacagtaataaggtacctgcaccctacattagtgaacacctccattaacctttgagcattcccttactttctggcacarcaagatgttccaggttcatcttgttctttcctcgtccaagctctaaaattggatatttgttccaaagtgtcgattccctaaagtggagaatggagtttggaaagcaagatttgggcactaaatgtatacattgctatttagagtgtcattgtttctaagctagaaaacgtgtgtgtatatacgtatgcatgcacatacatacccctgggcacataaacatattttatctacgaattaaaaatcatta

SEQ ID NO: 752048 - DNA, 690 bp, Homo sapiens
gcatcagacaaaggtctaatatccagcaactacaaggaacttaaatttacaagaaaaaaacaaccccattaagaagtgggcaaaggacacaaacagacacttctcaaaagaagacatacacattgccaacaagcacatgaaaaaaagctcaacatcactgatcattagagaaatgcaaatcaaagccacagtaagataccatctcacaccagtcrgaatggctactaagaagtcaaaaaataacacacgctgatgaggttgtggagaaaagggaatgcttatacacagtgggagtgcaaattagttcaaccattgggaaggcagtgtggtgattcctcaacaagctaaaaaaaggactgcaattcaaccctataatctcattacagggtatacacccaaaggaatataaatcattctatcataaagacacatgaatacaaatgttcactgcagcactatctgcaatggtaaagacatggaatcaacttaaatgcccatcaatggaaaactggataaagaaaatgtggcacatatacaccatggaatactatgcagccataaaaaagagtgagatcatgtcctctgcatgaacatggttggagctcgaggccatgatccttaggaaacaatgcaggaacagaaaaccaaatactgcttgttctcacttataagtaggagctaaatgatgag

SEQ ID NO: 752049 - DNA, 487 bp, Homo sapiens
gtgtttgctacttcttgctcactggatccagtcagcataatgtcatcaatgtaatggaccaatgtgatatcttgtggaagcaaaaagtgatcaacgtctctctgaatgagattatgacacaaagccagagagttggcatacccctgaggtaggacagtaaaggtatattgctggccttgccagctgagggcaaattgcttctggtggacaggaatggagaaaaaggcatttgccaagtcaatggctgcataccaggtaccacgagatgtgttaatttgctcaagcaatgaaaccacatccagcacagcagctgcaattggagtccccacttggttaaccttacgataattcactgtcattctccaagatccgtctttcttctgcacaggccaaatggaagagttgaatgggyatgtggtgggaatcaccacccctgcatgtttcaagtccttgatggtggcactaatctccacaatccctccaggga

SEQ ID NO: 752050 - DNA, 603 bp, Homo sapiens
cgacacttgcttggaaaactattcacatgctggaaagcagaggactgtgaacagaaaatctagctaaactcagaacaagtgactggggctgggaagattatagtgtgagaggtcgtttgctccctccactccttctcagatgcgagggtttgcctgccttctgctgggatgccccagctgttaagaggctcatacttccagtaagatttccacaggaggccgggtgcggtggctcacgcctgtaatcccaaagtgaaggccgaggcgggcggatcatgaggtcaggagatcgagaccatcgtggctaacacggtgaaaccacgtctctgctaaaaatacaaaaaattagccgggtgtggtagcgggcacctgtagtcccagctactcaggaggctgaggcaggagaatggcgtgaacccrggaggcagagcttgcagtgagccgacatcgcaccactgcactccagcctgggcaaaggagcgagactccatctcaaaaaaaaaaaaaaaaaaaaaatttcctcaggaacacaatagtctgggtttctgctcccttcctcaaataatctcattaagagaacctttccaatgtgggccacatggt

SEQ ID NO: 752051 - DNA, 619 bp, Homo sapiens
gggaaaggtaagctaaatcagtaagaaataaagatctgagcactgtgggtggtttagagatagaacacctatagattggtatgtgggggcagggccaatgatgtccccttgaaatcctgcattggatagctgttgattgatctttgtaactcagtctccacttctaatgagcacatcaatagggtatacattgactttctaatgcattggttttattaaaaagggagctatttccagtttaataagtggagagcttctgtaacaattgctacatttcaattctaagcaatacttataaaggtcttttagaagtgctttctcaaaaccattatgtttttagttaattttttatgtgctataaattttaaaaatgtgtrtattgaagatacactttagtgaaaagggctcttgaatagaaattaagagctcagtgctttagttttctttctgcttattaatgcattctttcagtttgggcaaatcacttactctgtgtgaacctaagttcatcatatttaaagagggcatgctaaacatatgcatattctttcttttccatccaaatcattttgaaaggatggaaactatatctgtgtcttttcatatccatataatatgg

SEQ ID NO: 752052 - DNA, 620 bp, Homo sapiens
catctcatactggaagacacactcgggatcccccactctctgtctgcaggagagagagctattctctctctctcttttttttttttttttttgtttttgcttattaaacctccgcccttaaactcacttcttgtgtgtccgtatcctcgattcttttggcgtgagatgatgaacctcgggtattcaccccagacgaggatgctgctwcagtacaaaatattcctatataccctaccttccagtttccactattattaaaagcttacattagtattatacatttattacaattaatgaaccaaggctgatgcgtcattagtaagtaaagtcagtactttaagatttccttagtttatacctaatatccttttcctgttgctggattccatccaggttaccatattgcatttagttttcatttctttttagttgcccttggctgtttcaagtttttcaggttccttattttcaatggtttgaggggtgtgagaagtacagttgaagtattttgtggaacatacctcagttgggtcttgtctcttacactggaattatgtgttttggggaagaagatcacagaggtaaagtgctattttcatcccattattttgggggtacat

SEQ ID NO: 752053 - DNA, 643 bp, Homo sapiens
gtcttccctctggtggtcgtattttgctttaaattactggattcttttcattgggtaatttgcaatataaatctgtctgtttagaaaatttttcatatgcctgttttaattcttggctgtgactttaacaagtgtggaaaatttcaagtttaktattcttcttccccattttatttattcactcacatttttccatttaaaaataggaaaaaaaacttataaataagtccaaataggtaaacaaacaaaatttggttgaggtggcatttttgtcagatggccaattactataatacttattctactctggctaccagaatattcttttcagatatcagttgtgcccactctgtacaaagtctaatctttcgttgcctgtaaggcccattacactgtgttccagccacactggctttctttctgtcctgaaatgtagcaggcatattcccacctctgggtctttgcacttgttatttccactggtaactctctttcaccccaaaatcatcttggtttcattcctacacattcatcaagtctcattaccaatgccaccgtttctttgaagactttcttgacttccctacttaaaattttgttcctaccccagcactctttattctcttccttaatttttctccac

SEQ ID NO: 752054 - DNA, 684 bp, Homo sapiens
ctctgagactgacctgggactctggagcttggcaggggtaggggcgtctgccattgctgaggcttgaataggcagttctatgctcatagtgtaaatagagctgcagggaggctcaaactgggcggagcccaccacagctcagcaaggcctactgcctctctatattccacctctgagggcagggcatatctgaacaaaaggcagcagacagcttctacagacttaaaagtccctgcctgacagctctgaagagagcagtggttctccaagcatggtgtctgagctccgataatagacagactgcctccttaagtgggtctctgacmcccatgcagcatgattgggagatgcctccaagtaggggccgagagacacttcatacaggtgggtgcccctctgggacgaagcttccagaggaaggatcagaccacaatatttgctgttctgcagcctccgctggtgatacccaggcaaacagtgtctggagtggacctccagcaaactccaacacacctgcagctgagggacctgtctgttagaaggaaaactaacaaacagaaaggaatagcatcaatatcaacaaaaaggacatccacaccaaaatcccatctgtaggtgaccaacatcaaataccaaaggtagataaaaccacaaagatagggagaaaccagagcagaaaggctg

SEQ ID NO: 752055 - DNA, 684 bp, Homo sapiens
ctctgagactgacctgggactctggagcttggcaggggtaggggcgtctgccattgctgaggcttgaataggcagttctatgctcatagtgtaaatagagctgcagggaggctcaaactgggcggagcccaccacagctcagcaaggcctactgcctctctatattccacctctgagggcagggcatatctgaacaaaaggcagcagacagcttctacagacttaaaagtccctgcctgacagctctgaagagagcagtggttctccaagcatggtgtctgagctccgataatagacagactgcctccttaagtgggtctctgacccccatgcagcatgattgggagatgcctccaagtaggggccgasagacacttcatacaggtgggtgcccctctgggacgaagcttccagaggaaggatcagaccacaatatttgctgttctgcagcctccgctggtgatacccaggcaaacagtgtctggagtggacctccagcaaactccaacacacctgcagctgagggacctgtctgttagaaggaaaactaacaaacagaaaggaatagcatcaatatcaacaaaaaggacatccacaccaaaatcccatctgtaggtgaccaacatcaaataccaaaggtagataaaaccacaaagatagggagaaaccagagcagaaaggctg

SEQ ID NO: 752056 - DNA, 598 bp, Homo sapiens
ttatatatgctcatagagagatggtttgaaattggaacttatgtttaaaatggaagcagggcctaaaggtttggaaaatgtgcagcctgaccatgtggtaaaaaagaaaaacccattttctggggataaatcaaaggctgctacagaaatttgcataaatcatgagctgaatgttaatcaccaagacagtggggaaaatgtcaccagtgcattccaaagatctacagagcagcctctcccatcacaggcctggaggcctagaagggaaaaatggttttgtgggtcaggccaagggccttgctgctctgtgcagccttgggacttggcaccctgcatcccagctgctccagctacagccatgcctaaaaggggccaagatacagcttgggccattgctttagagggtacaraccccaagctttggcagcgtccatgtgatgctgggcctgcaggtgcacagaagacaagagttaagctttgggaacctctgcctagattttagaggatgtataaaaatgcctggatgtccaggcaggggcagagccctcatggagaacctctgctagggcagtgtggaagggaaacatggggcggaatc

SEQ ID NO: 752057 - DNA, 539 bp, Homo sapiens
tagtatggtaatatgatatgtatgatagtatgataatataatatgtatgatagtgtgattaatatgtatgatttttgatagtatgatagcatactactatcaaaaataatcaaatcacaagagaagacagcaagagaggaaaaaaggaaatgcaaaacactcaggaaaaatataaccaaatggtaatagttaagtccctatctatcaataattgccttatgtaaatggataaaattttccagtgaaaagacatggtagttaatggattgaaaaaaaaaaaacaagatctaaatagatgctgctcttaagagagkgctatagctttaaggacacacataggctgaaagtgaagggatggaaaaagagaatctataaagtggcacccaaaagtgagcagaggtgactgtatttaaattagccaaataaattttaagtgaaaagttgtcacgagagacaaaacaagtcattgtgtggtgttgaaggggtcaaactaacaagaggatatagcaattgtaaagatatatgcacccaacattgga

SEQ ID NO: 752058 - DNA, 543 bp, Homo sapiens
aacattttttaggaagtggcatgttttgattaccaataaacattatgaggtactaaactcttctcagtttttgtttaagctgtattaaaatgcctatttaaaagagattattatagttcaatgaagctctttaaatacttcatagaataatcatgtgtcaaaaaagattagttagttatgtgtttgtcacttgcctagctggttttcctacataatctacagctgttttcctgaattagcagttgctatcactaagttataatctttcttcttctcctttacctgtctcctgccccatacagtcaaaccacaagttaacagcacattcatcttttaagagcaatytaaaaagtcacttctaccttgcccaaccatcaccagtgttgtatctgcactaagctggaaatagctctattctccaaattctatggtattctatgagaacatttcactaaggctttatctgtttcagtggagccatgtcacacattatttactaggtgtgagctgctaagaggagagaatatttctcactcatctttg

SEQ ID NO: 752059 - DNA, 622 bp, Homo sapiens
tttgggttatgcagtggctaatttatatttattaatcaattatattgctgatcccaatgtggaatattttcaaaatacatataaaatataaatacacaaataaacataatctattattccactacctacagtcgttcactactaacgtgttggtgtatttcctttgaaactttacatatatgatwttatacatagttgataagaacgtttgtgtattttatccatttatttttaaatctctcttaaaagcctgatatcataattcactttctacaaaacaaaaacaaagttagattagttttatgtgatatttttagtggtctatagttaagctgaaggagacatttctaagtagttcatacacttcaatgagtaattgaaaattccttattccaatttactttattaaagtctagtggttgacacatatttgtatcacattcatgcattcatagttattaaataataggattggtatttgctgctggtcactttgggtaaaataattctaatgtctttctaacagcatttaatctgttaggatttttggagttttttgtctgaagttaggtcataaaaacttgtgttccagtgagtaaagtacctaaattatgcataatta

SEQ ID NO: 752060 - DNA, 505 bp, Homo sapiens
ccctcagggagatggaggcgaggtggggggcttgggacacagaacagtgagttattagcttctttccagcctgcacctcgggcacctctggcaaaaagacctgccagttcctttcggcccctggagcctctctcctctgcttagaaaacaaatcsctgcctaagctggggctttttgttggctccaaaaggagagagccacacgggttctttctagggaggaagaaacagccccagggagaggactgagtggttgggtttcagagcacactgtgtgtgcctgggttgtgaagttggcaaatgatgaatctatttttttttccactttgatgaaacccaaggcctcacaaggagttttcaccattgtcctttgctaaatgcatttccccagcaccctttcttccattttctcgcttctctagggagttggggaagtcatagagagagggggttaggcaggcaggctcagcaccaggctgatgtgggttcagatcctgctcagctgt

SEQ ID NO: 752061 - DNA, 567 bp, Homo sapiens
ttccagagaaacaactggtagaatatacagtcagctggatatacagataggatatcaggatatatatctgataggatatacaaccctctgtatccatggattctgtatctgtggattcaaccaactgtgaaccaaaaatattctagaaaaaaatgcaaaataatacaaaaacttcccaatacagtgtattagctatcatgagtaaactagagatgatttaatgtgtacaggaggatgtgcataggttataagcaaatactattccattttatatcagggacttgagcattaatacattttgatatcaaagacggtcctagaagcaagggatggatacctccgtggattctaagmgatgactgtttatataaagagatttattatgaagaattggctcatgtgagtatagaggccgagaaatcctgagatcagcactttaagtttgtgactcaggagagttgatggtgtaagttccagtccaagggcaggagaagcccagtgttccagctcaagaagtcagactggtgaagtttcctcttactcagccttttggtctatttaggtctc

SEQ ID NO: 752062 - DNA, 679 bp, Homo sapiens
acaagtggatctataaaacaatgagttaaatgaatgtgggaaggcagaactaggttaatggtgagaaagagagagagaatgaatgaccctcaactacttgtataattttctctagaccctgagaaactgagactcttaggactctgaagagcctagctttagtcttccagagtcagtaggtcygaggagagaccacgtcgtcaaacaccatcaccccctagctcaccccactgtaccacttgttgtatccatagatctacaggtaaggccttcgggaaggaatggtcagagctgcctcttgtcttggcctttgctgacccaggtgctgaagaattaaacagtgccacaaggagaccaaagctttcctgtgtctaagccaagctccagtatgcagggcagttgctttgccaactgtgttcaataagccagcttgtgaacaggcatgggataggcaaactgcctgatttacagcagaaggacagctgctgatggaagccctgcaaagatgccattttgggggaactataaaatcggtaaagggtcaggataactgaacagcatagcactgtttggatggttcctgtgaatgggctttgcacagggactaattccccagtatagcctgctgcctatcttcaacaggggtaggaaacacggtaggagatgaggagcccccagc

SEQ ID NO: 752063 - DNA, 511 bp, Homo sapiens
atcaacatttatacttataaagaatcccaactggaaaggagtcaagactggggatttctacggtaggagaaagttgagtgtgttttatctttctgcccggcacagaaagataaatataaagtttttcttctaatgcagttgtctggtgaatgcagtatggaaatttggagaaaatagaagttagatattgagacttctggaaatttaggcacaaataggcatattagaagtttaatatgcctatttaggcacaaatattagaagtttaatatgcctatttgtgcctacawatccatttaaatcatctgactcgattataaaattgtcactaaaatattgaatagcaatttttatttgtattctaatgctctttaacaagcttcttcatgagaaaaattcatataaggtatggaaaaactaagaagaaatctgaatacactaatcttaggaggtaattagatttagaagaggccatgaggatggagcccccaagatggggttagtgtcctta

SEQ ID NO: 752064 - DNA, 548 bp, Homo sapiens
ttcttcatagatttccaaagaagccttctttcaagcttttttctagttgttaagtttctttcttccatgtaacatatgtgaatatctcaagagaataatccaagacaaatattagtgggttttggtttcgattaaagaaatcttgacaaaatgtattccgatatattactacaaaggaaaacaatcgcaagggtctaattgaaatttacagtattctgagtctttttacctacaaatttagtggtttcaaaacctatattattgctgctagattcttaatttccataatatagattctactttgaattttttcagactgtattagaaagttctctgyattcctaaagagaacttaatattgctctaaatgctgtaagtcagcacactgtaacaaaaagaaacgtactcttccagtatacagtaatgttaaacaacaatgagaggattcaggggaaatgttaagctagagaacgctgtcagtattacttatcttacatgtagtaaattttgatgactctcttctgaatgtgaattcttgtaggaaatga

SEQ ID NO: 752065 - DNA, 596 bp, Homo sapiens
tagtcagtgctgtagtttactagtgaagaaccatgctgtttattcatttctcgaatttttttttttttttgagacagagtcttactctatagcccaggctggagagcagtgatgtgatctcggctcactgcagcctccaccttggtcaagcaattttcctgctttagcctgagtagctgtgattacaggcgtgcgccaccacgcctggctaatttttttgtatttttagtagagatggggtttcacgatgttggccaggctggtctccaactcctgacctcaaacrttccgcctaccttggcctcccaaagtgctggggttacaggtgtgagccactgcacccggccttgtttattcatttctaagttcatttttgccttatgagatgtcttctttggtacatgtgaaaacagaacttcataatcaaaaaaggcacattaagactttttaactttaatctctttctatgactatattattattgttattaccggccttgggatataaagtatatcagattcatttagaagccttttaacattcattctttcatttattcatttaacaacaaatatatattaagcccctattccatc

SEQ ID NO: 752066 - DNA, 586 bp, Homo sapiens
ctttcactcagggtctctcaaaaggcttcaaagtggcaaccagggctaaagtgaagtcatttaaaggctcagttggggattgaccccactgaagactgcaaaagatcactgaaataaattaaagaaaacctaaataaatatgaagacatgtcggtggwttggaagacaatattgttatgatggcagtaatccccatgttaatctacatattctgtgcaatccctatcaaaaccctagctcactcttttgcagaaatggacaagatgattctaacattcatataaaattttaagggatccagaatagcccaaataatcttgaaaaagaagaaccaagttggaggactaacactttctgatttcaaacttactacaagctttagaaatcaagaccatgtggtactggtgtaagaacaaatacttagatcaatgaaatagaatcaaaaatctagaaataaatgcatgtattatgggccattgatttttgataagggtgccaagacaattcaatggggaaaataatattttcaacaaatggttctgagacaactagatattcacaagcaaaagaatgaagttggatccat

SEQ ID NO: 752067 - DNA, 586 bp, Homo sapiens
ctttcactcagggtctctcaaaaggcttcaaagtggcaaccagggctaaagtgaagtcatttaaaggctcagttggggattgaccccactgaagactgcaaaagatcactgaaataaattaaagaaaacctaaataaatatgaagacatgtcggtggattggaagacaatattgttatgatggcagtaatccccaygttaatctacatattctgtgcaatccctatcaaaaccctagctcactcttttgcagaaatggacaagatgattctaacattcatataaaattttaagggatccagaatagcccaaataatcttgaaaaagaagaaccaagttggaggactaacactttctgatttcaaacttactacaagctttagaaatcaagaccatgtggtactggtgtaagaacaaatacttagatcaatgaaatagaatcaaaaatctagaaataaatgcatgtattatgggccattgatttttgataagggtgccaagacaattcaatggggaaaataatattttcaacaaatggttctgagacaactagatattcacaagcaaaagaatgaagttggatccat

SEQ ID NO: 752068 - DNA, 619 bp, Homo sapiens
attttaattttctaaaaatcactgaaaaagtaatttttcagtggcacagttttcacttttttcctgatccataaaaccagcaaagtggatacattcagtgttctataactacatttaagatccatgatgttagcttttcctytataaatcaacttaactctcttttataatggtgacacttacaaagctaaaaccccaggaaaattaaagttgatgaaagaaataacagattccccggctctatatacctgggaaatagctggttaagcttcaccacaaaggatagatctaaattgtttctgaaatgtttaaatttcaaaccccgcatagtcaaggataataaaacagactcatctttttttgccctcttgttaaattctaagcttcacgggcatttgaatacatctaaaaaatttggtttgtgagccttagaatttaaccacttacaaaactcttgagctccctccacttctgaggacgtttcctgacacattcaacagcatcagcgtccaatcaggagggagctcaaagagtaatccagctaattctaaggacacaaaggttttctctaggtaaacagtttaggtaaattacaaagtggtaagtttttcttgaggat

SEQ ID NO: 752069 - DNA, 619 bp, Homo sapiens
attttaattttctaaaaatcactgaaaaagtaatttttcagtggcacagttttcacttttttcctgatccataaaaccagcaaagtggatacattcagtgttctataactacatttaagatccatgatgttagcttttcctctataaatcaacttaactctcttttataatggtgacacttacaaagctaaaaccccaggaaaattaaagttgatgaaakaaataacagattccccggctctatatacctgggaaatagctggttaagcttcaccacaaaggatagatctaaattgtttctgaaatgtttaaatttcaaaccccgcatagtcaaggataataaaacagactcatctttttttgccctcttgttaaattctaagcttcacgggcatttgaatacatctaaaaaatttggtttgtgagccttagaatttaaccacttacaaaactcttgagctccctccacttctgaggacgtttcctgacacattcaacagcatcagcgtccaatcaggagggagctcaaagagtaatccagctaattctaaggacacaaaggttttctctaggtaaacagtttaggtaaattacaaagtggtaagtttttcttgaggat

SEQ ID NO: 752070 - DNA, 585 bp, Homo sapiens
tcccaaagtgttgggatggcaggcgtgagccagtgtgcccagccataaactattctgaaagaaatacaagtgagtcaacagacttcacttaccaatgagtttatgttatttaagcaatggtataggaaaatccttaaagtcccttcatatttaatcattggaatcagcatctcaagyttatggtgtatttttgctttttttttttttttttttttttttttttttgagacagagtctcgctgtgtcgcccaagctggagtgcaagtggcatgaactcggctcactgagacctccacctcccgggttcaaggaattctcctgcctcagcctcccgagtaactgggattacaggtgcctaccaccatgcctggctaatttttgtatttttagtagagacagggtttcaccatgttggccaggctggtcttgaactcccgacctcaagtgatccacccaccttggcctcccaaagtgctgggattacaggcatgaaccaccacacccggcctattttcgcttttttaatagattatgttatgtatcctcaattttatatgcaggtagtcctaatttatatagaacagc

SEQ ID NO: 752071 - DNA, 559 bp, Homo sapiens
ctatggtatcaaagtaatcgcagtgggaatgaaggaaggaatacaagagatacatcagacacaaaactgacatgacttgtcaccacagagatcaaatcaaaggtgagtctcagaattccagcttgggtaattggaagaattcatccattccttcagattacattttcagagtaactgccatgtgctaggtgttgatataaaggcagagtcccagaacattagagaagaagtacagaaaccgtcttgataagaggttctgagaccccmcctcaaaaaaaaaaaaaagaagaagaagaataggggtttcacttcagacactctgagctccaagtgtctaccaggtatctaagtagaaatgtttagtgatcagcggggacaagaagcaggacagggctctagagagagcagagccagagagggagaagaggcctctgaaacgacaaggctgaagtaaccaagtatgaaaataataaagtagactaaaaagtagaatgaaataagagggaaaaaagctaagaatgaatctttggaaaacagaaaagacaaaataagacagagg

SEQ ID NO: 752072 - DNA, 565 bp, Homo sapiens
catacaagagttgactcttaagtacacataaggtgtttttttttttttcctttttagcaagcctcatttgggtaggggggaggaagataaatagccaacagtgaaattgcttcaacataaaaacctttttttttttttaaaggaaactgctttttatactctgaaaagctaaagataactccaatttatcagtgctggtgtcacattggtggaaatttttcagcaatgagcatttaagggtgtttcatggactacaggcataaatatgtgacaaactactatggtactacaaaatcaggttaattgtagctttagagtgacgtttactgtgagttttaccaagataatacccattctgttacccttttattagtcctttatttgttgaaagtgttcattccttgctctaacttcaaaatataayggagtccttctgtaaatgcagtttggtatgactcattttagacctcacttaagagattagtttctaaagtatcagaaaatgaccattggtagtttttgatcctacggcctgacctccggtagcttgctataatactaacat

SEQ ID NO: 752073 - DNA, 659 bp, Homo sapiens
tctgaattagttacagaattaggagcagaatttaattcctcgaggaaaattttggatctttagaaaaagcccagttttgttttgttttctgagacagagtctcactctgttgctcaggctagagtgcagtggggcctcctcagctccctgcaacctctgcaattctcctgcctcagccttccgagtagctgggattacaggcgcatgccaccacacccggctaatttttgtatttttagtagagagggtttcaccgtgttggccaggctggacttgaactcctgagctcagctgatctgcccgcctcggcctcccaaagtgctgggattgcaggcgtgagccactgcgyttggcaaaagcccagtatttattattttttttgagacagagtcttgctctgttgcccaggctggagtgcaatggcacgatggctcactgcgacctctgcctcgtgagttcaagtgattctcccacctcagcctcctgaatggctgggactatgtagtagagacaagagtttcaccatgttgaccaggctggtctggaactcctgacctcaagtgatctgcccgccttggcttcccaaagtactgggattacaggcctgacccactatgcctggccccagtgtttattcttgatatagctttttattttta

SEQ ID NO: 752074 - DNA, 576 bp, Homo sapiens
tttgtttaggtaacacatcatcttttatatgcaatggactcttctgaagaggtttttcttcttccttacgtcgttcctttttttgatgactattttccttatcttggctttcagtggtagactctactacttctgaacgtcgccttgaagaccgtctaagggttttctgatttggagttatctgaacctgactatcctcatttaccatttgatctgctgatattactactgggggtgtattctctttggattccaaattaatttctacatttttctcctctacagtattagtttccaataatacagcattttccaytgttgctgctttaagctttgtattgtcatgctccattgtagattcagaaagatgaacctgattatctgacacacattctgtttgattaagcaaaccaggtgggttattttctaagactacaatgccttcaacagattcctcagtatttttctccggctcagatctcattaagggcttagaccttttattccctgtttgttcagctttaccagctctccggcttgatctcttagttccattcactattttttcagaatcag

SEQ ID NO: 752075 - DNA, 552 bp, Homo sapiens
gtgaaaaacccatgatgaacatcataatcaatgaggaaaaactgaaagcttctccacttaaatctcatgccaggcaagaatgcccactctcaccacttctatttgacatagtactggaagtaccagcaggagcaatcacataagaaaaggaaataaaaggcatctgagtcagaaaagtaggagkatatctctatttgcagatgacatgatcctatacataaagaaaaaaaaagattccacaaaaaatgtgttagaactattaagtgaatttattaaatagtagtgtataaaatcaatgtgcaaacatcagtagcatttttatacacaaataacctacttgataaagaaaacaatcacttttatgatagtatcaaaaaaacacaaaaaaacttagaaataaatttaatcaaggaggtaaaagaactgtacatagaaatctttatggaaaaaagattgaagagacaaataaatggaaatatatcctgtattcacgaagccaaagaattaatcttgttaaaatgtccaaactacccaaagcaatatacagattca

SEQ ID NO: 752076 - DNA, 594 bp, Homo sapiens
ggaggatatctctatttgcagatgacatgatcctatacataaagaaaaaaaaagattccacaaaaaatgtgttagaactattaagtgaatttattaaatagtagtgtataaaatcaatgtgcaaacatcagtagcatttttatacacaaataacctactkgataaagaaaacaatcacttttatgatagtatcaaaaaaacacaaaaaaacttagaaataaatttaatcaaggaggtaaaagaactgtacatagaaatctttatggaaaaaagattgaagagacaaataaatggaaatatatcctgtattcacgaagccaaagaattaatcttgttaaaatgtccaaactacccaaagcaatatacagattcaatgcaatccctatcaaaattcaaaaataattctgagaaagaaaaagttggaggcatcacacttcctgattttgaattatattacaaagatatagtaatcaaaaaagtatgacactggcataaacacagacacatagacaggtggaataaaatagagaacccagaaataaatccacacatatatggtcaactgatttttgacaagggcatctagaggatcca

SEQ ID NO: 752077 - DNA, 483 bp, Homo sapiens
agcatttttatacacaaataacctacttgataaagaaaacaatcacttttatgatagtatcaaaaaaacacaaaaaaacttagaaataaatttaatcaaggaggtaaaagaactgtacatagaaatctttatggaaaaaagattgaagagacaaataaatggaaatatatcctgtattcacgaagccaaagaattaatcttgttaaaatgtccaaactacccaaagcaatatacagattcaatgcaatccctatcaaaattcaaaaataattctgaraaagaaaaagttggaggcatcacacttcctgattttgaattatattacaaagatatagtaatcaaaaaagtatgacactggcataaacacagacacatagacaggtggaataaaatagagaacccagaaataaatccacacatatatggtcaactgatttttgacaagggcatctagaggatccaacggggaaaagatagtctctt

SEQ ID NO: 752078 - DNA, 616 bp, Homo sapiens
aaattggctgctgtgtccctttgacatacctccattcttttatttggtattgaaagaggaattttagccttctaacttttgttcttctcttttgtcttgaaggactctaaattgtcccctattcttatcctttaccactcaattattacagagtgcctttcccttcctttttgcctacttcacccagaactaggtgggaattgaacaatgagatcacatggacacaggaagaggaatatcacactctggggactgttgtgtggtggggggacgggggagggatagcatcagcagatatacctaatgctagatgatgagttagtgggtgcagtgcaccagcatggcacatgtatacatatrtaactaacctgcacaatgtgcacatgtaccctaaaacttaaagtataataaaaaataaataaataaataaataaaaaaggaaaaaaaaaaaaaagacagccacttcatatcatgtgtattttttgactcttccctgtagtcgatgctctcatctaatgggacaatttttttattctttttatgcatcaaataaacttctctttccagtggttattttggggcaattgcaggtcccctgctagttctacacttcttt

SEQ ID NO: 752079 - DNA, 628 bp, Homo sapiens
ctatcaaagtattaaatagaaaacttccccctcaacatccaataccatgtaatggcatggtgattggagagacccatggatccacatttctgccatgaagaaaataacttaagaagtcagaaacccactctacccccactgtgaaagagtagcccagttagccctgcagagtttcaccattcagcaaggcactccttctctaaggcagccacatagttctagggcccaggatagttcaggcagtggacaatactttgatattacttggcataggttcccattgcttagaatttctggttcattgaaatgagaagatttaaggtatagtctatcacagagaagagagacaacctcagtattctgcagaccagaaaacagtggcacagaagcmgtgtgatgctctctcttcagaaggcataaggagagagcaaatgagaggtccactaggctggaagtaaagcagtgaaggagaggctgtcagctaagcttcagcagttctgggaggggggcagtgtgagaatgctatgaacagaagtcacgggtcacccagagtaggaaactataggactgctagcagaaacattaggaaactgtgccgtattggatatgcatagcccagaaattaaac

SEQ ID NO: 752080 - DNA, 582 bp, Homo sapiens
tcatagtaacctctaataatttttttaatttcttcgtatcaatagtaatgtcttcttttccatctgtgattttatttttgtcttctcttttttcttaacttagctaaacatttcctaattttgtttgttttcaaaacacaaactttttgctttgttaatgtttgaattttgttttaaatttaygtatttattctgtcatctttattgttctcttcttctaaatttggattgggtttgctcttgcatttctagtttttaactcatttcccatttgtcctgagactactcttatctgtaatcctaatgtaacttcatttctgttacgttacaattagagacaagttctgttgagaaaaaactccaagaataagctttttttcccctgttttatttctaaattttattactattatacttttaagttttagggtaaatgtgcacaatgtgcaggtttgttacatatatatacatgtgccatgttggtgtgctgcatgtattaactcgtcatttagcattaggtatatctcctaatgctatcccttcaacctcccccaccccacaacagtccccggtgtgtgatgt

SEQ ID NO: 752081 - DNA, 543 bp, Homo sapiens
ggccagaatgaagaggaataaactatatcaagaagtaatttctaagtaagaatcaacatgacttggtgacagaagaaactaaaagaatcctggtagattgagaaggagcaagttagagtgagataacaaattaatttagggcatgcaaatatgacaagacttaatctaaggtaacttggacacttagaattgttgcttggaagaaagaaaaataacagttaatgtcaagaagcatagkgattaacgatgtatttatttttcattttatgttttttgaggtcacagatacagcctgaccagccagctccatatctaagtataattttggtctgggaaagttacttaactctttgaatctcagcttcttcatctgtaaaatggaaatgataccgacttcaaaatacaagctcaataaatggtagctattattctgacaacaattaccatgattagaccagctggtcaaatgaaataggaacagaacctgtgagatacagaaataggaacagaacctgtgagagaatatttcaaatttgaatccgt

SEQ ID NO: 752082 - DNA, 668 bp, Homo sapiens
ggaagccagggttaggacgtcagtcccattagagatacctgaaaagagttctgaagatttcagattgatgaatctgaataatttgagaaggaagcccacccatgaaaatggaaatagttacttttgagctaagagaaagctactctgtttatgtcactggataaaaatatactattgaaatatgggaagttgaaaagcttcctagagcaatgtcttgaaatcagcagacaaaagtatttgaaaaaagaagtaaatattattgttttctgtcaacatcaatgtttctgaaaaatgtattgcaaaaatattgacaacgtcttctcttcctgaatttacgagtctcattgatcccttcctttggtcagtgyatccaaaatcaaatgaaaactttacagcagatttttctatatgcaaaaccaatttttcactttttttttttacctggttggcaaatatatagattcctatgtcactgttaggagagattgcccagaatgtgaaagattacttaggtacatcagagtatcctgaactcaagcacaatgaacaattcatcaaggccttccactgtcctaggttgacaatgtaaatttagctaggagaatattccattctgaaataataacttgagcatgtattacaagggtcagcaaactaaagggccagat

SEQ ID NO: 752083 - DNA, 620 bp, Homo sapiens
acgtagtggattataactgatgtgtggaaactctaccaatattttattaattatggtagcctgaaataaaacgtgcatagaaaatacaaaataaaatgaggctttggggctcttaatttacaacatcagaagtttaagaaaactactcagctgcggctgggtgcggtggctcacgcctgtaatcccagcactttgggaggccgaggtgggcggatcacgaggtcaggagatcgagaccatcctagctaacatggtgaaaccccatctctactaaaaaataaaaaaaaattaggcgggcatagtggcgggcgcctgtagtcccagtcccagctactcaggaggctgaagcaggagaatggtgtgaacctgggaggcggagcttgcagtgagccgagatagcrccactgcactccatcctgggcgatagggcaagactccgtctcaaaaaaaaagaaaaaaagaaagaaaaaaaaaagaaagagaaagaaaactactcagctgcaaacatgggatttctgataggaaacaaagggatcattcagagtgcaagccaaaagccatggcaaatcattccaaaacgcaagactgaacaataattaatgaactaaccatatgtgctt

SEQ ID NO: 752084 - DNA, 587 bp, Homo sapiens
cccagttgtgagattatttccagttcttggctattttgaataatgctattataaatttgtgactatctctttgtgcagaaatatgttttcattttcttggatagatacctatgggtggaattggtggctctctgataaatctgtgtaattattaagaaactctcaaattgtctttcaaagtgactaaactattttacattcctaccaggagggtatgagggttacgacatttccacatcctcaccaatacttgttgcctctcttttaaagtayagctattctagttattgtgaaatagtatctcatttagtttaaatttgtgtttttttaatgactagtaatgttgaaccttgtttcatggtcttattgaccttgtatctaccttcctttgttaaatatctcttcaaattcaaattctggacacagtcctttattgaatttgtgatatgtaaatattttttttcagtcaaacttgtctttctattatgtaatgatgtgttttgaagtgcagtttttaattttgatggagtttagttttatcttttttcaatggattttagtttgagtgttgtagttaagaaatcttt

SEQ ID NO: 752085 - DNA, 594 bp, Homo sapiens
tcaacattcaagtcttattatttaagaaatacatttcataaggctatagctgctatagatagtaattcctctgatggatctgggcaaagtaaattgaaaacctgatgggctggatttataattttggataccattaagatcattcctggctcaaggggagatgtcaaaatatcaacattaacaggagtttggaagaagttgttttcaaccctcatgataactttaaggaattcaagacttcagttgaggaaacaactgcagtgtgatggaagagtaccacatttraagagaatcaagagatctctctctagcaagagaactaaagtaagaaatggagcctgaagttgtgactgaattgctacaatcttatgataaaacttgaggagatgaggagttgctttttatggatgagcaagaaagtgatttcttgagatagaatctgctgctggtgaagaagctctgaacattgttgaaatagcaaccatggagttataatatgacataaaaatggttgataaagtggcagcagggtttgagaggattgactccaattttgaaagaagttctactgaaggtaaaatgctatctaacaga

SEQ ID NO: 752086 - DNA, 480 bp, Homo sapiens
ggaagcttgtgagcaaggaaagagggacttccatgtgtctgagggacagtgagattgagggcttgctggaatcacacactgttctttcaggtttggagggcagaataagactccaagaaaccagtgttaaacattaggctgcacagcaaaagcatggctatattatacaggcatgtggggccccaaacttttttgaaaaagcaatagatttaataaatagtggtattttagtaagtttgactaatgggaaaggagtaggttggaagaaaagctgaagtcaaaggattaagagtarctactttagcagtggttcaggtatgaaggattagcaacttgatttatggcagaccaagtcaacttaagggaagggtcaaagagccggggccatagaacatggcaaaccctcccaccactggtggactcaggctctgacctcagactcagtgtattcagtgccttgttagagacttgctcaggagt

SEQ ID NO: 752087 - DNA, 625 bp, Homo sapiens
acaccacacacccccattcactgagctgcgggcagcaggaccgaacaagctgtgacacttcctgggggctcagaccttgggactccccaaccaaaagctgtaacaccccttgggggctctgcagttgctggcatctccgagtttttgggtaccaccacatctcccttgtccagacgccggcacccaaggcagaagctggtcaccgcacgccttaaccagccacaggctgggcacagagccacagcaggcgtgcgatctgggccagtagcatgagcagagcgcagcctgctgagcagagtgggtgargtgagcccagcaggcccatgtgaagccccagcagaggaactgctgacggtggagatttttgtctggcaaagtggcaccaaaagaatcctgtgtcaaagcgattaagaaaatgggggagatatataatcagagggaaagattaggaagaaaattaatgtacaatgcatgctgatttcaaaagtttgagaaatccagagtatattgtaaggcaaaaaagaaggaaatgctataaatatttgaaggccccttttgtgattgggtaaacaatatcagaagacagtctgggggcaaattcatgaaataagtcaattgcacaaat

SEQ ID NO: 752088 - DNA, 551 bp, Homo sapiens
aggcagaggatacttggggacaccttcacacactacctctcccgcccaaccctgctcatgtccactcccaacaggtggctgggtgtgtgcgcatctgagacactcacctgctcttttcctctctgactgtcgggtgaccccttaaccttgccatcacagggtgtccaacccggggggattctggctgctgtgctctcatgctgctgttaggattcactgcagggcatgtgagtcacatgaccagggaggggaacagcagaaaggagtctgctatggtttggctgtgtccccacccaaatctcatcttgaattgtagcttccatagtccctacgtgttgtggaaggcacccggtgagagagagctgaaaacatgcagtttcccccrtactgttctcatggtagtgaataagtctctcaagatctgatggttttataaggagtttcccctttcacttggctctcattctcttctcttgtctgccgccatgtaagacatgcctttcgccttctgccatgattgtgagacctccccagccacgtacacctgtgag

SEQ ID NO: 752089 - DNA, 597 bp, Homo sapiens
tctctccaggtctagacttgcactgactcctctgtgccatctttccaaacatgcctgcctcgtcatgcctctgtgcctttgcctggtggtttgcttattctctgtcacacctgcaggtcctgcccagtgcccactccttggggatgctccccagtcttctcctgtggtgccctcgctgtcctgcagctcagagctggcacatgggatccctttctcccactgcatgcagagccctgagggtaggcactgtgtctggttcstctctgtccccaacagctgactcagggcctgcagagaacagctgcccaatacacatttgcagaacaaatgggttaatagacaaaagagcagtaaataaatgggcctcacaatgcctgaccacagtagggcctcaacagatatttattgagctagagcacaagagtcccagaggctggtccacgatgccacaatgtctctgttggcttccctccatcacacacatacaacccctccccacctgcacacacatacacacacacccacatgcctccacacatatgcatatgcgtacacaagcattcttccagaacacttggaacattttattgtggccaa

SEQ ID NO: 752090 - DNA, 619 bp, Homo sapiens
gatgtgatgaattgatttcaggcagaaaacctgaggacttggcccagcagaccccccaggaagctggagcccacgtcattggcagtgcagccaagcatgagctaacctgtctgtgtttgcagcaatcaagacagcacgatccttcccagaagtcagagttggctcgtacaagcacaagagaagtcatctgcagatccgacagcaagagtggkcttgccaagctgggtctttacgggaatagccagggcaccacccacacacacatacctcgggcccccaggcttagccctcctggagagaggatgcagcccatcgccattcaccatccggtctccaacatgcctggaagctagcatcagccctgatgcctgcagggtgcgcagtgtgagctccccaggggtctctgtaccaggagtctgaagttcagtgaaagatttcagaagtgggcaaggtgttcctcctgttctgggtatccacacactcaacaaacattcgctgagcacataccttgtgctgtggcaacccactgtcagactgagggccacagggatgagtacattgcaagccctgcccactgaggctcgcagtctgtggagggaacagcaccagactccgacca

SEQ ID NO: 752091 - DNA, 615 bp, Homo sapiens
aaatttccaccaacttagtagcttaaaacaacacaaatttatcgtcttataattttatagttcagaaatctgacatggtctcactgggctaatatcaaggtgtcagcaagcctgtattctttttagtggactctagggaagaattcatttccttgcmtttttcagcttccagagtctgtcaacattctttagctcatagtctccatcttccttcttcaaagccagcagtgttgcatttatccgcccatatttccataatcacatctctctctaattcttcttttctgcttccctcatttttgaggacccttcagtaggactgggcgcatattcgttggataatacaggataatttccctgtttcaaggtccttaacttcatcacatctaagaaatttcttttgccatagaaggtaatataatcacaggtgccagtaattagaacatgtacaccattggtgttggtgggaaaggagcattttatgcttgtcacatatgctaataacataagcattaaatctgttttatactagataattatataaattaatattttaacagtttttctatgatttcaggtttgttagtttttctcaaatatttcctttaattctag

SEQ ID NO: 752092 - DNA, 629 bp, Homo sapiens
tgactgaacagagatttccttaaaggtattaaatcaataagtctctctgtctttgccaagtggctttgcatgtatgttagggcatagcattgatgttctggtggtttacaattatgccttagcctacacctcctgattacgtagagccagaagtgaggattttggatcttttcaagactttcatgagcatgctcatgaccctgggcatgtacacagctttgcacatgtttgtgaccttctagatttccaggaatctgtcagagcttttcatagcccctggtaaatacctaatccctagcttttctttttagtttcttggccagcctcttgtttgccccaayggttatcactgcctcaggcagcagcaatgttgaacaattgcctttgactgttgtagacaaatacccctgaagaaagagcatgttctgagataggtaaaataaagacaagtcttgcgagaggtggtttctaatgagctaccaaactggtcaactgacaacaattctttggaaatgggactttttggggagctccaaatctattctctcaactcagtggtcactactttaaaggttttcccagtaggatgtaagacacttggttttcaaggttacaataaaggtggtaag

SEQ ID NO: 752093 - DNA, 621 bp, Homo sapiens
tacctaggtctattttaatttgcttcaagtctgacaggaaaaaaagtacatacactctgactgggccaaattctccagaatacatcttaggggcatttttgccttgggaggaatgtttcccatcgctttggaggtccctttgtggtcgtcaaaatgttaccaggaggtccttgttcttagagctcccaagagggtggcgggctgcttccaagatgtcagcaagcctcttgttctctgacctgaggttcttggcctcacggattccaagaaatggaatcttgggctatgcagtgagtgttatagctctattcagcttgattaggatgaacctcgggcacttagcccaagcaggaacaatggcgagcctytagcctgattgggagcagcaatgggcactgcctcgctggatcagaagtgcagcagacaccctgccagatccggaggggtggaagtcagtggcagaactgtgatggtggcaaacagcagtggtagacgaagagcgaaagctcagctcgagccataacaaacacggaccagaagagtgtgcagttgcaagatttaatagagtgaaaacagagctcccataaaatggaggggacccaaagggggttgcccttacct

SEQ ID NO: 752094 - DNA, 579 bp, Homo sapiens
aagcagtcagaagacaacatcatggattaagttcgctgtcttgtatgggtatggtttctggcacccaaaagaattacaatagtaacatcaaagatctctgatcacagatcaccataaggggtgtaataataatgaaaaagttggaactattgtgagatttcccaaaatgtgacaaagacatgaagtgagcgcatgctgttggaaaaacggtgccaacaggcttacttaatgcacaattgccagaaaccttccatttgtamaaaacacattatctatgaatcacaataaagtgaggcacaataaaatgaggtgtgactgcagttaggtgctcagtaagttataatactccatttcctgcaactttattctgcctaaatagcaaaacattttaattataggcctgtaattaccaccctctccctagggtaaacattcctgcccagttgcaagagaataatcactttcagcagcttagtagccgtaatgaaccaaaagtgccaattctacttcaaaagatgaacaatttatttccctttcattaacagtaacagagtcaagaaacagagacgttttattgca

SEQ ID NO: 752095 - DNA, 597 bp, Homo sapiens
gagaaaaattataaaagccacatactatctaggaaacctttattttttcctccttggtaaaaattagctgaaacatgtacaatatagagacagaatatgcctcccctgtgagtaaacagtaaacagagagctaaaaatttgaagaaaccagaacttgggacaataatctacacattgtcagatattttctataaagttgtatgaaagtgtagatatttctaatatgacttaccatatastacttgctagattccatttcaaaaatataatacttcaaaactattttttgtgcaccacagaaataaagatgtattatacaagatatgtcgttgacattctgtaatttgttaatgtcttttccccacaaaatttacattactacattaatggagcaactattttcacaggaatacagaaaatattttgagaaaaaattacggacatgctttcactccattcacttcattgttcacaggcaagctattgcagcaaaatcaaagctaggagtaacaaagtaccgctggaagtctttgatgtaattcaattttaagaagattttaaaaatataatcgagcccttacaatagctcagtaatgg

SEQ ID NO: 752096 - DNA, 633 bp, Homo sapiens
atgcaaaatctttggttgtcattcatatttaatatccaggcaaatggaacaggcagaatctcaatgtggggaatgaaaatagaaactactgctaagaactaaaattttgagtttctcatcctccatggcagtcagattttcttgattctcagtcaggccattccgcaatgagtcaaggtcctgcatggcctctagaggaattaactaggaaatagcttttacgtgagtagcaaaaggcttcctgttggaaaggggctttgagtattcctgactcctaactggtctcttattaggagttaatgcccatcagataacctttcttgcttaagtgctactctgatattctccctgcccttaatgagtcaattgtctagtatgtagcatatatttcaaattgctttcccagtgatggttattgagttgtaatgaactcatgtggtcccatttcaacccagtagcacacmttacagaaccaatgattgaccaattgttctgcaaagtattgtcatcagaccatctgcatcagacactaggtatacatattagaaatgcagaatcctgagccctgctacagataaaccaaactggattctcagagatgagtctgggaattcacatcatttacaagctttt

SEQ ID NO: 752097 - DNA, 631 bp, Homo sapiens
cacatagctaagacttagatcttttctgatctgcctctcccatttgatgatccctatgtcatcattttaaagcagttccaaagcaatctagaagatggtgatccttttggaagatgtcacgtgaatagctagagtttatagagcaaagatttaaagaaattacctttttaggataatagtgccaygtgaagacatccattaactatagactgtcagggtgtcatattgaaggttgagtaactgtctcatgatttggatgtagaatatgacttagaaaaatgcaaaaggcaaggtaattcgtgaattcctttttttcctcctttttttaatcaagtttttcaaggcataattacatgcacaataaaatgcactcattttaagttcatagttgggcgagtttaaaatgtatatatttgtgtaaccaccaccaaaatcaatttagatataaacatttatatcaccctaaagcatcctttcatgtttcttttcaatcacactcctaccttcggctcttggcaaccactaagaaataatcactacaaattggattaaatttttatagaatcccctttcaatggaatcatagaatgcatactttttcctgtgtagctttttcactcagcataatgtt

SEQ ID NO: 752098 - DNA, 631 bp, Homo sapiens
cacatagctaagacttagatcttttctgatctgcctctcccatttgatgatccctatgtcatcattttaaagcagttccaaagcaatctagaagatggtgatccttttggaagatgtcacgtgaatagctagagtttatagagcaaagatttaaagaaattacctttttaggataatagtgccacgtgwagacatccattaactatagactgtcagggtgtcatattgaaggttgagtaactgtctcatgatttggatgtagaatatgacttagaaaaatgcaaaaggcaaggtaattcgtgaattcctttttttcctcctttttttaatcaagtttttcaaggcataattacatgcacaataaaatgcactcattttaagttcatagttgggcgagtttaaaatgtatatatttgtgtaaccaccaccaaaatcaatttagatataaacatttatatcaccctaaagcatcctttcatgtttcttttcaatcacactcctaccttcggctcttggcaaccactaagaaataatcactacaaattggattaaatttttatagaatcccctttcaatggaatcatagaatgcatactttttcctgtgtagctttttcactcagcataatgtt

SEQ ID NO: 752099 - DNA, 600 bp, Homo sapiens
attttaagttcatagttgggcgagtttaaaatgtatatatttgtgtaaccaccaccaaaatcaatttagatataaacatttatatcaccctaaagcatcctttcatgtttcttttcaatcacactcctaccttcggctcttggcaaccactaagaaataatcactacaaattggattaaatttttatagaatcccctttcaatggaatcatagaatgcatactttttcctgtgtagctttttcactcagcataatgtttytgagattcatctatgtcatatgacaatagtttgtccctacttagtgttagctagtatttcactttatggatataccagaatttgtttacccgtttacctacttttgggtaattgggttatttcaaatttactcttttaaataaagatactgtgtatgtgcatgtatacttctttgtacacacatggtttcatttttcttgggtgaaaacgtagaagtgaaattgctaaatcatctggtgctggtgtttaattttttttaagaagctgtgaattgttttctaaagtagttgtaccattttatacttccagcaattggtgaggcttccagttgttctatagt

SEQ ID NO: 752100 - DNA, 593 bp, Homo sapiens
ttgcattacaggtagatactgcaaacttgcttcaaaaaaactaaaaagttcaaataactaatggttcatatttgttccagttagtaaatatcacgacaaggtatcatcgtcatcccatgttctcagtatagattcagcttcatttcttacaccacacacccagaggcataaatggaagtacacagacaaaaggaaaggcctgagtttaaatgtagttatcatgttcagtgttcgacattttattctgagaatttaagtgtttctactgcagtaccacaaagtcaatctgcatattactttaactagatcacttgtaaaaataaatgaataaatgaccagtgatggttcagtgacaagagtgccagatgagtcatgaatgttttcacaagtaaatttgatagtaaactgctaagtttactgtayacgctgtgtacaaattagctcagactcaagatttttgctctaacaagtgagcgctcagttgcatctttaaactttgtgttgcgtgagaggggctgaggggcaggtgggagaaagtcagcctgcaggtgggaggtttctgtctcaggagtgctgatacccgtgcatgctgc

SEQ ID NO: 752101 - DNA, 593 bp, Homo sapiens
ttgcattacaggtagatactgcaaacttgcttcaaaaaaactaaaaagttcaaataactaatggttcatatttgttccagttagtaaatatcacgacaaggtatcatcgtcatcccatgttctcagtatagattcagcttcatttcttacaccacacacccagaggcataaatggaagtacacagacaaaaggaaaggcctgagtttaaatgtagttatcatgttcagtgttcgacattttattctgagaatttaagtgtttctactgcagtaccacaaagtcaatctgcatattactttaactagatcacttgtaaaaataaatgaataaatgaccagtgatggttcagtgacaagagtgccagatgagtcatgaatgttttcacaagtaaatttgatagtaaactgctaagtttactgtacacgctgtgtacaaattagctcagaytcaagatttttgctctaacaagtgagcgctcagttgcatctttaaactttgtgttgcgtgagaggggctgaggggcaggtgggagaaagtcagcctgcaggtgggaggtttctgtctcaggagtgctgatacccgtgcatgctgc

SEQ ID NO: 752102 - DNA, 625 bp, Homo sapiens
gtggagcagtctatggcccctgccttgctggctgtgaagcagatttttgcggaaggtgatcagctacaaagggaggcagcatgcagtagtcctcgtcctttcactcagagggcaagaaagaatctgttcacacacacacgcacacacacacacacaggcacaygcacgcatgcactaaggtcttgtgcgtgtatggtgtgctcccagcttcatgagaagcagaggatccctcagtctggctgtgaacttcaggtctttaaaaggccaagaggcttccacaaaggtttgacatgaacaggagactatgggcaaagcacttggggctggcgagccccggccttgttctgatgcctgccacaccacacatgggtgacgggaagctgttcctggggctgtctttcagtctcatctctcaatcctcacctctgacttggttgggcctacacctgtgggcagtcgtgggtgagggttgatggagttggaacagagctggaaagtgagtgtagagacaggatcaggagcctcgttcccacatgtgactcccgatggtcacatgacctcctgagatgctttccttgtgtggagtgaggtgggttgaccataggatctccacagcccagattct

SEQ ID NO: 752103 - DNA, 480 bp, Homo sapiens
aagacctcccactccaagccccctacaacatggcagcctcccaccctccagagtccccaccacagagcatccacagcctaaggcttccgaatcctcgaaggtcggatctagatggggcctcgagaagtcttattatacgtatagggaaacctacgcccagaggaggggaaaaattggcccgagatggtggcagactggggaccaccacctccctctcccccatctagtcccacrcacttgccccactgcagggctcctcccactgcaccagctgccttagcaagagaagcaaggacacagctctgggtttcaggaaagatggaaacccagaagaaggggcctgctggggccaactcttagcctttgactaaggaaagtgtgaaaatgccctgcccccaacctccccccacctacaagcccagcccagatcagtggaggtcagagtgggcaaccgtgcaacccacctccctcccagcacag

SEQ ID NO: 752104 - DNA, 589 bp, Homo sapiens
acttcaaattatactgtaaggctagagttaccaaaacagcacggtacttgtacaaaagtagacacatagaccagtggaacagaatagagaacccagaaataaagccaaatacctacaatcaactgactttgacaaaggatacaaaaacataaattggggaaagaataccctatttaataaacagtgctgggaaaactggctagccacatgtagaagaatgaaactggatccctatctctcaccttatacaaaaatcaacttgaaatggataaaaggcttaaatctaagacctgaaaccattraaattctagaagaaaacctaggaaaaactcttctggacattggcctagacaaacaattcatgactaagaccccaaaagcaaatgcaaaataaaataaaataaaagagacctaattaaaactaaaatgcttctgtacagcaaaagaaataatcatcagagtaaacagacaacccacagaatgggagaaaatatttgcaaactatgcacctggcaaagaacttatattcagaatctacaaggaactcaaacaaatcagcaagaatgaccaacatgcaaatgaaaaaatg

SEQ ID NO: 752105 - DNA, 572 bp, Homo sapiens
gatcatgcgatggggtgatgccagggctcaatctgattggatcctggatcttgctgtgtggcatctgcttcttaattcagtccctgctcctaggtccgagcacttagttctgcccgtgggtgcatgcttggttcatctgggcatgctcaggttatgtgaccttcaacctgggtgtccatggcaactgcaaaacatcacaacttcgttacataaaggttgaaccaaattggtctgatgcggtgatggtggctgccctgccatgccccggcccacctggagggtgaggagtggtgattcacagaggactgctcagcaggtgcccagggtttgccactgggtcactcatccggtcttcatggtaacctggtcaggtgagcaagcggggtgaatgtccccacgtggacagaggctgargcaccaagataagtgactcactgaaaccacatggcaagccaacaacagagccaggactcactgcccagagcccctctgcatccacccctctgccctgctgagccatctctgctacagagtgctagaaggtggcatgcacccctaggggacatgaggtc

SEQ ID NO: 752106 - DNA, 572 bp, Homo sapiens
gatcatgcgatggggtgatgccagggctcaatctgattggatcctggatcttgctgtgtggcatctgcttcttaattcagtccctgctcctaggtccgagcacttagttctgcccgtgggtgcatgcttggttcatctgggcatgctcaggttatgtgaccttcaacctgggtgtccatggcaactgcaaaacatcacaacttcgttacataaaggttgaaccaaattggtctgatgcggtgatggtggctgccctgccatgccccggcccacctggagggtgaggagtggtgattcacagaggactgctcagcaggtgcccagggtttgccactgggtcactcatccggtcttcatggtaacctggtcaggtgagcaagcggggtgaatgtccccacgtggacagaggctgaarcaccaagataagtgactcactgaaaccacatggcaagccaacaacagagccaggactcactgcccagagcccctctgcatccacccctctgccctgctgagccatctctgctacagagtgctagaaggtggcatgcacccctaggggacatgaggtc

SEQ ID NO: 752107 - DNA, 602 bp, Homo sapiens
tatacagatgctcttagaacatgacttttacatcgtttagcacagggattcctaacccctgggctatggactggtactggtccttggcctgttaggaactgggccgcacagcaggaagtgagtggcaggtgagctatcattactgcctgagctccacctcctgtcagataagctgtggcgttagattcccataggagtgcaaaccctgttgtgaactgtacatgtgagggatctaggttgtgcgctccttatcagaacctaactaatgcctgatgatctgaagtggatcatcctgaaaccatcccatgggaagattgtctttcacaaaacctgtccctcgtgccaaaaaggttgggaaccactgatttagcacgtctgtcaaatacactcagtgcattcattggattgcattttacataggggttaaggctctaacatcsttatgtaaaaagaaaatcacatataaccaacattacacatgaaaataaattaaatcacccatgaaagatcatctacatgattttacatatgccatattgtctctgaaatagtctaacagaacatttttattccttcaatgtaagaacagatgacagttttca

SEQ ID NO: 752108 - DNA, 583 bp, Homo sapiens
gtaatcaaataatccattgctatgtgaaaactctgaaaacctgttatagagttaaattgtcattgaaaattccttaaaaaggcaataaaatattgtctattcaccagtaggtaggtacttctacatctttgaaaaggaagttacatctcttagattaaatagtcatttccctgtttttaaaagaaattttwaagaaacttaatcacagaactttactagcctagaacacctggtttcatttttgtctactctaaatttttttaatcaacatgtacacattttcagaaataatgtaaactagacatgaaaagttactattgtttttacatcaattattttattattcaattagggatcctcatattttcaggacactgtgtgttggtgtgatgtacatagtttaaatgtgtccccaccaacagcatagtataaactagaatccagtactgaataaaatatgtttcgaaaagtccaaagataggttgttttataactattctgattatttatattcaaggtcaattttgtagtttgctaagatttaaactatataacataaggaagtctgagatagattgtaaaa

SEQ ID NO: 752109 - DNA, 628 bp, Homo sapiens
aaaattctgagagtggttgtaaaatgtgctcaccacaaaaatgacaactttgtgaggtgatgcatatgctagttgactgggttcaacaattccacaattcatgtaaacttcagaatattatgttgtacacaataaatatccacatacaattgtatctatcaattcaaaaaaatttaattaaaaagaaaaaactaaagacaacacatgcagatcagaatgggtggtgccagtattaatgcccattaagttcaagtgatttatgaacatggtagggtggaataatgagaattcagggaggatccacggaacagatgagccttattctctgctggcaaagtgatacatgtcatatatgtagaggggaagagaaaagtcattctaagtaaagagtcacatgaatggaacaccaagaaaagaatttccaccactgaatttagcatacagggtggtaagtatttgctaatgtaytggactcctccactagcctgtgaaatttttgaaggcaggagctgtatattctcagctccaggaatattcatttacactgtacattatcagttctcaataaatatttgttgaataattggatattaacctggtttctaatgtggttgcaaatttgagatca

SEQ ID NO: 752110 - DNA, 614 bp, Homo sapiens
gtagcagcaccccactcctggtaccaatttactgtattagcctgttctcacactgctatgaagaaatacccaagattaggtaatttataaaggaaaaaggtttaattgattcacagttctacattgctgaggaggcctcgggaaatttacaatcatggcagaaggcaacgggagaagcaggcaccttcttcatgtggcagcaggacacagkgtgagccagcagggggaatgccagatgcttataaagccatcatatttcatgagaactcattcactatcatgagaacaacaaagggaaaacaacctccatgattcaattacctctcagggggacatagggattattgggattacaattcaagatgagatttgggtgaagatgaagccaaactgtatcaaatagactattcagaagtatcaagataggcatatgaactactctgatgggtttcgcagtagagaagagagattgagccaacttcaaatatagcaagaaaaagtgggaatttatagacaagaagcaggatggaggtcagtagatggaaaattattaagaggaaacatcagggatgagggggattctggccaaaccaccctaacagtactgttggtga

SEQ ID NO: 752111 - DNA, 614 bp, Homo sapiens
gtagcagcaccccactcctggtaccaatttactgtattagcctgttctcacactgctatgaagaaatacccaagattaggtaatttataaaggaaaaaggtttaattgattcacagttctacattgctgaggaggcctcgggaaatttacaatcatggcagaaggcaacgggagaagcaggcaccttcttcatgtggcagcaggacacagggtgagccagcagggggaatgccagatgcttataaagccatyatatttcatgagaactcattcactatcatgagaacaacaaagggaaaacaacctccatgattcaattacctctcagggggacatagggattattgggattacaattcaagatgagatttgggtgaagatgaagccaaactgtatcaaatagactattcagaagtatcaagataggcatatgaactactctgatgggtttcgcagtagagaagagagattgagccaacttcaaatatagcaagaaaaagtgggaatttatagacaagaagcaggatggaggtcagtagatggaaaattattaagaggaaacatcagggatgagggggattctggccaaaccaccctaacagtactgttggtga

SEQ ID NO: 752112 - DNA, 614 bp, Homo sapiens
gtagcagcaccccactcctggtaccaatttactgtattagcctgttctcacactgctatgaagaaatacccaagattaggtaatttataaaggaaaaaggtttaattgattcacagttctacattgctgaggaggcctcgggaaatttacaatcatggcagaaggcaacgggagaagcaggcaccttcttcatgtggcagcaggacacagggtgagccagcagggggaatgccagatgcttataaagccatcrtatttcatgagaactcattcactatcatgagaacaacaaagggaaaacaacctccatgattcaattacctctcagggggacatagggattattgggattacaattcaagatgagatttgggtgaagatgaagccaaactgtatcaaatagactattcagaagtatcaagataggcatatgaactactctgatgggtttcgcagtagagaagagagattgagccaacttcaaatatagcaagaaaaagtgggaatttatagacaagaagcaggatggaggtcagtagatggaaaattattaagaggaaacatcagggatgagggggattctggccaaaccaccctaacagtactgttggtga

SEQ ID NO: 752113 - DNA, 524 bp, Homo sapiens
atgttatctgagttgatacctgagtgataagaaagaataatcacatacaggcaaagggttctaggcagagggagtagcaagtgcgaaggcctaaaagaagtctgagcttgagttatatgcctgtagctaaatgagcaaggagaatgagacaaaatgagtgataaagttggaaactrgcagtagcaaataaccggggttcatcatctcatgccaagggaatctaggtcaaagacacaagaagtgggtttaggagcagaggtttaatagccaaaagaaagagcaaagagaacagctctctttcttgtgagagagaggggttcccaaatgggacttccagcccatagcagagtacaccagattttatagacaggcttatgaggtggtgtctgattttcataggtccaaaagattagttgaaccaggtatgacatttacataacacaccagaagctggctgccccaccctaatcttattttgcaaatggggtctttgcctggcctgcaccatgttgccttctccttac

SEQ ID NO: 752114 - DNA, 637 bp, Homo sapiens
tataaactttggggaatgtaaattggtagtcacctagaagattaatttggcaatatctaataaaattcaatttctggatatatttagattacaccaactatacatttaggccaaatgcccaatgctgattggttttgaccaagttaatattcagtcaaagatgaacatcaccaacctagaatgtggtacaaatctatgatgtacaggatacaaacttagcccgtttaatattacttactagattatgtctaacagattaaaatttakgaaagtctgtcagtaatgtattttctagtaagaactttatatgtaggaatgaaagcatctgccattaaaaaaaaaaaagatccttttatcttaactcctgaaagcaattggaaatgcatagtaataatttccacaagctttttttgcttaaattcttaatttccataaactaaaaactggaagggattgtcttcttaaagcattcttctaaagttgtagctttaaagtttgatttttgtatagtttgattagtgagaaatacatgttgtgtcaaatttgtttttattagttctattaatgagaaaaagagtataactcttcttcaccattttctttttttctttattccctttatattctttattatatc

SEQ ID NO: 752115 - DNA, 507 bp, Homo sapiens
cagtattggccaggcgtggtggcttacgcctgtaatcccagctcttgaggagggccggatcatgaggtcaggagtttgagaccagcctggtcaacatggtgaaaccccgtctctactaaagatacaaaaattagccaggcatggtggctcatgcctgtaatcccaactactcagggggctgagggacgagaattgcttgaatccgggatgcaaaggttgcggtgaaccgggatcgcaccactgcaccccagtctgggcaacacagcgatactctgtctccaaaaaaaaacraaagcagtatttatctcaagaaatgagaaaaaggataagcaaatctagagaaaataaaacagaggaaataacatagataaaagcaatactaataaaaatattaaacagtgttaacaaaaatatgcagcagcaaataaagtaagaaacactgtgaatattttcatgtcaatatgtgtgaaatcatgaatgaaaggaactagtttttagaaaaagatt

SEQ ID NO: 752116 - DNA, 638 bp, Homo sapiens
aagtgcctggggactaatgagtcccgcttcccactccccttgctgggagagctccaactgacggccaaggagtgagcgtttaaatacctcagctacaccaccccttgaatgggatggttccggtgcagtaggagctggctggtgatgcacctttcactggaaacccaaccttccttgtcacactttttttcttttaaaaatttcctcctctcccctccccttccattcccttgtttcttttccttcttttcttttctttcttttcttgagacaggatcttgctttatcacccaggctgcagtgcagtggcttgatcatagctcactgcagccttgacctcctgggctgaagtaatcctcctgcctcagcctcctaagtagctgagaccacaggcaggagctaccatgcctggctaatttttaaaaatgattttatagagacagrgatctcactttgtggcccaggctgttctcaaactcttggactcaagtgattctcctgccttggcctcccaaaacactgagatcacaggtgtgcactaccacacctggccaactacaattgtttcttattccaggtctgcttctgtgggaatagaaatagagaaaatttttcccagtgaaactgctcagcagggt

SEQ ID NO: 752117 - DNA, 566 bp, Homo sapiens
catggccaaagtttagatatgcacccccagcccccaaccacacagtccagatttcaattacatggcatgttaaccgagtaactacataaagtacaaagtgtgctgccaggtgtaggcaacaaaccaccacatgttaacagccatgtgggattggtggctgcatggggattggccagggtgcctgtcactcagctcagcacagacagcaaagcatggagctgtgtggccacatcatctcccagggagaaaccaaacaacatttcgcagaagtgaattatcagaagaaagaacagacaaacaaagatataagtgcaccagagaatgaaaagggatrgtgctggaagtgaaattccaaagaaaggccagggggcaggaaacagacagcctgctgggaaacatagactggctaccatgtgggacactcacggtgctgcaggaacctaaggaaggcaactcatccgcacacagcagggaagtggctgtgagggaaacgatgatatccaggggaaatggggcaataagaccttcacagtaaagggacactcagaggcacttcaccaccacaa

SEQ ID NO: 752118 - DNA, 566 bp, Homo sapiens
catggccaaagtttagatatgcacccccagcccccaaccacacagtccagatttcaattacatggcatgttaaccgagtaactacataaagtacaaagtgtgctgccaggtgtaggcaacaaaccaccacatgttaacagccatgtgggattggtggctgcatggggattggccagggtgcctgtcactcagctcagcacagacagcaaagcatggagctgtgtggccacatcatctcccagggagaaaccaaacaacatttcgcagaagtgaattatcagaagaaagaacagacaaacaaagatataagtgcaccagagaatgaaaagggatggtgctggaagtgaaattccaaagaaaggccagggggcaggaaacagacagcctrctgggaaacatagactggctaccatgtgggacactcacggtgctgcaggaacctaaggaaggcaactcatccgcacacagcagggaagtggctgtgagggaaacgatgatatccaggggaaatggggcaataagaccttcacagtaaagggacactcagaggcacttcaccaccacaa

SEQ ID NO: 752119 - DNA, 645 bp, Homo sapiens
cagaggtgaacccgggaccccctgaaggacagaggtgaacccgggacgccctcaaggacagaggtgaacccgggaccccttgaaggacagaggtgaacccaggacgccctcaaggacagaggtgaacccaggaccccatgaaggacagaggtgaacccrggactccctgaaggatagaggtgaacccgggacgccctcaaggacagaggtgaacccgggacccctgaaggacagaggtgaacccgggacccctgaagaacagaggtgattggaaaccctcctgtgagcagaatctccagcagtgcacctggctggtgattccgcctggaaggagaaacggccagatgtgtgattacttatgaattaatgggctgtggccagtggtttggctggagggccagggactcggagagaatatggttggaaacattgttgacaagggcaactggggaagagacatattagatagacgtctatgaagtggtatgaagtactaagatatgaatgtcccgtgtgaatgttctccaaagagtgacctcagcagaggaggattttaataaccaagtggatagggtgacctgttctgtggacaccagtcagcctctttccccagccaccctgccgttgccccatgcgcccatgaac

SEQ ID NO: 752120 - DNA, 645 bp, Homo sapiens
cagaggtgaacccgggaccccctgaaggacagaggtgaacccgggacgccctcaaggacagaggtgaacccgggaccccttgaaggacagaggtgaacccaggacgccctcaaggacagaggtgaacccaggaccccatgaaggacagaggtgaacccaggacyccctgaaggatagaggtgaacccgggacgccctcaaggacagaggtgaacccgggacccctgaaggacagaggtgaacccgggacccctgaagaacagaggtgattggaaaccctcctgtgagcagaatctccagcagtgcacctggctggtgattccgcctggaaggagaaacggccagatgtgtgattacttatgaattaatgggctgtggccagtggtttggctggagggccagggactcggagagaatatggttggaaacattgttgacaagggcaactggggaagagacatattagatagacgtctatgaagtggtatgaagtactaagatatgaatgtcccgtgtgaatgttctccaaagagtgacctcagcagaggaggattttaataaccaagtggatagggtgacctgttctgtggacaccagtcagcctctttccccagccaccctgccgttgccccatgcgcccatgaac

SEQ ID NO: 752121 - DNA, 645 bp, Homo sapiens
cagaggtgaacccgggaccccctgaaggacagaggtgaacccgggacgccctcaaggacagaggtgaacccgggaccccttgaaggacagaggtgaacccaggacgccctcaaggacagaggtgaacccaggaccccatgaaggacagaggtgaacccaggactccctgaaggatagaggtgaacccgggacgccctcaaggacagaggtgaacccgggacccctgaaggacagaggtgaacccgggacccctgaagracagaggtgattggaaaccctcctgtgagcagaatctccagcagtgcacctggctggtgattccgcctggaaggagaaacggccagatgtgtgattacttatgaattaatgggctgtggccagtggtttggctggagggccagggactcggagagaatatggttggaaacattgttgacaagggcaactggggaagagacatattagatagacgtctatgaagtggtatgaagtactaagatatgaatgtcccgtgtgaatgttctccaaagagtgacctcagcagaggaggattttaataaccaagtggatagggtgacctgttctgtggacaccagtcagcctctttccccagccaccctgccgttgccccatgcgcccatgaac

SEQ ID NO: 752122 - DNA, 628 bp, Homo sapiens
actgtgtaggagctccttgtcattgagaatatgaacgtgtctgccacacaagttgctaattaaacagccactgaattacatctctgtacggcgtgtacacaagtcagagcccacttttataagttgtgtttctcgtctgccccccacagtcatcctgatatgaaaccttcagtggctccctctttcccacagaatcaagtcaaaactgaagggcagccttggggtgtgtggtccttctccatgtgggtccagctcagggatgcgttgaaagcagcttccttatcaggttaattttggcgttattcccactccactttctttcccatgcccttgtcacggctccgcatcccacccgttctttgagacgcagagcgggcctctgcctcctcattcgttacygacgtgctgagccttcctttcccactcttccccagtggcgtccattgctcaccctacgcacagcaccgaatgccaggagaatgatcaagaccttgtgctttcacgacccttccagtttgcagttttccgagtgtctgtacggcgctgctttccctcctctagccgtccactgcagtgcacctgcaggagtgctggctgatttctggacagtttgggtcctggggaccag

SEQ ID NO: 752123 - DNA, 604 bp, Homo sapiens
tgatagtatttatagcatctgtttctttgtactttttgaatatgactaattgtaaatttaaaattacatatgtagcccacaatatatttctatcaaagagccttgccccagatcatggttcataaatctgaccctaacccccgtaacacctatggtataaccacctatccccaattccatactgatgacagagtttttccttagtaacttgaaggtataaagagataaataatattgtgtgtccctaaatgctgattctrtttatatgaaattttggaatcgagagtgttccagagttagtgaaaaagttcaagatactttaccaagttacatttcagtatcagatataacatttatattttatataacaaaaattaaatatagcaatattttagtacaaatgtgtatcttgcaatataatatgtctcatgcaatatttcaattcatttagaacatacttgtactaaaaaaatttgttgtttatctgaaatttgaatgtaactgggagccctgtattttatgtgacatctctagaaattgggtatgattcagagtagggaaaaaatatcattttcaataagtgatagaaaattaaaaatcagta

SEQ ID NO: 752124 - DNA, 608 bp, Homo sapiens
tgattctatttatatgaaattttggaatcgagagtgttccagagttagtgaaaaagttcaagatactttaccaagttacatttcagtatcagatataacatttatattttatataacaaaaattaaatatagcaatattttagtacaaatgtgtatcttgcaatataatatgtctcatgcaatatttcaattcatttagaacatacttgtactaaaaaaatttgttgtttatctgaaatttgaatgtaactgggagccctgtattttatgtgacatctctagaaattgggtatgattcagagtagggaaaaaatatcattttcaataagtgatagaaaattaaaaatcagtatggraaaaaaagaaccttgataaatgttgcaaactatactataaaaaatggttctaaaatgtgcagatctcaatgtgggaagtaaaataggaaaatatttagttgataaaatagttgattatcttcatgactttatggtagggaaagtcttgttaactttgttaataaagcattaacccaaaaggaaaagattgatcagctagatttcaataacagaacttctatttattttttaaaagggattttaactttttat

SEQ ID NO: 752125 - DNA, 646 bp, Homo sapiens
taaacttgtgtcatggttgtttgttgtacagattattttatcactcagatacttaaactagtacccattagttacttttcctgatcctctccctcctactaccatccatcctctgatagaccccagtgtgtgttgttgccttctatgtgtccatgtgttttaatcatttagggcccacttataagtaagaacatgcagtatttggttttctgtccctgtgttagttttctaaggataatggtctccagctccatgcacgtccctgaaaaggacatgatctcattctttcttatggctgtgtagtattccatggtgttttgtaccacatttttgttatgaagtctatcatggatgggcatttatgttgattccmtgtctttgctattgtgaatagtgctataatgaacatatgcatgcatgtctctttgtaatagaatgatttacactcttttggtatatacccagtaatgggattgctgagttgaatggcatttctgtctttaggtctttgaggaattgccacactgtctttcacaatggttgaactaatatacactcccatcaacagtgtgtaagtgtcccattttcttcacagcctcaccagcatctgttattctttgactttttaatgataactattctgact

SEQ ID NO: 752126 - DNA, 624 bp, Homo sapiens
tgtttaggatgttctgtcttgtctgcttgtttaactccatagtcatccttgaaaacagccttgaggtttcctcctccaagaagctgtcctcgtttcttctaacactcttgccattctaggagcttacccagatacatacttccaagctgctgctagtgagctgcacaatgttgcaatttatttcttytaatgtgtgatttccttctgagataatgacctccttgtctgatcaggggctacaatatattcatgtctgtgttctcacactctcatacacagcctgccccatggaagttgatcaaataaggctggatcaatttaatgaaatattgaatatttctccataggcgcccactattggtgttttattttaatcttaattatacttatttaccagtttaaaattaaaaaaaaaatgtagaggatttgaaatcctaaccaacatcaccacaacagatgccaacttctttttgtttaattttcaatttttgctgattgagaaatagtcaagagaaacaaaagtgtattagtgacagcggatttgccaaggtatccataatggagaaatgctttctgtgatacaccgaaatgtcaaagaaagttcataattagtggatccttaga

SEQ ID NO: 752127 - DNA, 644 bp, Homo sapiens
aaaaagctttgcctgctgacattctgtgctggaataaaataagaacctccatcatgttgagaaagaaatgactgccccccgctcttcctgatgggttttagaccagagatgtgcccttgcggagacagtaaatctgccaactcattagctactggcttactgaaagaaagggaaaacaaaatgaaatacagaaatgagacaaaacaacaataaaagaaactactttctgctgcctttgatttataaaatagtggtaaaaaagagaaagagaatattcagaaagcaaaagaggaaaatgacaaaatgccttcaaagggacgcgaataaaacttgcagataactttcaacttaaacaattaaaaacagaaagcaatgtaattaaatagcataccaagcaacataaaattttataaccagtgctatgggctgaattgtgtcccccacaaaatccatattaaagctgtaacccccagtatgactatattaaaaatagagcctatagrgaggtagctactgttaaaggagatcataaggttggagtcctaacaggattagtgtccttacaataaaaatacgagcggcttctctctctttctcccctctcatgtgcaaagaagtcatgtgagcacatggcacagtgggac

SEQ ID NO: 752128 - DNA, 505 bp, Homo sapiens
aaagaaataattttcacataaagcgatctttcttcctttcttcattgtgagctgagagaggattgtagcaatacaggttgagcaattttcttttttatgaatctcgtgctcaatttatgaaagccattttgcaacccatttacatgcagtaaacctttgccttaaagttctgtcatttaccttgatcatgattatttatagtccttttagacaaggctctttactggtttagctctcaagcacagcactgtcacaagccagttttctacgtctttcaaggcagggtaggaagctaagacagggccagtcttgtagctcgctgtgaggaatgggggckttgggtaatgggaagaacactagttggcatcaggagtcttgcattcgcaacctctgcactctcactctgtaatcctggccatttatgcttctttagtttcagtttgttcacttatagaaatggagcgacactttcatcacaaggctataaagtggagttgaagtgaag

SEQ ID NO: 752129 - DNA, 608 bp, Homo sapiens
caattacttaattcaattccttcaacaaaactctgaggtagttatttaacattactcccattttatggacaaggagacagaggcttaggctgagtcacttgcctatggttatccacaaaacactagactcaggattcaactcagatctgcctgactcttgagcctgtgctctttactgtgcactaccataacctgccatcgtccaaaggggcttcagaatggactcatgggtttatgctttgagcattggaaaggaaaggtgtcakggaaatccaatttaaaataattcttacaaggctgggtgtggtggttcatacctatagtactaacactttgggaggctgaggcacccagatcacttgaacccaggagttcaagaccagcccgggcaacatggcgaaaacccatctctacaaaaaatacaaaaatcagccaggcgtaatggtgcatgcctgtaatcccagctatcaggaggctgaggtgggagaatcacctgagcttagaaagtggaggctgcagtgagccgtgatcatctcactgctctccagcctgggcaacagagtgagactccatctcaaaaaaataaaattattattacagactaatct

SEQ ID NO: 752130 - DNA, 608 bp, Homo sapiens
caattacttaattcaattccttcaacaaaactctgaggtagttatttaacattactcccattttatggacaaggagacagaggcttaggctgagtcacttgcctatggttatccacaaaacactagactcaggattcaactcagatctgcctgactcttgagcctgtgctctttactgtgcactaccataacctgccatcgtccaaaggggcttcagaatggactcatgggtttatgctttgagcattggaaaggaaaggtgtcagggaaatccaatttaaaataattcttacaargctgggtgtggtggttcatacctatagtactaacactttgggaggctgaggcacccagatcacttgaacccaggagttcaagaccagcccgggcaacatggcgaaaacccatctctacaaaaaatacaaaaatcagccaggcgtaatggtgcatgcctgtaatcccagctatcaggaggctgaggtgggagaatcacctgagcttagaaagtggaggctgcagtgagccgtgatcatctcactgctctccagcctgggcaacagagtgagactccatctcaaaaaaataaaattattattacagactaatct

SEQ ID NO: 752131 - DNA, 607 bp, Homo sapiens
catggaccggtgaggcgcacggcactggacaaccacggcggcggagatttgaatccatgcacctcccaacagtccagatgtggttcctaaggccagcatgacttagccaggtttcaatcaaggctcagggcacaaggccagatgaaatcaacgagtgatgtcagcgtctctgtgtggtgcacacacaaagcaacttaggagaataaccatgtaactcatggctgaccatccttatctgtgggaygaaaattaagttagggccgctaatctccggctgcagggttaatttctatctaagcactcgcgtagatccacagacactccatggatagaggaacgcgggaaggttctgttcttttatggcagaggacctgttaccgtgggagaggcatcaattcccacgttttcagacagggagagtgcatgggatcccgcgtgccttaggaggatctcagctgagacaggccccagacttggtagctactctggggccatgtctgcaatgggaagagaggaacttgggggtataccctgcgaccccacctgccacatctaagtctttgggcaagttcctggactcccctgaggttcattttttctaacccat

SEQ ID NO: 752132 - DNA, 607 bp, Homo sapiens
catggaccggtgaggcgcacggcactggacaaccacggcggcggagatttgaatccatgcacctcccaacagtccagatgtggttcctaaggccagcatgacttagccaggtttcaatcaaggctcagggcacaaggccagatgaaatcaacgagtgatgtcagcgtctctgtgtggtgcacacacaaagcaacttaggagaataaccatgtaactcatggctgaccatccttatctgtgggacgaaaattaagttagggccgctaatctccggctgcagggttaatttctatctaagcactygcgtagatccacagacactccatggatagaggaacgcgggaaggttctgttcttttatggcagaggacctgttaccgtgggagaggcatcaattcccacgttttcagacagggagagtgcatgggatcccgcgtgccttaggaggatctcagctgagacaggccccagacttggtagctactctggggccatgtctgcaatgggaagagaggaacttgggggtataccctgcgaccccacctgccacatctaagtctttgggcaagttcctggactcccctgaggttcattttttctaacccat

SEQ ID NO: 752133 - DNA, 607 bp, Homo sapiens
catggaccggtgaggcgcacggcactggacaaccacggcggcggagatttgaatccatgcacctcccaacagtccagatgtggttcctaaggccagcatgacttagccaggtttcaatcaaggctcagggcacaaggccagatgaaatcaacgagtgatgtcagcgtctctgtgtggtgcacacacaaagcaacttaggagaataaccatgtaactcatggctgaccatccttatctgtgggacgaaaattaagttagggccgctaatctccggctgcagggttaatttctatctaagcactcgcgtagatccacagacactccatggatagaggaacgcgggaaggttctgttcttttatggcagaggacctgttaccgtggsagaggcatcaattcccacgttttcagacagggagagtgcatgggatcccgcgtgccttaggaggatctcagctgagacaggccccagacttggtagctactctggggccatgtctgcaatgggaagagaggaacttgggggtataccctgcgaccccacctgccacatctaagtctttgggcaagttcctggactcccctgaggttcattttttctaacccat

SEQ ID NO: 752134 - DNA, 625 bp, Homo sapiens
tcaaagtagcacgtgacgttgcctccgagctgtctgcgcgaagcgggtgggtgccatggagctccctgggctgagccctccaactcccctgcggtgaacagaggaactcaggaagggcagaggtggagcagggtcatcaggattgcatctaacgtcaaagaactacccacgcrcagaagtctgcttcgccctgctgggtttcacacgtggctactcaaaacagcacaaaaactggcctctgccttgggaaatgatgacaccctttgaaggagctatgatgccagtcgccacaagccctttgattcggccaaatattaggagcatgtcaaatcaagagaccctggttatgagcagttcatgcctatgtgttggagaaggtaggttttaaaacctaagagctgttaaaagtgaagttgtcttcccgagacagattttgattcaggcaatacctacagcagcaaaaccccctagtgccattctgctgtcctggagggaggagtctattctctttgacactcgggggagttacggctctaaatggagctcctaggaaccagaagagcaaatgccacctcaggttctcaggagaaaggacaaaacgccaagtcaccgacagtgggacgct

SEQ ID NO: 752135 - DNA, 517 bp, Homo sapiens
gcagaaagcctctttcctcgcccgctttatgccttccatttttcacactctgctctcccattaccacaggatgtataagcaggaagtgaacttgcagcccggctttctattaacctattgatgaaataatccattttaatgtgcaaaatgtcgtgcctgtttcttccccttaaacaaatgratgttttctagctgataccaaggtcctgatatgtgcatcggtctccgggggcattgattgctctaagttcccttgtttagaagcttctcaacaagaaaatacaatcctattatcatcaataacaccttgggttatgtcggatgctgctgcctggaatcactttgaggggctacggagacactgtgccaaatggaaccaggaggctccgagctgatgtttggtgccacccagccactgcccaccactggcagcctccctctggtctcaggcctttggaataaaaggcgattctcggggacttcagggggactagcaatagactaaaactttccgggt

SEQ ID NO: 752136 - DNA, 517 bp, Homo sapiens
gcagaaagcctctttcctcgcccgctttatgccttccatttttcacactctgctctcccattaccacaggatgtataagcaggaagtgaacttgcagcccggctttctattaacctattgatgaaataatccattttaatgtgcaaaatgtcgtgcctgtttcttccccttaaacaaatggatgttttctagctgataccaaggtcctgatatgtgcatcggtctccgggggcattgattgctctaagttcccttgtttagaagcttctcaacragaaaatacaatcctattatcatcaataacaccttgggttatgtcggatgctgctgcctggaatcactttgaggggctacggagacactgtgccaaatggaaccaggaggctccgagctgatgtttggtgccacccagccactgcccaccactggcagcctccctctggtctcaggcctttggaataaaaggcgattctcggggacttcagggggactagcaatagactaaaactttccgggt

SEQ ID NO: 752137 - DNA, 655 bp, Homo sapiens
ggtcctcttttatacctttgcatgggggttccctccgtctgtaccacccccttccctgtcccaccaactgcctgtcagggccactcagtctcaggtttttttctctgaggcttgccttgaccctgcaacccacttcctcctgtctgcctacccctgctgcagattttgcatggatcactatatayatatgtatgtatgtatatgtatatgtgtgtgtgtatgtatgtgtgtgtgtgtgtgtatatatatataattttttttttttgagacgaggtctctgtcacccaggctggaatgcagtggcacgatcacagctcactgcagccttaaattcctgggctcaagcgatcctcccaactcagccttctgagtagctgggaccacaggcacatgccaccatgcctgtttttttttttttttttttaaattttctttttttgtagagacagagtctcactatgctgcctaggctggtctcgaactcctggcctcaagaaactctcccgcttggcctcccaaagtgctgggattacaggtgtaagccaccgtgcctggccagcatgggtcacagtatcaagcaatttttggtgtctctctctccttcatgctgtgagtttcctgagggcaggtgtggtgctagtacagtgcctggcac

SEQ ID NO: 752138 - DNA, 639 bp, Homo sapiens
gaaattcatcatatccaggtctttttctcctacaaaatctacaaggtcacgtggttctgctggacacttgcccctgctcctgttgagtccaggatcctcatagaggagctgccactctacccaccaccctccccagggtgtgctcaccagctgctccctgtgcgccccttttcccattccaccgtccccagctcctgttcctttccgtgtgacccctgtgccctgttctagccccmgaccctctcagggtccctgccacacacccctggtctcttccgggcgaacctctcttcctgtgtctggagtgccctgctctgccctcctcctttccctgggggctcctgccacacttcaggtggggatcacatccctttgtcaagcttcatggttccgaggacagggttggggcctccaccctctgtgttccccctgagattctctgcattgattacaaccctggacatattggatttgagttcttgcgttgacaaggccgattctgccatcaggatgagctcctgacacacagggcctgggcctttctgagcagcctgcatcaggcaggcagctgcaagcacgaaccacttgtacttatacttcacgtgtacttggcatcttaggggcttcaaaactttagat

SEQ ID NO: 752139 - DNA, 639 bp, Homo sapiens
gaaattcatcatatccaggtctttttctcctacaaaatctacaaggtcacgtggttctgctggacacttgcccctgctcctgttgagtccaggatcctcatagaggagctgccactctacccaccaccctccccagggtgtgctcaccagctgctccctgtgcgccccttttcccattccaccgtccccagctcctgttcctttccgtgtgacccctgtgccctgttctagccccagaccctctcagggtccctgccacacacccctggtctcttccgggcgaacctctcttccygtgtctggagtgccctgctctgccctcctcctttccctgggggctcctgccacacttcaggtggggatcacatccctttgtcaagcttcatggttccgaggacagggttggggcctccaccctctgtgttccccctgagattctctgcattgattacaaccctggacatattggatttgagttcttgcgttgacaaggccgattctgccatcaggatgagctcctgacacacagggcctgggcctttctgagcagcctgcatcaggcaggcagctgcaagcacgaaccacttgtacttatacttcacgtgtacttggcatcttaggggcttcaaaactttagat

SEQ ID NO: 752140 - DNA, 462 bp, Homo sapiens
gcatagcacagtacaccagaactttcatattttaacggttttcattttgaaatgtctccccaggagacactgtacacgctgttcctgccgtttcttccaaaatcagcttgtgagtcacatgagaaaattggtttcttagctttaaggtcacacctggctttcaaaccaaaacaatgttatctaacctaaaacccaaccttgatcaccagatccggtgtctcatgacttccagctttttgcaaaatcaaagtcattctcrgaaggaggccaggcctaaggtttactcggagctggctctgtgctggatccctctggagacatttgcacatatgctatctcgtttgctccttgcaacaaccttagttcattctttatcacattctgcatgaccaggttggtctgcagtttgcttttaaattggaagcatttgagctagtgacagttgtgttatctttcagtaac

SEQ ID NO: 752141 - DNA, 583 bp, Homo sapiens
ttgtttgatatagtgagttccaacaatatagcaaatggacccccataatcagtgataactcctcttaacagtttatcatttattccttcagatgcttttctgaatattcttacccatcttttaaaaattaacagcatggggtgagtcatacctaatgtctgtgttatctttctttagcaacattgaactactkctaccctttatcaagcacttcataaaagctgcaccctgcgctgtgctcttggcacacggaatcttttctcatggtcacactgatgagaaaactagggcttggagggttgctccacagctggtttgtagcagacccagctctgacctcagcttaaagcccttcttgctaaccctgcagacctagccaacttctgaggaaaacaattctgtaagaagagccaggtggatctatctcaagtaaacagtgtgtgtttgtgtgtgtgtatttgcaacatttatttatttttcttataacagcaaagtacataaaatttatatcaaccctttggaaagtagacagctctgtgaataaggatacaatatttgaccttaacactatgattcagatacc

SEQ ID NO: 752142 - DNA, 633 bp, Homo sapiens
cccaacatttgctatttactgtaaaaagggacatgtgcagtttctttcttttacgtattttttggcagtagatagttaatgtttatcgaggtaattgttccagatcagcattatacagtttgctctggatacctgcttcccttaacrcacagtatttctgtgagttggaatgaggaaggccagagaggtttatctttctcaaactagtgaggaagggaatcagccatcagtccctgatctgtcaaactctaaaaaccacatctttgtgttagatcaggctgtgtcaaggcagagttccagtggacattttaaagctgaaggtgctagaattgccctggggcattggctctttcaccagccctctccctgattgcggcttcccggagcttgcaccattgtttcatcccaccccggagttcaatggaacttttctgaacaataggaggaaagtattccctatcacagaaatagatctgtgttcctgcagctcctgggattgttatgcctcagggcatcatcaataaactaaaaatcataagtcaatcatttctatattgtgaaaccatatttgagtgcttttatcaggggataagaaaagtgctttttaaataaacattaattttgtacatgaaa

SEQ ID NO: 752143 - DNA, 627 bp, Homo sapiens
ttggaggaagcttggagaattcaggatccagtccagtgtgtagacaaatcagaaaaccacaaaaacaatgagcaaggctaaaattcaataagaggtgtgctatagttttcttctgaaacataatttctctctctccatttacccccattcctaccaaaaataagcaaagactgatttgcttgcaaaataagtttagtctcattaacttggcctgattatttatataaacgcagcaaaaataatgattgaccacctaggctctttttgagtttgctttcctggaacttttaggggaatctcagactaaacagttaaaagccttttaaaactagaaagygaagccaaggacttgctctcaggctgtttctgaaatacttagggatttgagtgaatatcccttttataggtctccaaaatatcctggggttcctaggcctgccaggaagtgacactctttattcacccggaagaaaactatgtaagtgaaccaagtatgcaacacaccatggcgataatttttttccaagaggctttattgactccataaagtcaaccttagtttcttaaagtcgtcatatctgaagatacaacattccagttaaggccttcataatatatccagtgttt

SEQ ID NO: 752144 - DNA, 605 bp, Homo sapiens
cttttgtgacctttctctattgatattgaaggccctctttctatttctttctttttttttttttttttttagcacccagcactatttctcaaaacacatctgtacttgattacatgacctccgttattcataacctttgcaatgggtctttgcaggaactcccagctagaggaagaatgtacttcatttttaactctgtaccmgtcttgagatttcctttggcaaaaagcaaaaacaaaaacacgaccaccaccaacacaaaactcagcagaattaagatgtaagtttcaagcccagacctcaagagaccatgcatttttctgctctttctcgtacctctgctcaggctgcactgaagacaattcctgccaaacctaattagaaactgcatgaaacagagccaaattagtccaattgttccagccaaagctcaagacacagtgagcgcccagcctcaatcagcagaaccaggttcccagcccaccccgagctggtcacaggtggctgagttatctctgctgagattagaactgcccaggtcaccactcaactcagggacaataacaaatgctcagtgttttaagcaactggattttgaaatgatg

SEQ ID NO: 752145 - DNA, 608 bp, Homo sapiens
tgaattagggattaacatatgataatgagttcccacagccagaataaatgggtctggaaactcaggggttacaggaggaatcgtattttcactaactcaactaatgattcactctctcctaaaggtttcactgttcttcccatgactttgagctctgctagttagagctctcatcacccaatatgtgaatacttccacaaaggttgtaccactgaactggaccaccaggtgacatgggaccagcaggccaaaaaagagggtcactgtgttgacccaggtcattgatactgatttctaaggagtaatagctttgctgcaacagaacgccagcaggaaaggacgctctgaaatccaggagattctctgaaattcctccacgaaccccgtatacagctacaaaagctmacagatgttttcagcagcccattataggcaggactacccagggctcagcttgtgaggaaggatgaggtacctcacctccccaggtataaagccctgacaaattgggccagagaatgggtagtaaaggaaggaagttattaataccaaatatggctctaagagtagctgcagaaacaaagacttcaatagcctcccctaagttc

SEQ ID NO: 752146 - DNA, 765 bp, Homo sapiens
attctttcttaaggtaagttaagagaacacatgttttcagatggaaaattgtgtttcctttttactcttttctgtccagagtcagcgatatggagtaaatccatcactaggagaacacctttctcttccagaattgctgatgaatcattaggtaaagccggggccaccggcagagtggccttctggcagatggctggggcttgggaaatgcacatcttctctcggctcagctatgtggttcttctttcttcaagaagccaaagtactgggtgtaccccacaaagtcacaactgggcacagacgggaaaggctggctgtcagcaccttgctggccatggtcgtggaccccagagtgagctgacaaagcagtcagtccaagcatggctgcaggagcgccagaaggcgctgggtgctaacacttaggaggcagcatggacagtggagggctatagaggaggccccacatgagggacagaatgagggtccactgrctgcctgcactgcctgatgctcctgctatggcggcagaaggccaggcccctagcagggctgctgctgtgtggattctgatgccactaatgacttatcgtgcatctgggcctctgactctgggtgcctcttagggctgagataaggatgaggggagagaacaaatgggaaatgcccaggctcactctcagcaccaagtggtctgtgcagcccaggagcctggagcaagccctcgcaggagcccaagggatccaaactgaagcactgttttctgac

SEQ ID NO: 752147 - DNA, 587 bp, Homo sapiens
tcgcacagggtgcctccgcagaggggcaaaggcttatcagttcaaggaatttaaggaaacctctgttcaattattgcctgaccaccaaggtaactgagcaaagagttcgtggcttgcacactacagagaattcagactccacagaattagtgcagaaaagttacttaataaacaaacagcaataatagaaacaaaacagaaacagtagcaacaacaaactgttttttggggtgggagggggagggatctgatctccaaagttgccacattgcagtatctaaaatgtctcactttcaacaaaactatatgaaacatacaaggaaayaggacagtatgggccatcaaccgggatggggagagcagtcaacagatactttctattaggatgctgaggtttcaaaaaaaaaaaaaaaccacttaaataagctattacaactatggtcaggaaactgaaggaaaccatgtgtaaacaatagaagaaaaatatgacaatagtctcatcaaatagagattatgaatgaagagagatattatagagattattaaccaagagtgatattacaaccaaatactgaatacaaattctg

SEQ ID NO: 752148 - DNA, 521 bp, Homo sapiens
agtaggtgccacttctgtttggaaggcatgattccagagggtaagacttctgtctaccatcatgtcttcttgttcttggtaatgagttgtcaaatctcaccagctcaacttccagatggtagccaatgcattgttccccagaacaagcagatgagatcatttttccctcccctcaggccagccaaggaaggtttctctttggtctgtgtgtttatggttctctccatcttccagctgtatagccacaagccaccttgccaatgtctttcagtatttattggggaaccttggctrtaaaaggtttcaggagtatgagttttcacaaatcctgtaatacctgactgttttatcaagatagttttctttgaggggaggggagatatgtgcaggggtggggaggggaccctctgcattccttatactcttacatttcccgaagatttcactgagtcctcctgactctgtttcctggaggcagggctgcacagagatgaggaaacagccatagatgatgatttcta

SEQ ID NO: 752149 - DNA, 600 bp, Homo sapiens
cttacgaatttatttctcatagtactggtcaaaagtatgatttctggaccctcccagtatgggtgggtaggtctaaaatgacaagtccactgtagcattccaatctccctaagtctctgaatcccttcctctatgttaaaacaaggaagctcaggcatctccaacttgcttattgtgggccatcttttgattcatgtttcagccaaccaaccaacaaatcagtgccctttttctaactccctaagctgcaacagtaaatgcagaatctctgcttagtcagcccatatcaataagtttgttttgatccaactttgtgtttctttcaccattatctcacactctcaacatccattcccacacagcttcccaaatgtctgcctatataattagaaaaatktgttagttctttgattgaaaaatcaaataggtgagtataatgcatctcctcatctttatgagcctgttgggactttagttgaattgtaagtctagaagcaaggaggggtggattgtctttcatggcagctgcctcaggggaggacattgcagtttcctcaggcaatgcagaggtaacaccctcagatgggatagaggcacggc

SEQ ID NO: 752150 - DNA, 585 bp, Homo sapiens
gatagctggactaataaaaaagagagaagatccaaataaacacaatcagaaatgacaaatgggacattaccaccaactgcaacagaaatacaaaaacctctcagagactactataaacacttttatgcaaacaatctagaaaacctagatgaaataaaaaaaaattctgaaaatatacaagctcccaagattgaaccaggaagaaactgaattcctgaatggacaaaaatgagttctggaattgattctgtaatcaaaagcctaccaayaacaaaaggcccaggaccagacagaatcactactaaattttaccagatgtatgaagagaagctggtattattcctactaaaactagtccaaaaaattgagaaggagggattctttcctaactcattctatgaggccagcatcatcctgataccaagacctggcagagacacaacaaaaaaagaaaacttgggccagtatttttgataaatatagacacaaaaatcctcaacaaaatactattttatcacatatgcaagttatagcatccacacccagagtcagatactgaacagtttcattatcacaaggatcctt

SEQ ID NO: 752151 - DNA, 579 bp, Homo sapiens
cttctaccagtggactatattccagatatgcaagactagttcaatattttaaaatatatgtatataattgatcatattcacagggtaaagaaaaaaaatgtagccatatcaattgatgtggaaaaacaatttaacaaaactcaaattcagtcatgataaaaagtctgattacactaggaacagaggaaactttttctcaagctcagagcacttggagaaatctacagctataccattatacttgatagtaaaatactgaatgctgtttctttaatattgggaaggggagaggatgtgctgtctcamcatgcagattaaacatggttctagaagattttgccatcaaagtaagtcataggaaagaaataaacagcatataaaatggaagagatgaaataaaacattcttgatttgcagacaacacgattgcctacatagaatatactaaggaattttacaatatcaacaacaatgaatctcccagaactaataagtgagttcagcaaggtcacaagatatgaggtaaacatgcaaaacacaattccatttttatatactgacaataaaaaaaatgaaaat

SEQ ID NO: 752152 - DNA, 602 bp, Homo sapiens
aatcccattccctcctctgaattttcccaaaatagtcccaggcaactactgctctgctttctattactaaagcttaattggcattttaataaatttatttaaatgaatcatagattatatactcacttttgtctggcttctttcacttggtgtaattattttgagcttcctctgtatttttgcatgtgtcaaaagtccattcctaaatggactttttctttgagacgaagtttctctctgtcacccaggctggagygcagtggcgctgtcttggctcactgcaatctctgcttcctgaactcaagcgattctcctgcctcagccttccgagtagctggggttacaataatgcaccaccacgcccggctaatttttttttttttttttggtatttttaatggagatggggtttcaccatgttggccaggctagtcttgaactcctgacctcaggtgatccacccacctcggcctcccaaagtgctgggattacaggcgtgagccaccacgcccagccctgctttctattttgaaatacaggctcacaaggagttgcaaacaaatgttctggaggacccatttatctttcaccctgattctctc

SEQ ID NO: 752153 - DNA, 569 bp, Homo sapiens
tatggctgaatagttctccattgtgtatatgtaccacattttctttatctgttcatctgttgatggacacctaagttacttccaaatcttggctattgggaatagtgctgcaataaacatgggagtgcagatgtcttttttgatttcacttcttttggataaatatccaatagtggaattgctggatcacatgttagttctatctttggttttttgaggaactttcatactgttctccatagtggctatactaattttcattctcaccaactgtatatgagggttcctttttctccacatcatcaccagcatttgtcattgcttgtctttggataaaagccactttaattggggtgagatgatatctcattgtagttttratttgcatttctctgatgatcagtgatgttgaggaccttttcatatacacttttgccatttgcatgtcttttgagaagtatctattcagatcttttgcccatttttaaattggattattagatttttttcctatagagttgagcttcttatatattttggttattaatcccttgccagatggatagttt

SEQ ID NO: 752154 - DNA, 563 bp, Homo sapiens
catctccaaattttgatatgttggattttcaatatcatttggttgagaatactttctaattgccttttaaattcttattttacccaggggttatttagacatgtgtagctaactttccaaatatttgaagatttttgagatgtcttatgatgaacaattgctaatttaayattattttggacagaggacatatgctgtacatctaccctagcaaatgctccttgtgcatttgaaaagaatgtatctttttggatgtaagtgttgggtatttttctaaactatcaaatagtaatggggctaatagcagttttcacaccttctatattcttattgatttggtctatttgttttatctattactgaaagatgggttttaaaatttacaactttgtggatttttctatttcttccttttattctcttagcttttgctccacgtatttgaaactctgtaatcaggcacatgcacatttagagaattgtgatatcttcttgaagacttaaacgttttatcattaagtaaggtccctgtttaattctggtaacattattgatcttgaaat

SEQ ID NO: 752155 - DNA, 540 bp, Homo sapiens
ctccaataccatcataaatactttaagtttcatttaactttctctcttttctcaggtccagcctattgcaggctgaacaccagcactgagggaggagggcaacactggctcccctctcgcccctccagtgcttttctctgtcctcctgtctttctaatctgcttccagatccctctaggggggaatactgggaacaggaagaagcaaggaagcaggaaatacctaattgaycgacacctattctggctgtgatagattttttttttttaacccacctcctttttgagatctttcatggtttcttaaagacctagatctctctccccgcactgccagggaatctctcacctgacattcccttcatgaagatacatccatctccatgacaactggccttttatgcttcctcagcccttatgcatctgtgcatctgctagtgacttcagctgcagttctgctgagacttttttctcccaagtattcctcttaaacaaaacccaagacatttcacactgcccttgcttggggtcctcatgtagt

SEQ ID NO: 752156 - DNA, 649 bp, Homo sapiens
atgtgaattttgatggctaccatactgccaattattttcttttatgatcagtgcttttgagtcttgtctaaatttttgccaacacctggattcagtgtttctcttctattttcttctagaaaactatgtaatttaagcccttttgtttaggtctagaggccgttttaacttaattttgtggagggtgrgaggtaagggtcacagtttatttttcttccctatatatagccgacaccatttgttgaaaagattttctttccctattgaattgccttggttcctttgttgaaaatcagttgattttatatgtgtctatttctaaattctgctctgctctagtgacctatttgtctatcctgataccaattccatatcgttgattattataccttcatagtgagtttggaaaacaatacacctattccaactttccaaaattattttggctattttaagttttaaaacatttttcaaataattaagaaaagaaaagtcagttgagattttgattgatattgtgtagaatctttaaatttgtttggggagaattgacatcttaacaatagagatttttccaatccatgaacatggtgtatttcttcattttcaaaaggttttgttaattttgttataggtggaagtcttgcag

SEQ ID NO: 752157 - DNA, 649 bp, Homo sapiens
atgtgaattttgatggctaccatactgccaattattttcttttatgatcagtgcttttgagtcttgtctaaatttttgccaacacctggattcagtgtttctcttctattttcttctagaaaactatgtaatttaagcccttttgtttaggtctagaggccgttttaacttaattttgtggagggtgggaggtaagggtcacagtttatttttcttccctatatatagccgacaccatttgttgaaaagattttctttccctattgaattgccttggttcctttgttgaaaatcagttgaytttatatgtgtctatttctaaattctgctctgctctagtgacctatttgtctatcctgataccaattccatatcgttgattattataccttcatagtgagtttggaaaacaatacacctattccaactttccaaaattattttggctattttaagttttaaaacatttttcaaataattaagaaaagaaaagtcagttgagattttgattgatattgtgtagaatctttaaatttgtttggggagaattgacatcttaacaatagagatttttccaatccatgaacatggtgtatttcttcattttcaaaaggttttgttaattttgttataggtggaagtcttgcag

SEQ ID NO: 752158 - DNA, 647 bp, Homo sapiens
gtatatagaaatacggtagatttgcacattgaacatgtatcatactaccttgcaaattcacttgtcagttctagcagtttttggtgaattataatgagtattttcaatgcaaaaccaggcatgcaatcctgtagtttacatatagtgacagttttacattttcctctccaaactttttgcttctttctcttttcttatttcactagactagattgcagtacaatgtttaatagaagtgataagagtgtacattttcccatatcccagaggaaatgtatccatcattttgtgatatataatatagctattggttttccatatatgatctttaycacattgaaaaagtgcccttctgttcctcatttgctgagaatttttatcatgaatagacaaggaattttgtcaaattccttttttgcatttatccagatattcatatttttaaattattctattattgccaattgctggttgatttttcaaataataacctaactatattctgggaataacatgaacttggtcatgctttttaggtatttctgtattcaacttgctaatttttaaaaagtttatttagtataaccattatggagtacagtttggatgttcctcaagaaactaaaaatagagctaccataggatcc

SEQ ID NO: 752159 - DNA, 434 bp, Homo sapiens
ttataaatatgaagatatgatatacacttataaatatgaaatgtccccttatcattgtattggggtctatgtttatatcctcttgcggacttgaaccttttaacgttatataatgagctgcaaatatatgttgtaaatatgtgtgcacccacactggagcacccagatatacaaggcaaatattaaagctaaagagagacatagaccccaatacaatgataccaggacacttcaacaccctactttcagcattggacacrtcaaccagacagaaaattgacaaagaaacattggacttaacctgcgctacagaccaaatgaacctaatagatatttacagaacattttatgcaatagctgcagaatatgcattcttctcttcagcccatggatcattctcaagcatagaccttatgataggccacaaaagaagt

SEQ ID NO: 752160 - DNA, 434 bp, Homo sapiens
ttataaatatgaagatatgatatacacttataaatatgaaatgtccccttatcattgtattggggtctatgtttatatcctcttgcggacttgaaccttttaacgttatataatgagctgcaaatatatgttgtaaatatgtgtgcacccacactggagcacccagatatacaaggcaaatattaaagctaaagagagacatagaccccaatacaatgataccaggacacttcaacaccctactttcagcattggacacatcawccagacagaaaattgacaaagaaacattggacttaacctgcgctacagaccaaatgaacctaatagatatttacagaacattttatgcaatagctgcagaatatgcattcttctcttcagcccatggatcattctcaagcatagaccttatgataggccacaaaagaagt

SEQ ID NO: 752161 - DNA, 550 bp, Homo sapiens
caaaccaaattcaacaacagattaaaaacatcatttatcatggccaagtgggatttatcccagagatgcaaggatggctcaacatgcacaaatcaatcaatgtgatacatcataccaatagaatgaaggacaaaaaccacatgatcatttcaactgatactaaaaaagcatttgataaaattcaacatcccttcatgattaaaaaaaaaatcactaaaaaactgggtgttcayggaacataccacaacacagtaaaagctatatatgacagacccacaattattatcatactaaacacaaaaaaactgaatgcctttcctctgagatctggaacaagataaggatgcttactttcaccactgttattcaacatagtactggaagtcctagctaaagcaatcaaacaaaagaatgaaataaaaggtcatccaaattggaaaggaagaagtcaaattatccttgtttgcagacgatatgatcttatatttcaaaaaaactaaagattccataaaaagtatattagaattggtaaacaaattcagtgaagttg

SEQ ID NO: 752162 - DNA, 640 bp, Homo sapiens
tactagcaaaccaaattcaaatatacattaaaaagataattcatcatgaccaagtgggatttattccagaaatacaaggatgtttcaacatatgcaaattaatcaatgtgatatatatcctatcattagaatgaaggacaaaaatgatcatttcaattgatgctgaaaaaacatttgataaaattcaacatcctttcataataaaaaccctcagaaaactaggtattcaaggaacatactacaacacagtaagagccatatatgacagacccacagctaatatcatgctgaacggggaaaaacttacagcctttcctttaagacctgaaatatgacaaggatgctcattttcaccaccgttattcaacatagtactggaagtcctagctggagtaatcagactagagaaagaaataaaggtatccaaattggaaaggaaaaaggcaaattatccttctttgcaggtgataggatctyatatttgggaaaacctaaaaactccacgcaaaaactgttagaactgataaacaaattcagtaaggttggaggatacaaaatcaacatacataaatcagtagcatgtctatatgccaacagtaaacaatctgaaaaagaaatcaagaaagtaatcttatttata

SEQ ID NO: 752163 - DNA, 553 bp, Homo sapiens
ggaggcctaggtaggaggatcgcttgaggccaagagtttgaggccagcctggccaacatgcgaaaactctgtctctactataaaaaagtacaaaattagccaggcatggtggcacatgcctatagtctccagctactcaggagactaagccatgagaatttcttgaatcccgaaggcgggggttgcagtgagctgagattgctgytccactgcactccagcctgggtgacagagcaagactctgtttaaataaaataaaaataaaaataaaatgtccatactacccaaagcaacctacacattcagtataacctctatcaaaatactaatgacattcttcacaggaatagaaaaaaaaatcctaaaattgatatagaaccacaaaagaccccaaatagccaaagctatcctgagcaaaaagaatgaaactggaggaatcacattacctgacttcaaattacactacagagatatagtaaccaaagcagcatggtacaggcatataaacagacatataggatgactacagtcaacaataatttattgcacatct

SEQ ID NO: 752164 - DNA, 632 bp, Homo sapiens
ccagacaccaagcaagcaatcaattctgcagcagacaccagctgggtgtcctccaattcaaacctgacactacctacctggagataacatcagatcctgcaggtggatggctccatccccaaggttccctccccttcagacaccagtcgcaagtctgtgcctccagaacttctgactgactggcttcaagttggggctcccaggacttcctctctgggttttattaatttgctagagtggcttayagaactcagggaaacacgtagatttgctggcttattataaaggatattacaaaggatacagataaagagatgtgtaagccgacgtatgaggaaagggcgtggagcttccatgccctccctgggtgcaccactctccacaaacctccacgtgttcagctatccagaatttctccaaaccctatcctcttgagcctttaatggagtcttaattggatacgcataattgaagcatggacaatggtgccaaaatgtgactggaaaaaaggatgtgatctggtgttagtttgagtgaggaaacccagcaaggcttgtctgtttagattcttcttggcttctttgcagcattttttccaccagggtagggggcaggatcccttctggaatgag

SEQ ID NO: 752165 - DNA, 613 bp, Homo sapiens
gcaagagatttattggggaaaacacctgtggaggataaaggagaagggaggagcaggaggcagaaacagcctacacttgtgaaaggagagaaggaaggaagcattgggtaggaagagtctcagattacagtgcagctcgagaaagtctctgaaaggccagtggagaatcgcaggcaaacattgcctattagaggggctctctgtgggcagaaatgttgcagcgtcagccccaggcatgttcaggcgttgggtagaagcagccaggggaaacctgaatattgagccagacagaaaggtgtggcagctggaggctytcagccagctgcacttctcccagcaagttctcttgaagaacaagctgagcagtgcacctctgcgcagacctggcatgtctgctgtgacttataggtgttggcccccaggggttttgttgacacagtgacctttcaaacaaccagaaaacagctgtgggcctagcaagagctctaggtgtcctgggggtactgaattaaactctcccccatggccatctcctggctttatagctggaccactgcctctgccctccttctttttttttttttttttttttttttttttgagactgtcttgc

SEQ ID NO: 752166 - DNA, 622 bp, Homo sapiens
gatatctgatttgcagatattttatgccattctgtgaattgtcttttcaccttcctattggtgttctttgaagcaccaaaatttataattgtgataaagtccagtttatctatttttttcttttgtcacttgtgctttggcccataccaaggtcacaaatattattcctatattttcttcctatatttcttctaagaaatatatggtttctccaaagtaatgcagattatttaaaaaaagagaaaaaaagaaataygtggcatgtagggtgtcagataggggtccaatttcattcctttgcagttgtatatccagttgtcccaacaccatttgttaaaaatactatttttttctccattcaattgtcttgacactcttgttgaaaatcaattaatcataaatgaaagggtatacttctggactcacaattctattctattgctttatgtctatccttatggcagtaccacactgtcttgattaccacggttttataggaagttttgaaattaggaagtgtgagccctccaactttgttcttctttttcaagactgttttggctattctggattcctggaatttctatatgaattttagaatcagcttgtcaatttctaccaa

SEQ ID NO: 752167 - DNA, 596 bp, Homo sapiens
aagcccccagatgacactgtctgagaaacaggagccagtggccagtttctattcatttttcaaactgagatgaagacaagcattttactggcttttaatttaataccagtgaggcctcccacatcaatcaaggcttcctctgcatgtgacctgggagggcttctgatttgagaggcaattctgagaggtgctcagggatttggtcagacacatgcagatacagcctcagttccttacttgagtgctagttctrgctttaccacggtcccctaatgtgacgtgtaagctctgtatgtgagattgggtgtgtgattgtgtactaccagatgaacacacctatggatacgcccttttaggctgaactaaaattgcctttcttggatggtgaaaataatacctgatcataaaaaaggataatctcgaggctatttcttcccagcagaaattctcccgtaagccttctcgcatctgtctgccccaccaagcctgtgtgtgaccccagagtctggttgttttgcctcattcaggtttctctgggtccccggaatgattcaggatccacgctctccgtcagctctggaacggggccaagcgca

SEQ ID NO: 752168 - DNA, 637 bp, Homo sapiens
tgcttgctgtctgcacatccctctgtcctcctctcccagctgcttcccgagagagcacctcttggggatttagccaggcaactcgaaacacagtttccaccctgggaagacaggaggctctggcgtgactttcagccgtcttccggccttgggttacagtctgaactctcagaataacaggccaaagccacaatcccttggcctcacgagacaattttgccattctgcagcccctttctccctgccccttagtctttcacrcgcagcataaagtctgtagtttgcagtttcgcagtttggaacccgcagccccaagaacccagccccacttcccaaacaccacacctgtgtctccatctggcagcgcagccacccctggtcgccacggagcacaagcggcagggtatactaaacagcacactaatggtggtgctagcccctgcattcacaccactcctgagagtccctcagctcagcctcacagcccccagccactggccatcccagagcttacaggctgagctgcacccacacaacatcagcctgtgggtgttctgcaggcaccccatgctgagcacacccacactgaacacccttctctcctagactcactctttcttcccttttcttttctccc

SEQ ID NO: 752169 - DNA, 637 bp, Homo sapiens
tgcttgctgtctgcacatccctctgtcctcctctcccagctgcttcccgagagagcacctcttggggatttagccaggcaactcgaaacacagtttccaccctgggaagacaggaggctctggcgtgactttcagccgtcttccggccttgggttacagtctgaactctcagaataacaggccaaagccacaatcccttggcctcacgagacaattttgccattctgcagcccctttctccctgccccttagtctttcacacgcagcataaagtctgtagtttgcagtttcgcagtttggaacccrcagccccaagaacccagccccacttcccaaacaccacacctgtgtctccatctggcagcgcagccacccctggtcgccacggagcacaagcggcagggtatactaaacagcacactaatggtggtgctagcccctgcattcacaccactcctgagagtccctcagctcagcctcacagcccccagccactggccatcccagagcttacaggctgagctgcacccacacaacatcagcctgtgggtgttctgcaggcaccccatgctgagcacacccacactgaacacccttctctcctagactcactctttcttcccttttcttttctccc

SEQ ID NO: 752170 - DNA, 602 bp, Homo sapiens
ggatgagttagcattgtctctccagtgagagtggagcctgggcacaaggaccatgccttattcagccctgactcccacaggcatttagcacccaagggagcttaaagacaattcaagggccaccataaaagtttctgctgcctccaggtagaactagtcaccctctcctttgtatccctaaaattctctgcacaaatgtctctcttagcatctgcacaatgggactcttgtttgtttgcaggtttttctcctaataacttaatgagccatttgaagatagrggccatgttttagtcaccttagtatcctcatatttaatgaaccaacagcttggactgtactccacagcaaataaaccaccctgctgctgaagatccattttaatagggaatctttgaggctaagagattatttgtgttaccagacaaactctactgggtggaatagtaggtagcacagaacttgctctgctgtctattagggactggctgagctctgctcaccttgggaagcataagggagttttgcaggtggagcagaaacaaaggtacctactacaagctgcctcgtgaacctgccaagacttccatgtttcacctcac

SEQ ID NO: 752171 - DNA, 430 bp, Homo sapiens
tctatggtcagttgtgatcataaaaagagagtaagaagaaaaacaactctgaaagacaagatttggtttctctctttcattgtacacatgtaagtattaaggtaaaatgatggtaaataacttgtgccagattacacagttagtgatggaagcagggcagaaaatgctctttcctgaaccacagcctgacatggtgattactttccttttatctgaagattcatttatttcacatcaatagtgactagctttcccctacttattctaaatcaatggaattttattatmcagccatccctccatatctgtaggctctgcatctatggactcaactaaccactgattgaaaatattccagagtaaaaacaataaacagtaacaatgcaacaatataaaacaatactgactaaaaatacagtataacaactat

SEQ ID NO: 752172 - DNA, 623 bp, Homo sapiens
atggggatgtcaatttacctggtaaattaaaaaaaaaaacaaaactttagattacgtagtccacatattgtcagtcctaagggaacattagcatgaaatttacatgaaatactgtgtgtgtgtgtgtgtgtgtgtgtgtgtgtatataaatatacaatacatatattatatataatatatataatatataactagattcatgatagcatagtacaactaagtaaacttttgcttttaaattggacatcctttctgccttccattgataagggctatagyacttataatggtggcaaaaaaaaaaagaggactagacagaatatgaaagaaaatgaggctctgtatctgatttttcttaagagtactgagtaggcaaaactaaaactactgtccctgacaagaccgcaaatgctcaagttcataccttaaaaaatgaaaataactctcttaagaaatcttcactttccactagaaattattcacggttaactactacttcagtaacgtgggttttttcatcctatagatttgagatcatatcacatggctctttttagagccttttagaaaacagacatacgctttgtgtaaaaataaagcctttatggttattttaggagttt

SEQ ID NO: 752173 - DNA, 623 bp, Homo sapiens
atggggatgtcaatttacctggtaaattaaaaaaaaaaacaaaactttagattacgtagtccacatattgtcagtcctaagggaacattagcatgaaatttacatgaaatactgtgtgtgtgtgtgtgtgtgtgtgtgtgtgtatataaatatacaatacatatattatatataatatatataatatataactagattcatgatagcatagtacaactaagtaaacttttgcttttaaattggacatcctttctgccttccattgataagggctatagcacttataatggtggcaaaaaaaaaaagaggamtagacagaatatgaaagaaaatgaggctctgtatctgatttttcttaagagtactgagtaggcaaaactaaaactactgtccctgacaagaccgcaaatgctcaagttcataccttaaaaaatgaaaataactctcttaagaaatcttcactttccactagaaattattcacggttaactactacttcagtaacgtgggttttttcatcctatagatttgagatcatatcacatggctctttttagagccttttagaaaacagacatacgctttgtgtaaaaataaagcctttatggttattttaggagttt

SEQ ID NO: 752174 - DNA, 499 bp, Homo sapiens
aattagcgacaagatttgaaatcacaatttaggagtcatgcagcctctggctccaagagtccgaacctccccaaattgctcctgggggtaacatcactaatgtaaaacctaagatcactgcttgagatgttttgctgaccctgcactggatgaatcagctgacaccactcagattgataatctggcccaaycagttctgccatcacacccaggaacagaagacattatgaaaacctaacttcggccccctatgattcaatctccaacctgaccaatcagcactccccacttcccaagcccctatctaccaaattatgtttaaaaactctgatccccaaatggggaaactgatttgagcaataataaaactccggtctcgcgcacagccagctctgagtgaattactctttatccattgcaattcccgtgtcttcataaatcagttctgtctaggcagcaggcaaggaaaacccattgggcagttatagatcaatctcaa

SEQ ID NO: 752175 - DNA, 499 bp, Homo sapiens
aattagcgacaagatttgaaatcacaatttaggagtcatgcagcctctggctccaagagtccgaacctccccaaattgctcctgggggtaacatcactaatgtaaaacctaagatcactgcttgagatgttttgctgaccctgcactggatgaatcagctgacaccactcagattgataatctggcccaatcagttctgccatcacacccaggaacagaagacattrtgaaaacctaacttcggccccctatgattcaatctccaacctgaccaatcagcactccccacttcccaagcccctatctaccaaattatgtttaaaaactctgatccccaaatggggaaactgatttgagcaataataaaactccggtctcgcgcacagccagctctgagtgaattactctttatccattgcaattcccgtgtcttcataaatcagttctgtctaggcagcaggcaaggaaaacccattgggcagttatagatcaatctcaa

SEQ ID NO: 752176 - DNA, 506 bp, Homo sapiens
tataggtagcctgaaaatcttccaaatatccaagctcttgcatctatgcttaaaaattgcttctacaatttatttctctcttcttgcattttactgttagcagtaaggaggacccaagccctacctttgatattttgcttggaaatctcgtctgctgaacactgaatttcatcacatgcaagttstaactttcacaaaaccctagaacaaaattcagccaagattttttttgcttctacatgacaaaaactgctctttctctagtatccaataacgttttcttcatgtctgtctaagacatcactagaatcaccctttacatctacattcctgctatgcatctcaaaattcttccagcctctacccattgctcagttccaaaaccacttccacgtgtttaagtatttgttacagcagccccttcttattagtacagaatctattataaggaattggctaatggaattatgaaggctgagaactcccaagatctgtagtcaagcaag

SEQ ID NO: 752177 - DNA, 626 bp, Homo sapiens
cgtgtttaagtatttgttacagcagccccttcttattagtacagaatctattataaggaattggctaatggaattatgaaggctgagaactcccaagatctgtagtcaagcaagccaatggagacccaggagagctgatgtgtagttccagtctgagatcaaaggcatgggaaccatgatggtgtaagttctagtccacagttattacaytggagacttaagaaaactgggtgtttcagtcagagtctgaaagccagaaaagattattatcccagctcaagcagtcaggcaagaggggttcccttttactaaatctttttgttgtattcaagtcctcaaatgataggatgacgtccatccacgttagcaagggcaatatggtttactcagcctatcaatttaaatgtgaaattcatcaagaaccaccccacccctgccccaccacagacatacacagaataatgtttggccaaatgtctgggcaccccatggctcagtcaagttgacacctacaattaaccatcacatacacacacacacacacacacacacacacacacacacggaaagcttgaagtgtgtgttatactttcaggaattaaattcaaggaagagtttattgagtg

SEQ ID NO: 752178 - DNA, 635 bp, Homo sapiens
ctcctttaagtagtctacacttgatgatgatttgtagcacaaaaatccatacagcatacagccagcagctagacagtagtcacttgtgattcctgggtcactggcttttggcacagtaagcaaatgaaagctcagtgactacatatttagcattcacttctcagcgtcacaggccacagaaatgctgcttaattattcaggcaatgatttgcaattgcaagtcactgctgagacagtgacaagcaagtcagagttttagggggagaacacgtcttttttctaccacacatgctcctatttgacttcaagggtattgctggagtcagaacccaaatattgctttatctcatattagttatatttttgtggttcctttctcccgtgacatgaaacayagaataaaactctaccagttattcaaaagtcaaagaagaaaagagaaaattgtgaaacttgttcataatttctgtcatgcactgagttgattaatggcagcagcaattttggaggtggtggtgggtctgttgtgtgttttcatcattcctacacagtaaaagcaaagtatcacataagtttatggaaaaaaaccctctaaatatacagagaagaatctattatgctatttgtactgctgt

SEQ ID NO: 752179 - DNA, 550 bp, Homo sapiens
ttgtggttcttagctatcaaggatccgatctgtaatttctgcgtgcagagattccaaatagttattatcatatttctcccactgttcttagttgttatctgtaaaagggttagtccaaaaaaagttacttccccagtactggaatcagaaattagattgtaacatattgaatagaaataattttatgagcacttgttgatagttaagatatacatgtatatgtatatgcatatcttatatatcaatatgtactctgtgtgtgtgtgtgagagagagagagagagagaagaaaaaatagcttcttttaatggaaggaatgaacaatttagaaaattgctactttgtaatctctctaatgtgaaaattacttcaggcacaggccatcaaagataaaaggctgttagagaacaraatatgtcctttaaccggaatctaattatgacaaaacaagtatacaaattttgactactcatcatttcagaaagtaaagaataaagaagatcatgttatttacaatgcattaagaatcagactgataacaggttgaata

SEQ ID NO: 752180 - DNA, 658 bp, Homo sapiens
actttctactctgtttgtacccctaacatttacattccactaacagtgcttaacatttccaatttctccacatcctagccaacacttgttattctctggtttttttgatagtagccatcttaacggatgtgaggtgctatcttatagctttgctttccctaaggtttagtaatgttgagcatgttttcatgagcttattgaacatttgcttatcttctttacagaaatatctattgaagtcttttacccatttatggatagagttactggtttgttgttgttgttgttgttgtcttaggagtaytcagtatactctgaatattaatcccttatcagatttatgacttccaaatattttctcccactctgtgattcaccattttactctgttgttagtgtcttttgaagcacaaaacttctacatttttgtgaagtccaagttgtctatgttttcttttgttgcctctgcctttagtgtgatatctaagaaatcattgtcaaatccaatgtcatgaaatatttaccctttttacttttaatagttttattgttttagatcttacatttaggtcttgatgattttgagttaatttttgaatatgctattaagtaagggctgaattcaataattattttgcatgtggatatccagttttct

SEQ ID NO: 752181 - DNA, 658 bp, Homo sapiens
actttctactctgtttgtacccctaacatttacattccactaacagtgcttaacatttccaatttctccacatcctagccaacacttgttattctctggtttttttgatagtagccatcttaacggatgtgaggtgctatcttatagctttgctttccctaaggtttagtaatgttgagcatgttttcatgagcttattgaacatttgcttatcttctttacagaaatatctattgaagtcttttacccatttatggatagagttactggtttgttgttgttgttgttgttgtcttaggagtactyagtatactctgaatattaatcccttatcagatttatgacttccaaatattttctcccactctgtgattcaccattttactctgttgttagtgtcttttgaagcacaaaacttctacatttttgtgaagtccaagttgtctatgttttcttttgttgcctctgcctttagtgtgatatctaagaaatcattgtcaaatccaatgtcatgaaatatttaccctttttacttttaatagttttattgttttagatcttacatttaggtcttgatgattttgagttaatttttgaatatgctattaagtaagggctgaattcaataattattttgcatgtggatatccagttttct

SEQ ID NO: 752182 - DNA, 625 bp, Homo sapiens
ccatctcagcaccgtttctttctctgaagaaaaagctgtttggatccatctgactttagtcaggttgcaggctgagaggaagaaaaaccaccatgaggagggtgggggttagaagatcaagaggccatgagaaaagggaaaaggagagagcagtcacagaggaaggctctcttatgcctaactgaggtggatgcagtgtggatgacagcagacagaggacataaagtaaagaatcgtttctgccattctcaggattttgtgtacatgcctgactgtctaatgataagacccctgaggatggactctctgcctagcttttgtttcaatatcttgtaaaaatgcttccagatttgaygaagtatctgcagagactatagaagaaatagcatctgattgtgtaactcttttgttgttgttagtctgataagacacacagcctgcagtacgtgaagtgaagcaatattttcaccacacagcaggctgtttcagaaaaacccttcatttcaagtgtgcacctggcttggtctgtggaactgaccaaggtataggtataagtcttaggggagggcaaccagcctgatggagggcaatgaaccaatttttttcctcaagctttgttaaactt

SEQ ID NO: 752183 - DNA, 531 bp, Homo sapiens
gtcataatttgtatataaagcctctactttgcctaatagcaaaatatttaatttagtgacttctgagaaaaattagtgattcctcttcagttcagacttaaaaaatgactcaaatttaatattttatcttttcttcattcctttgcccatttttatacatgactggtggagagaagacatcattatatgtgcccaaatacaaggcagatttttttctttactcttatgctcagaaaaatgggacttatcctactttgcattcctcacaaattcctttatattatggagagcgtctctctgtctccctctctctcatcccctcattctctctttctctctctccmcgccctccccgcttctgttactaattttgcagagacacataagcctgaaagtaacaatccggatgtttatggaggtcgcctgacagttgattaaaaaaatgggcaaataaatttaacacagatttatcttagtttcatgggggtattacttcataattgtgagttaatgcttatagtaagtaagctt

SEQ ID NO: 752184 - DNA, 531 bp, Homo sapiens
gtcataatttgtatataaagcctctactttgcctaatagcaaaatatttaatttagtgacttctgagaaaaattagtgattcctcttcagttcagacttaaaaaatgactcaaatttaatattttatcttttcttcattcctttgcccatttttatacatgactggtggagagaagacatcattatatgtgcccaaatacaaggcagatttttttctttactcttatgctcagaaaaatgggacttatcctactttgcattcctcacaaattcctttatattatggagagcgtctctctgtctccctctctctcatcccctcattctctctttctctctctccccsccctccccgcttctgttactaattttgcagagacacataagcctgaaagtaacaatccggatgtttatggaggtcgcctgacagttgattaaaaaaatgggcaaataaatttaacacagatttatcttagtttcatgggggtattacttcataattgtgagttaatgcttatagtaagtaagctt

SEQ ID NO: 752185 - DNA, 588 bp, Homo sapiens
aatatacctgaaaaactatggtcaactgatcttggacagtaaaaagcaaagacaatccaatggagaaaggataactttttctacaaatggtgttggaacaagtagacattatatgccaaaaaaatgtctagacacagtccttagacctttcacacatacacatgcacacacaccactaaatggattatagacctaaatatgaaatagaaaactataaaatgttgtttcaaaaatcataagagaaactctaggtaaccttgtgttttgtggttacgatgactttttagatacaacaccaaaartactatccatggaagaaaaaattaagttgcacatcattacaacaaaaaacttctactctgtgaaagatactgttaaaagaatgaaaagacaagtctatagacattttaaaaatatttgcaaagcacttatgtgattaaaaataaaacatattcgaattatacaaagaactcttaaaaatcaataataaaaaaacaaacaacccaattaaaaataggcaaaacattcgaatagatgcctcatcaaaaaatatagagatggcaaataatcatatgaaaagatgtgcag

SEQ ID NO: 752186 - DNA, 588 bp, Homo sapiens
aatatacctgaaaaactatggtcaactgatcttggacagtaaaaagcaaagacaatccaatggagaaaggataactttttctacaaatggtgttggaacaagtagacattatatgccaaaaaaatgtctagacacagtccttagacctttcacacatacacatgcacacacaccactaaatggattatagacctaaatatgaaatagaaaactataaaatgttgtttcaaaaatcataagagaaactctaggtaaccttgtgttttgtggttacgatgactttttagatacaacaccaaaagtactatccatggaagaaaaaattaagttgcacatcattacaayaaaaaacttctactctgtgaaagatactgttaaaagaatgaaaagacaagtctatagacattttaaaaatatttgcaaagcacttatgtgattaaaaataaaacatattcgaattatacaaagaactcttaaaaatcaataataaaaaaacaaacaacccaattaaaaataggcaaaacattcgaatagatgcctcatcaaaaaatatagagatggcaaataatcatatgaaaagatgtgcag

SEQ ID NO: 752187 - DNA, 582 bp, Homo sapiens
gccatgaaaagatatagaaaaaccttgaatgcatattgtagtggaatatgaataggtaaagcacagaggattttcaaggcagtgaaagtgttgtctatggcactgtattgctagatacatggcattattcatttacaaaacccaaaacccaragaactatacaacgcaaaatgtgagccttaacgtaaactctgggctttagttaatattaatgcatcaatattacttcataacttgttgaaaatgtgccacattcatgcaaagtgtttataatagggggaaatgtggatctgggggtagggtatgaaggaactctgaagtagctgctaatgtttttaatttaaaacttttctaaaaaataaagtctttaagaaatacaatatgttgagtctaataaaatattttgaaaccacctgtccagcaaatgctagtattaggatatactttttttttttaacactctaaactcaacagaaaagagccaaagaatccaattataatagggcaaaaggcataaacagacagtttactcaagaggatatccacatggcatatagtacatcaaattgtattcatcattag

SEQ ID NO: 752188 - DNA, 582 bp, Homo sapiens
gccatgaaaagatatagaaaaaccttgaatgcatattgtagtggaatatgaataggtaaagcacagaggattttcaaggcagtgaaagtgttgtctatggcactgtattgctagatacatggcattattcatttacaaaacccaaaacccagagaactatacaacgcaaaatgtgagccttaacgtaaactctgggctttagttaatattaatgcatcaatattacttcataamttgttgaaaatgtgccacattcatgcaaagtgtttataatagggggaaatgtggatctgggggtagggtatgaaggaactctgaagtagctgctaatgtttttaatttaaaacttttctaaaaaataaagtctttaagaaatacaatatgttgagtctaataaaatattttgaaaccacctgtccagcaaatgctagtattaggatatactttttttttttaacactctaaactcaacagaaaagagccaaagaatccaattataatagggcaaaaggcataaacagacagtttactcaagaggatatccacatggcatatagtacatcaaattgtattcatcattag

SEQ ID NO: 752189 - DNA, 582 bp, Homo sapiens
gccatgaaaagatatagaaaaaccttgaatgcatattgtagtggaatatgaataggtaaagcacagaggattttcaaggcagtgaaagtgttgtctatggcactgtattgctagatacatggcattattcatttacaaaacccaaaacccagagaactatacaacgcaaaatgtgagccttaacgtaaactctgggctttagttaatattaatgcatcaatattacttcataacttgttgaaaatgtgccacattcatgcaaagtgtttataatagggggaaatgtggatctgggggtagggtatgaaggaactctgaagtagctgctaatgtttttaatttaaaacttttctaraaaataaagtctttaagaaatacaatatgttgagtctaataaaatattttgaaaccacctgtccagcaaatgctagtattaggatatactttttttttttaacactctaaactcaacagaaaagagccaaagaatccaattataatagggcaaaaggcataaacagacagtttactcaagaggatatccacatggcatatagtacatcaaattgtattcatcattag

SEQ ID NO: 752190 - DNA, 582 bp, Homo sapiens
gccatgaaaagatatagaaaaaccttgaatgcatattgtagtggaatatgaataggtaaagcacagaggattttcaaggcagtgaaagtgttgtctatggcactgtattgctagatacatggcattattcatttacaaaacccaaaacccagagaactatacaacgcaaaatgtgagccttaacgtaaactctgggctttagttaatattaatgcatcaatattacttcataacttgttgaaaatgtgccacattcatgcaaagtgtttataatagggggaaatgtggatctgggggtagggtatgaaggaactctgaagtagctgctaatgtttttaatttaaaacttttctaaaaaataaagtctttaagaaatacaatatgttgastctaataaaatattttgaaaccacctgtccagcaaatgctagtattaggatatactttttttttttaacactctaaactcaacagaaaagagccaaagaatccaattataatagggcaaaaggcataaacagacagtttactcaagaggatatccacatggcatatagtacatcaaattgtattcatcattag

SEQ ID NO: 752191 - DNA, 543 bp, Homo sapiens
caattataatagggcaaaaggcataaacagacagtttactcaagaggatatccacatggcatatagtacatcaaattgtattcatcattagtcattagggaaatgcaaataacaaccatattaaaatatcacagcacacttatcagagtgattaaaagtagtgacaataccaaatggtgacaatgtggagaaaacaaaatactaatacattgcttcaagcaatgtaagatgatagaaccattccgaaaattttggcaactttatggaaaggcaaacatgtgccttctgtaaaaccgaggaattytatacttgaatatctatcccagaatttgtttgatttcataaaaattccttacataaatgttcataacagctttattcgtaatataaaaattgtaaataaccaaaatgcaattcattagatgaattgttgtgctgcagttagcatacatatactatggaatatttctcagcaataaaaaggacctgtcaagacactcaacaactagtattacattaaaggtaattatactgaatgaaaaa

SEQ ID NO: 752192 - DNA, 325 bp, Homo sapiens
cattttattgttggagttttgtgaagctttcaattcttatattcctttttgtacagttttggccaattttgaagaagtagttattctttgcagggagttgaccatgagagccaaagtacagtaaattcatgaacatttttttgcataaaggtgaactcttcttgctytgagcagtgaaaagtctgcataaaggtatgaaaattccaaatgttaattttctcttattggctgttggttagatagttggttttagagaatactttttattgattttaattataaaagtaaaaacataacaaaaaatagaaaaaaactgacaaaaaaa

SEQ ID NO: 752193 - DNA, 325 bp, Homo sapiens
cattttattgttggagttttgtgaagctttcaattcttatattcctttttgtacagttttggccaattttgaagaagtagttattctttgcagggagttgaccatgagagccaaagtacagtaaattcatgaacatttttttgcataaaggtgaactcttcttgctttgagcagtgaaaagtctgcrtaaaggtatgaaaattccaaatgttaattttctcttattggctgttggttagatagttggttttagagaatactttttattgattttaattataaaagtaaaaacataacaaaaaatagaaaaaaactgacaaaaaaa

SEQ ID NO: 752194 - DNA, 654 bp, Homo sapiens
gattacagcacgtctgtttatggcatagtttactaaattatttttgagacagagtctcacactgttgcccaggctggagtgcagtggcgtgatctcagctcactgcaagctccgcctcccaggttcacgccattctcctgcctcagcctcccragtagctgggactacaggcacccaccaccacacctggctaattttttatatttttagtggagacagggtttcaccgtgttagccaggatggtctcgatctcctgacctcgtgatccacccaccttggcctctcaaagtgctgggattacaggcatgagccaccgtgcctggcccagtttattgaatattttaagcctactgttgagacctactgcctgaaaaataaaaactctttgaaaacatttctgctcatcagtaataaacatggttattgaaaagctctaataaagatgtggaaggagattaatgttgtctttattgcctgctaacaccatgtccattctgaagcccatacatcaaggagtgattttgactctccaaggcttattatttaagaaataaattttgtaaggctgtagctgccatagatagtgatatatctcagtaacttcgggaaagtaaattgaaaactttctgaaaagaaccattatagatgccata

SEQ ID NO: 752195 - DNA, 654 bp, Homo sapiens
gattacagcacgtctgtttatggcatagtttactaaattatttttgagacagagtctcacactgttgcccaggctggagtgcagtggcgtgatctcagctcactgcaagctccgcctcccaggttcacgccattctcctgcctcagcctcccaagtagctgggactacaggcacccaccaccacacctggctaattttttatatttttagtggagacagggtttcaccgtgttagccaggatggtctcgatctcctgacctcgtgatccacccaccttggcctctcaaagtgctgggattacaggcatgagccaccgtgcctggcccagtttattgaatattttaagcctactgttgagacctactgcctgaaaaataaaaactctttgaaaacatttctgctcatcagtaataaacatggttattgaaaagctcyaataaagatgtggaaggagattaatgttgtctttattgcctgctaacaccatgtccattctgaagcccatacatcaaggagtgattttgactctccaaggcttattatttaagaaataaattttgtaaggctgtagctgccatagatagtgatatatctcagtaacttcgggaaagtaaattgaaaactttctgaaaagaaccattatagatgccata

SEQ ID NO: 752196 - DNA, 624 bp, Homo sapiens
cctgttgggtaatatgagcaaatggcagctgctacctccaaaagaaaatattctcacccctttatattagttaagggaccaattattaatctctcactattcccttgtaatgcctaaatgccccacacccctttgggcaaaaatatatgtccatgatgggtgcctgattaatattcacccaacctctaaatttatctttccctctaatattgtttttcctgggaaaactacataaatctttaaccaataacttcaacctggacagtccyacttcaggagtttaaaaatagcccacatgtattcaaacaaaccctagcaagaaatctaaccaagtaattgcttgaggggggataacagtgtgtagataacctccttatctgttccctgttcaaaggacttgattggcaacatgtagtacaaaccataacttcctaacagaaggaaaatgacttttgtctaattcaaactttatgaaagtaaagaggtagttttaataaggaaggttataaagaaaagagatttttgtataagaaaagatctttcatggtaaattcttgtcctaaagtaaaataactggttgtttaaaaaagaaagatgtttaggacaggttataaagtccatgca

SEQ ID NO: 752197 - DNA, 624 bp, Homo sapiens
cctgttgggtaatatgagcaaatggcagctgctacctccaaaagaaaatattctcacccctttatattagttaagggaccaattattaatctctcactattcccttgtaatgcctaaatgccccacacccctttgggcaaaaatatatgtccatgatgggtgcctgattaatattcacccaacctctaaatttatctttccctctaatattgtttttcctgggaaaactacataaatctttaaccaataacttcaacctggacagtcctacttcaggagtttaaaaatagcccacatgtattcaaacaaaccctagcaagaaatctaaccaagtaatygcttgaggggggataacagtgtgtagataacctccttatctgttccctgttcaaaggacttgattggcaacatgtagtacaaaccataacttcctaacagaaggaaaatgacttttgtctaattcaaactttatgaaagtaaagaggtagttttaataaggaaggttataaagaaaagagatttttgtataagaaaagatctttcatggtaaattcttgtcctaaagtaaaataactggttgtttaaaaaagaaagatgtttaggacaggttataaagtccatgca

SEQ ID NO: 752198 - DNA, 624 bp, Homo sapiens
cctgttgggtaatatgagcaaatggcagctgctacctccaaaagaaaatattctcacccctttatattagttaagggaccaattattaatctctcactattcccttgtaatgcctaaatgccccacacccctttgggcaaaaatatatgtccatgatgggtgcctgattaatattcacccaacctctaaatttatctttccctctaatattgtttttcctgggaaaactacataaatctttaaccaataacttcaacctggacagtcctacttcaggagtttaaaaatagcccacatgtattcaaacaaaccctagcaagaaatctaaccaagtaattgcttgaggggggataacagtgtgtagataacctccttatctgytccctgttcaaaggacttgattggcaacatgtagtacaaaccataacttcctaacagaaggaaaatgacttttgtctaattcaaactttatgaaagtaaagaggtagttttaataaggaaggttataaagaaaagagatttttgtataagaaaagatctttcatggtaaattcttgtcctaaagtaaaataactggttgtttaaaaaagaaagatgtttaggacaggttataaagtccatgca

SEQ ID NO: 752199 - DNA, 537 bp, Homo sapiens
gtgcatgtgtgtgtttcctatcatttaattgttgagtatttcctttactttctgtcattacacaatgctccaagtttatcttctatagtttttaaaatgtcctaaaatccattatttcccaggtaaatctgctcctgtttattggataaaggtactaaaaaccagaccaagtttattggatctggtttctgggtgttcttattgttattgatgtatccttttttcaaggtcttctcagctagcagagcaataggggtatgcgtgtatgctagcccatgtgtgtamaaatatttatcaatctaaggttactcatttatcatctctatctatatgaagtaattattagttcatacttttgtttctaagtaatcaattacaacaatgataaatctagttatttttatttgcttgttctccagaagtaagaaacaaggctatcaacatctgacattcatttacttgtttattctagcacgcatttatactagtttcagaattgttagtccataccttatcaatcaaaatacacctgacatg

SEQ ID NO: 752200 - DNA, 565 bp, Homo sapiens
ttctggtggcttagctgggtagaagtggccaaggaactgtcacgatggtggttcaagactcctagaaacatctgggctgaaaaactgaaactgacccacagagagaaagagaattaaacatagaaatatagagtttagtcagtatttgagtttctcgttccagaagcacaactgtatacatttcctaagaaggatgcacgagccaacaaatttttattgccctaactgttttgagtttcacttctgtcacttccaaaagaatcttgactaaagcacaggggaggaagggsctttctacaattgagcaagggatttaaaggaggagctttgaatgcctacgtatcagttagggtactgttgggttgctgtttccagaaaacttgataaacaatggcccaaacaagtaatttgtcttacatgacaagaagtctggacaggcagaccaaggcaggtagattgaaagtctatgccctcaagactctagactctttccatctttctgccatccttagtgaagcttcctggatctccaggctcgtgtctatattgtaggttaaaaaacagg

SEQ ID NO: 752201 - DNA, 641 bp, Homo sapiens
acttattcaaggtcgtggctaatcagtggtaaagctagggtatgaaccttgactctgactctagcatctttcctctttaccagtaaactaatgtgcttctcagcaggcaatattttcatgtgctaatactggcaatcaacacataccatcttgaactagtaagtggtgtaagtggccattattaataatagaaataaaaaaacaaccagatatagaaatttgcaaattgtttctcctaacttttggtacttaatctctaattagaacaaaaatgcaagtatgtgtttttgttgtaaataaaaatgaacaattattacatatatacttgatatgcatttaatataaaaataatggttggcatttayggtgctcaacttataaggattctctgatgtaggtattatcctcattttataaatgacaatgttccaggctcaagtggaagtatgtgagtcaaaccctaagctatctagagccaaagtccattttccttccactgtacccacctgtgcacacacaaacactgtacttcccccgtacttatttgtgtatgcacatacatacacacacacacacctcccatgcagaatagaatctctctcactccacagcagtgggctttgtcaaggccccaacattct

SEQ ID NO: 752202 - DNA, 646 bp, Homo sapiens
agtcccacctgtaccaaatcaaggcacattagataaaatagtatcacaggtgagtggcaccttcatggcttgtagtcctcgggtcccatgaggtcctggaattcctggacatttgcagaatgtacagcagcaagtcctctctgcaatatttccctgggggaaaaaaagtaaagctgagggaatagcaattgtcagaaactttattccataagaattgtactcatacaaatcataatccaccatctacacrcccatcttcaccctttggatgaggggctgcagagaataagaggtgctttctgaatttaacactgcagagaaggtaccaggcactgcattggcaacatcgcctctccagaggaaatgatctctgtctatagacagggcatccagtatgtggatggccatggcccaactttgcctaagacttgttggtttctagttgacagtcttctgtttcctggaatttctgcagcacaaacagttgggggctttttaattcaattatgagttggttggttttttagttacttatgcattcatttagtgagatgacaaagaatgaaagaacatgcaaaaacaaaatactatgctatggtcttccacacttttttatatactaaggacaaagcacttaatttagtgg

SEQ ID NO: 752203 - DNA, 595 bp, Homo sapiens
cagaaatttgtatatttttaggcttcagcattgattcatttgagcaggaagagttgagcaactctagttcaaagaaatgattcacatactcaaatgtgcaaaaccctcattaacaaaccacaatgcccattcattttgcccttgttatgagtaggtctttccactgaaatcacttccattatgtgaatcctgtaactgctacttctacctttgaaaatatcctgagtgtttattattattgctgtctaacaaataaacactggcttggatgtcaagaatccagagaaaccaatatagacctagcgatttatatacaagcaagtaaaagatgtaaaagaaatgccaagctgggmgtggtggctcacgcctgtaatcccagcattttgggaggctgaggcgggtggatcatgaggtcaggagatcaaggccatcctggctaacatggtgaaaccccgtctctactaaaaatacaaaaaattagccaggcatggtggcacacgcctgtagtcccagctactcaggaggctgaggcaggagaattgcttgaacccaggaggcagagtttgcagtgagttgagattgcaccactgcactc

SEQ ID NO: 752204 - DNA, 595 bp, Homo sapiens
cagaaatttgtatatttttaggcttcagcattgattcatttgagcaggaagagttgagcaactctagttcaaagaaatgattcacatactcaaatgtgcaaaaccctcattaacaaaccacaatgcccattcattttgcccttgttatgagtaggtctttccactgaaatcacttccattatgtgaatcctgtaactgctacttctacctttgaaaatatcctgagtgtttattattattgctgtctaacaaataaacactggcttggatgtcaagaatccagagaaaccaatatagacctagcgatttatatacaagcaagtaaaagatgtaaaagaaatgccaagctgggagtggtggctcacgcctgyaatcccagcattttgggaggctgaggcgggtggatcatgaggtcaggagatcaaggccatcctggctaacatggtgaaaccccgtctctactaaaaatacaaaaaattagccaggcatggtggcacacgcctgtagtcccagctactcaggaggctgaggcaggagaattgcttgaacccaggaggcagagtttgcagtgagttgagattgcaccactgcactc

SEQ ID NO: 752205 - DNA, 571 bp, Homo sapiens
ttcttttgattgaggggtttggaaacattctttttgtggaatctgcaaagggatatttgggagtgctttgaggcctattgagaaaaaggaaatatcttcacataaaagtaggaagaagctttctgagaaactgctttgtgatgtgtgcattcacctcacagaggtaatcatttctgttcattgagcagtttggaaaatctgttcttytagaatctgcaaagggatatttttgattgctctgaggcctatggtgaaaaaggcaatatcttcacataaaaactagacagaagccttaaagtagttgtttccattgaaattcatatggatccgaaaaagagcctgcatttggaagtcaatcctaagccataaaaacaaagctgcaggcatcgtgctacctaacttcaaactatattacaaggctacagtcatcaaaacagcatggtggtggtaccaaaacagagatatagaccaatggaacagaacagagccttcagaaataatgtcacatatatacaactatctgatctttcacaaacctgacaaaaacaagcaatgggaaaggattgcctat

SEQ ID NO: 752206 - DNA, 571 bp, Homo sapiens
ttcttttgattgaggggtttggaaacattctttttgtggaatctgcaaagggatatttgggagtgctttgaggcctattgagaaaaaggaaatatcttcacataaaagtaggaagaagctttctgagaaactgctttgtgatgtgtgcattcacctcacagaggtaatcatttctgttcattgagcagtttggaaaatctgttcttctagaatctgcaaagggatatttttgattgctytgaggcctatggtgaaaaaggcaatatcttcacataaaaactagacagaagccttaaagtagttgtttccattgaaattcatatggatccgaaaaagagcctgcatttggaagtcaatcctaagccataaaaacaaagctgcaggcatcgtgctacctaacttcaaactatattacaaggctacagtcatcaaaacagcatggtggtggtaccaaaacagagatatagaccaatggaacagaacagagccttcagaaataatgtcacatatatacaactatctgatctttcacaaacctgacaaaaacaagcaatgggaaaggattgcctat

SEQ ID NO: 752207 - DNA, 526 bp, Homo sapiens
aaaaaggaaatatcttcacctaaaaagcagacagaatatttctgagaaacttctttttgacgtgtgcattcatctcacagagttgaaacttacttttggttgagcattttttaaacagtatttttgtagtatctgcacagggttatttctgagcggtttgaggtctatggtgaaaaaggaaataataccttcatatgaaaactagacagaagcttttgtagaaacttccttgtgatgtgggaattcatctcagagcgttgaaactttctattcattgagcagtttggaaagagtctttttgtagaatcagcaaagggatatttgagggagctttcaagygtatgctgaaaaaggagatatcttaacataaaaactagacaggcgctttctgagaaagttctttgtgatgcatgcattcatctcacacagttgaacctttcttttgattgagcagtttgcaaacactcttttggtagaatctgcaagtagatatttagagtgcttagctgcctagcatggaaaagga

SEQ ID NO: 752208 - DNA, 593 bp, Homo sapiens
gcaatctgaaagtggatagttggagctcttggaggcctatggtggaaagggaaatatcttcacataaaaactagacagaaacgttttcagaaactactttgtaatttgttctttccactcacagagctgaacctttcttttggtagagcagttttgaaacactctttttgttggacctgcaagtttgtagttggagcgatttgaggtcaatggtttaaaaggaaacatcttcatataaaaactagacagaaacattctcagaaacttctttatgatgtgtgcttgcaactcacagagttgaaattttctctccatagagcagttttgaaactctttttgtagaatctgcaagtggatatttgaagcactttgaagccggtygtgaaaaaggaaatatcttcatataaaaactggagagaagcattctccgaaacttctttgtgatatttgtattccactcacagagttgaagaattctttggatagagcagctttgaaactctatttgtagaaactgcaagtggatatttgcagctgtgtgtggcctatggtggaaaaggaaatatattcacataaaagctagacagaaacat

SEQ ID NO: 752209 - DNA, 593 bp, Homo sapiens
gcaatctgaaagtggatagttggagctcttggaggcctatggtggaaagggaaatatcttcacataaaaactagacagaaacgttttcagaaactactttgtaatttgttctttccactcacagagctgaacctttcttttggtagagcagttttgaaacactctttttgttggacctgcaagtttgtagttggagcgatttgaggtcaatggtttaaaaggaaacatcttcatataaaaactagacagaaacattctcagaaacttctttatgatgtgtgcttgcaactcacagagttgaaattttctctccatagagcagttttgaaactctttttgtagaatctgcaagtggatatttgaagcactttgaagccggttgtgaaaaaggaaatatcttcatataaaaactggagagaagcattctycgaaacttctttgtgatatttgtattccactcacagagttgaagaattctttggatagagcagctttgaaactctatttgtagaaactgcaagtggatatttgcagctgtgtgtggcctatggtggaaaaggaaatatattcacataaaagctagacagaaacat

SEQ ID NO: 752210 - DNA, 618 bp, Homo sapiens
tttacatgaagaaatcccgtttccaacgaaggccacaaacaggtccaaatatccacttgcatatactacaaaaacagtgtttcaaaactgctctatcaaagggaatgttgaaatctgcgagttaaatgcaaacatcacaaagaagtttctgagaacgtttctgtctactttttttgtgaagatacttcattttctaccgtagkcctctaagcccactgaatacacacttgcaaaatctacaaaaacagtgtttcaaaactgctctatcaaaaggaaggttcaattctgtgagttgagtgcagacgtcataaagaagtttctgagaatacttctgtctactttttatgtgaagatattaaagtttccaaagaaggcctcaaagcactccaaatattcacttgcagatttacaaacagagtgtttcaaaactgctctatcaaaagaaaggttaaaatctgtgagatgaacgcacacatcacaaactagtttctgagaatgattctgtttagtttttatatgaagagatttccttttctaatgtaggcctccaagccctgtcaatattaacttggacacactgcataaagagtgtatcaaaactgctcaattgaaaggaag

SEQ ID NO: 752211 - DNA, 525 bp, Homo sapiens
acaaacaagcaactgaaaattcttccgtcttgcattatatgaagcaatcccgtttccaacgatatcctccaagaggtccaaatatccacttgcagacattacaaacagagtgtttccaaactgctctatgaaaagaaaggttaaacaatgtgagttgaacgcacacatcacaaagtagtttctgagaataattctgtctagtttttatttgaagatatttccctttctactgttggaataaaatcgcttgaartctccacttgcaaattccgcaaaaagagtgtttcaaatctgctctgtctaaagggacgttccactctgtcagttgaatgcacacaacacaaagaatttactgagaatccttccgtgtagcattatatgaaaaaatcccgtttccagggaaggtctcaaagaggtacaaatatccacttgcagactttacaaacagtgtgtttccaaactgctctatgaaaagaaaggttaaactctgtgagttgaatgcacacatcacaaagtggtttctgt

SEQ ID NO: 752212 - DNA, 583 bp, Homo sapiens
cttgcaaattccacaaaaagagtgtttcaaatctgctctgtctaaagggacgttccactctgtcagttgaatacacacaacacaaagaagttaatgagaattcttctgtctagcattaaatgaagaaatcccgtttccaacgaatgcctcaaaactgtccatatrtccacttgcagattttacagtgtgtttctaaactgctctatgaaaagaaaggtaaactatgtgagttgaacgcacacatcacaaagaattttctgagaatgattctgtctggtttttatttgaagatatttccctttctactgttggcatcaaatggctagaaatctccacttggaaattccgcaaaaagagtgtttcaaatctgctctgtctaaagggacgttccactctgtgagttgaatgcacacaacacaaagaatttactgagaattcttccgtctagcattcaatgaagaaatcccgtttccaacgaaggcctcaaacaggtccatatatccaattgcagactttacaaacagtgtgtttccaaactcctctatgaaaagaaaggttaaactctgtgagttgaacgcacaca

SEQ ID NO: 752213 - DNA, 592 bp, Homo sapiens
tgagttgaacgcacacatcacaaagaattttctgaggatgattctgtctagtttttatttgaagatatttccctttctactgttggcatcaaatggctagcaatctccacttgcaaattccgcaaaatgagtgtttcaaatctgctctgtctaaatggacgttccactctgggagttgaatgcacacaacacaaagaatttgctgagaattcttccgtctagcattcaatgaagaaatcccgtttccaacgaaggcctcaaacaggtccatatttccacttgcagacyttacaaacagtgtgtttccaaactcctctatgaaaagaaaggttaaactctgtgagttgaacgcacacatcacaaagcactttctgagaatgattctgtctggttattatacgaagatatttccttttctgcaattgtcctcaaatcgcttgaaatctccacctgaaaatgccacagcaagagtgtttcaaatctgctctctctaaagcaaggttcaactctgtgagttgaatacacacaacacaaaaaagttcctgagaactcttcttagtctagcatgaaaggaagaaaccccgtttgcaac

SEQ ID NO: 752214 - DNA, 509 bp, Homo sapiens
ttattatacgaagatatttccttttctgcaattgtcctcaaatcgcttgaaatctccacctgaaaatgccacagcaagagtgtttcaaatctgctctctctaaagcaaggttcaactctgtgagttgaatacacacaamacaaaaaagttcctgagaactcttcttagtctagcatgaaaggaagaaaccccgtttgcaacgaagccctcaaagaggtccaaatatccacttgcagacataacaagcagagtgtttctaaactgctctaagaaaagaaaggttaaactctgtgagttgaaggcacacatcacaaagtagtttctgagaatgattctgtctagtttttatttgaagatatttccttttctactgttggcatcaaatcgcttgaaatctccacttgcaaattccacaaaaagagtgtttcaaatctgctctgtgtaaagggacgttccactctgtgagttgaatacacacagcacaaagaagttactgagaattcttctgt

SEQ ID NO: 752215 - DNA, 592 bp, Homo sapiens
aaagaaaggttaaactctgtgagttgaacgcacacatcacaaagcactttctgagaatgattctgtctggttattatacgaagatatttccttttctgcaattgtcctcaaatcgcttgaaatctccacctgaaaatgccacagcaagagtgtttcaaatctgctctctctaaagcaaggttcaactctgtgagttgaatacacacaacacaaaaaagttmctgagaactcttcttagtctagcatgaaaggaagaaaccccgtttgcaacgaagccctcaaagaggtccaaatatccacttgcagacataacaagcagagtgtttctaaactgctctaagaaaagaaaggttaaactctgtgagttgaaggcacacatcacaaagtagtttctgagaatgattctgtctagtttttatttgaagatatttccttttctactgttggcatcaaatcgcttgaaatctccacttgcaaattccacaaaaagagtgtttcaaatctgctctgtgtaaagggacgttccactctgtgagttgaatacacacagcacaaagaagttactgagaattcttctgtctagcatgaaatg

SEQ ID NO: 752216 - DNA, 566 bp, Homo sapiens
aactctgtgagttgaatacacacaacacaaaaaagttcctgagaactcttcttagtctagcatkaaaggaagaaaccccgtttgcaacgaagccctcaaagaggtccaaatatccacttgcagacataacaagcagagtgtttctaaactgctctaagaaaagaaaggttaaactctgtgagttgaaggcacacatcacaaagtagtttctgagaatgattctgtctagtttttatttgaagatatttccttttctactgttggcatcaaatcgcttgaaatctccacttgcaaattccacaaaaagagtgtttcaaatctgctctgtgtaaagggacgttccactctgtgagttgaatacacacagcacaaagaagttactgagaattcttctgtctagcatgaaatgaagaaatcccgtttccaacgaaggcctcaatgcggtccatatatccacttgcagactttacaaacagagtgtttccaaactgctctatgaaaagaaaggttaaactatgtgagttgaacgcacacatcacaaagaattttctgagaatgattctgtc

SEQ ID NO: 752217 - DNA, 578 bp, Homo sapiens
aactctgtgagttgaatacacacaacacaaaaaagttcctgagaactcttcttagtctagcatgaaaggaagaaaccccgtttgcaacgaagccctcaaagaggtccaaatatccacttgcagacataacaagcagagtgtttctaaactgctctaagaaaagaaaggttaaactctgtgagttgaaggcacacatcacaaagtagtttctgagaatgattctgtctagtttttatttgaagatatttccttttctactgttggcmtcaaatcgcttgaaatctccacttgcaaattccacaaaaagagtgtttcaaatctgctctgtgtaaagggacgttccactctgtgagttgaatacacacagcacaaagaagttactgagaattcttctgtctagcatgaaatgaagaaatcccgtttccaacgaaggcctcaatgcggtccatatatccacttgcagactttacaaacagagtgtttccaaactgctctatgaaaagaaaggttaaactatgtgagttgaacgcacacatcacaaagaattttctgagaatgattctgtctggtttttattt

SEQ ID NO: 752218 - DNA, 501 bp, Homo sapiens
taaactgctctaagaaaagaaaggttaaactctgtgagttgaaggcacacatcacaaagtagtttctgagaatgattctgtctagtttttatttgaagatatttccttttctactgttggcatcaaatcgcttgaaatctccacttgcaaattccacaaaaagagtgtttcaaatctgctctgtgtaaagggacgttccactctgtgagttgaatacacacagcacaaagaagttactgagaattcttctgtctagcatgaaatgaagaaatcccgtttccaacgaaggcctcaawgcggtccatatatccacttgcagactttacaaacagagtgtttccaaactgctctatgaaaagaaaggttaaactatgtgagttgaacgcacacatcacaaagaattttctgagaatgattctgtctggtttttatttgaagatatttccctttctactgttggcatcaaatggctagaaatctccacttgcaaattccgcaaaa

SEQ ID NO: 752219 - DNA, 582 bp, Homo sapiens
catgaaaggaagaaaccccgtttgcaacgaagccctcaaagaggtccaaatatccacttgcagacataacaagcagagtgtttctaaactgctctaagaaaagaaaggttaaactctgtgagttgaaggcacacatcacaaagtagtttctgagaatgattctgtctagtttttatttgaagatatttccttttctactgttggcatcaaatcgcttgaaatctccacttgcaaattccacaaaaagagtgtttcaaatctgctctgtgtaaagggacgttccactctgtgagttgaatacacacagcacaaagaagttactgagaattcttctgtctagcatgaaatgaagaaatcccgtttccaacgaaggcctcaatgcggtccawatatccacttgcagactttacaaacagagtgtttccaaactgctctatgaaaagaaaggttaaactatgtgagttgaacgcacacatcacaaagaattttctgagaatgattctgtctggtttttatttgaagatatttccctttctactgttggcatcaaatggctagaaatctccacttgcaaattccgca

SEQ ID NO: 752220 - DNA, 519 bp, Homo sapiens
gcagagtgtttctaaactgctctaagaaaagaaaggttaaactctgtgagttgaaggcacacatcacaaagtagtttctgagaatgattctgtctagtttttatttgaagatatttccttttctactgttggcatcaaatcgcttgaaatctccacttgcaaattccacaaaaagagtgtttcaaatctgctctgtgtaaagggacgttccactctgtgagttgaatacacacagcacaaagaagttactgagaattcttctgtctagcatgaaatgaagaaatcccgtttccaacgaaggcctcaatgcggtccatakatccacttgcagactttacaaacagagtgtttccaaactgctctatgaaaagaaaggttaaactatgtgagttgaacgcacacatcacaaagaattttctgagaatgattctgtctggtttttatttgaagatatttccctttctactgttggcatcaaatggctagaaatctccacttgcaaattccgcaaaaacagtg

SEQ ID NO: 752221 - DNA, 508 bp, Homo sapiens
ttgcagacataacaagcagagtgtttctaaactgctctaagaaaagaaaggttaaactctgtgagttgaaggcacacatcacaaagtagtttctgagaatgattctgtctagtttttatttgaagatatttccttttctactgttggcatcaaatcgcttgaaatctccacttgcaaattccacaaaaagagtgtttcaaatctgctctgtgtaaagggacgttccactctgtgagttgaatacacacagcacaaagaagttactgagaattcttctgtctagcatgaaatgaagaaatcccgtttccaacgaaggcctcaatgcggtccatatatccacttgcagacttwacaaacagagtgtttccaaactgctctatgaaaagaaaggttaaactatgtgagttgaacgcacacatcacaaagaattttctgagaatgattctgtctggtttttatttgaagatatttccctttctactgttggcatcaaatggctagaaatctc

SEQ ID NO: 752222 - DNA, 525 bp, Homo sapiens
ctttaattgatcagtttggaaacaatgtttttgtataatttgtgaagggatattttggagtgcattgaaacctgaggtgaaaaaggaaatgtcttcagataaaaactagaaagaatctttttgagaaactgctttgtgatgtgtgcattcatctcayagagttaaacctatcttttgattgatcagtttggaaacactgtttttgtagaatctgtgaagagatatttgggagtgcatgaatcctatggtgaaaaaggaaaatcttcagataaaaactagaaagaactttttgagaaactgctgtgagatgtgtgcattcaactcacagatttaaaccagttttttgattgagcagcttgaaaacactgattttgtagaaactgtaatggaatattgggagtgcattgaagcctatggtgataaaggaaatatcttcagataaacatttgaaagaagctttttgagaaactgctttgtgatgtgtgcaatcgtcttacagcattaaacttttttttagactgaata

SEQ ID NO: 752223 - DNA, 525 bp, Homo sapiens
ctttaattgatcagtttggaaacaatgtttttgtataatttgtgaagggatattttggagtgcattgaaacctgaggtgaaaaaggaaatgtcttcagataaaaactagaaagaatctttttgagaaactgctttgtgatgtgtgcattcatctcatagagttaaacctatcttttgattgatcagtttggaaacactgtttttgtagaatctgtgaagagatatttrggagtgcatgaatcctatggtgaaaaaggaaaatcttcagataaaaactagaaagaactttttgagaaactgctgtgagatgtgtgcattcaactcacagatttaaaccagttttttgattgagcagcttgaaaacactgattttgtagaaactgtaatggaatattgggagtgcattgaagcctatggtgataaaggaaatatcttcagataaacatttgaaagaagctttttgagaaactgctttgtgatgtgtgcaatcgtcttacagcattaaacttttttttagactgaata

SEQ ID NO: 752224 - DNA, 511 bp, Homo sapiens
tattcatctcacagacttaaaccttcctttttgattgaggaatttggaaacactgattcagataatctgcaaaggtatatttggaagcacactgaggcctatggtgaaaaaggaactattttcggataaaaactagaaagaaactttctgagaaactgtttaatgatgtgtgcgttccattcacagagttaaaagtgtttttttgagccgtttggaaacaaagtttttagagaatctgcartgggatatttgggagcacattgaaacctatgatgaaaaaggaaatatattcggataaaaactagaaagaagctttttgagaaactgatttgtgatgtttgcagtcatcacacagagttaaacctttcttttgactgagcagtttggaaacactgtttttgtataatctgcaaagtgataataggtagtgcatagagacttatggtgaaagagttaatatcttcagaaaagaactggaaagaagctttctgtagcactgatttgtgatgtt

SEQ ID NO: 752225 - DNA, 533 bp, Homo sapiens
tcttttgactgagcagtttggaaacactgtttttgtataatctgcaaagtgataataggtagtgcatagagacttatggtgaaagagttaatatcttcagaaaagaactggaaagaagctttctgtagcactgatttgtgatgtttgcattcattttacagtgttaaaaatttcctttgatggagctgtttggaaacacccttttggcagaatctgtgaagggttatttgggagtgcattgaggcctatggtggaaaatgaaatattttcagggaagaactaaacagaacctatctgaaaaactgctttgtgatgtgcatgttcaactcacagagttaaacctgtttatgattggacastttggaaacactgctttctagaatctgtgaagggatatttgggagtgccttgaggtctatggtgcaaaaggaaatatcttcagagacaaaataaatggaagctttctgataaaatactttgtgatgtgcacatttatctcacagagtaacgtttcttttgattgagcagtttgg

SEQ ID NO: 752226 - DNA, 659 bp, Homo sapiens
tttgaaaaggctgtttctgtagaatctgaaaagggatatgggtgagcccaatgtggcctttagtggaaaagattatatcttcagatacaaactagaagaaatctttcagagaaactgctttatgacgtgtgcattcatctcacagagttaaagctttcttttgattgmgcagtttggaaagactgtttttgtagaatctgcaaagggatatttgggagccctttgacccttttggtcaaaaaggaaatatcttcatataaaaactagaaagaagctttctgagaaactcctttgtggtgttaacattcatctcacagagttaaacctttcttttgattgagaagtttggaaacactcaattttgaagaatatgtaatgggattttcaggagtgccttcaggcctatggtaaaaaggaaatatcttgacataaaaactacaaagaaagattcagagacactgctttgagatgtattcattcatctcacagagttacacatttcttttaattgagcagtttggaaacactgtttctgaagaatctgtgaagtaatattaagaaacgctttaagtccccctgtaaaaaaggacatatcttcagatacaaacttgaaagaaggtttctgagaaactgctttctgaagtgtgcatttgtcaaag

SEQ ID NO: 752227 - DNA, 624 bp, Homo sapiens
ggaaagccttgaggcctgtggtgataaaggaaatatcttcagataaaaactagaaagcatctttctcagatacttctttgtgaattgtgcattcatctcacagagttaaacctttcttttgattaggcagtttggaaccactgtttttgtagaatccctgaagagatattctggagcactttgargccaatggtgaaaaaggaaatatcttcagataaaaactacaaagtaactttctcagaaactgctttgtgaattgtgtcttcacctcacagagttaaacttttcttttattggtgcaatttggaaactctgtttttgtagaatctatgaactgatatttgggagcccattgaggcctatggtgaaaagggaaatatcttcagataaaaactagaaagggactttctgagaaactgctttgtgatgtgtacattcatgtcattgagttaaaacctttcttttgatagagcagtttgcaaacactgcttttgtagaatctgtgaaggtatatttgggaaggccttgaggcctatggtgataaaggaaatatcttcagatactaactagaaaggacttcctgagaaactgctttgtgatgtgtactttcatctcatagagcta

SEQ ID NO: 752228 - DNA, 625 bp, Homo sapiens
gacagagcactttgcaagcactgctaatgtaggatctgtgaaggtatatttgggaaagccttgaggccaatggtggtatcagaaatatattaagatacaaactagaaagaaactttctgaaaaactaatttcagatgtgtccattcatctcacagagttaaacctttctttggattcagcagtttgttaaaactggttttgtccattctgcaaatggacatttgggagctcactgtggccaatgaggaaaaagtgaatatcccatgatgaaaactagaaggaagatgtcagagaaagtgccttgtgatgtgtsaattcatcccacagtgttaaatctttcttttgattcagcagtttggaaacacagttttcttagaatctgtgaagagatatttgttagcacattgaggcttatggtgaaaagggaaacatcttcagataaaaactagtaagaagatttctgaaaactgctttctgatgtgtgctttcatctcacagagttagacctttccttggagtcagcagtttgttaacaccgtttttgtccattctgcaaatggacatttgagagctcagtgaggccaaaggcaaaaacgtgaatatctcataatgaaaactagaagga

SEQ ID NO: 752229 - DNA, 651 bp, Homo sapiens
ttcaaagaaaaactaaaaagaaacttaatgagaaactgctttgtgatgtgttgaatcatctcacagagttcagcctatcttttgcttcagcagtttgtgaacagttcttttagaatctgcaaagaataaatcatgccatgttgaggcctatgctgataaagaaaatatcttcagataaaaactagaaagaacctttctgagaaactgctttgtgatatgtacattcatctcacagagctcaacctttcttttgattcagcagtttggaaacagttttcttagaatctgcaaagggatatttgttgccacattgaggcctatggtgaaaaaggaaatatcttcagataagaactagaaagaactattctgagaatatgcttcatgatgtgtgcattcatctcacagaaataaaactttctttggattcagcagttggttaacaccgttttttttccattctgtgaatggacatttgggacatcattgaggtcaatgacaaaaacgtgaatawcccataatgaaaacaagaaggaagatgtctgagaaaacgctttatggtgtgtgcattcatctcacagtgttaaacctttgtttttcattcagtagtttggaaacactgtttttggagaatctatgcaggattacttggca

SEQ ID NO: 752230 - DNA, 509 bp, Homo sapiens
aaactgatttgtgatttgctgaatcatctcacagttaaacttatcttttgattctgcagtttggaaacacagttttcttagaagctgctaagagatatttggtgccacattgagtcccacggtgaaaaagaaaacatctttagataaaaactagaaagagcttaatgcttaatgagaaactgctttgtgatgtgagctttcatctcacagagttaaacattttttamattcaggtgtttgggaacacagtttccttagattctgcaagcagatatttggtagcgcaatgaggcttattgtgaaaaaggaaatatcttcttacaaaaactggaaagaatcttcctgagaggctgctttgtggtgtgtgctttcatctgacagagttaaacctttcttgatattcagcattttggtaacactgtttttgtccattgtgtgaatggacgtttgggagttcattgaggtgataggcaaaaaagtgaatatcccaggataactttgaggaagag

SEQ ID NO: 752231 - DNA, 611 bp, Homo sapiens
tttggaaacacagtgtttgaagtatctgtgaagggatatttggattcgccatgaggactatggggaaaaaggaaatatcttctgatacaaactagacagaagctttctgggagagtggtttgggatgtgtgcattgaactcacagttaaacatttcttttaattgagcagtttggaaactctgttcttctagaattgacaaaggaatatttgggagtgcattgaggtgtatggtgaaaaaggaaatattttctgatagaaactagaaagaaagtttytgagaaactgctttgtgatgtgtgtgttcatctcaccgagttgaaccattcttttgattgagcagtttgcaaacacagtgtttgtagaatctgcaaagggatatttggattctcatggcaggctgtggtgtaaaaggaaatatcttctgatacaaactagacagaagctttctgagagactgctttgtgatgtgtgcattcatctcacagagttgaaccattcttttgatggagcagtttggaaccactgtttttgtagaatctgcaaagtgataattgggaaccctttgagtcttatggtgaaaaaggaaatatcttcacatgaaaactagaa

SEQ ID NO: 752232 - DNA, 613 bp, Homo sapiens
gagaaactgctttgtgatgtctgcattcatctccagagtggaaccattcttttgattgagcagtttggaaacacagtgtttgtggaatctgtgaagggatatttggattcgcattgaagcctatggtgaaaaaggaaatatcttcacataaaaactcaaaggaagctttctgagaaactgcttcatgatgtgtgcattcctctcagagacttgaaccattcttttgattgagtagtttagaaggactctttttctagaatctgcaaagggatatttgtgagcacttggacgtctatggaggaaaaggaaatattctcacataaaaagtagaaaggagttttcttagasactgctttgtgatctgttcgttcatctcacagagttaaacctatcttttgattgagcagtttggaaacacagcgtttgaagaatctgagaagggatattttgattcaccttgaagcctatggggaaaaatgaaatatcttctgatacaaactgaaggggtggcctgcccctccacacttgtgggtatttctagtcgggtgggacaagagactgagaaaagaaataagacacagggacaaagtatagagaaacaacagtgggctca

SEQ ID NO: 752233 - DNA, 627 bp, Homo sapiens
agaatctgtgaagggatatttggattcacattgaggtttacagggaaaaaggaaatatcttctgatacaaagtagacagaagctttctgagggactgctttgagatgtgtgtatttatctcacagagttgaacctttcttttgattgagcagtttggaaacagtctttttgtagaatctgcaatgggaagtttgtgagcggtttgaggcttatggtgaaaaaggaaatatcttcacataaaaactagacagaagctttctgagagactgctttgtgatgtgtgcattcatctcacagagttaaacatttcttttcattgagcagtttggaaactctgttcttctagagtctgcaaagggatatttgggagtrcattgaggcccatagtgaaaaaggaaatttctctaatacaaacaagaaagagagattttgagaaattactttgtaatgtgtgcattcatctcaaagaatttaaccattcttttgatggagcagtttggaaacacagtgtttgtagaatctgcaaagggatatttggattcgcatggaagcctgtggagaaaaaggaaatatcttctaacaccaactagacagaagctttctgtgagactgctttgtgatgtatgc

SEQ ID NO: 752234 - DNA, 640 bp, Homo sapiens
tgaaacatacctttgaatgagcagtttggaaacagtctttttgaagaatctgaaaagggatatttgggagtgcttggaggcctattgtgaaaaaaggaaatatcttcacataaaaactagaaagaagctttctgagaaacagctttgtgatgtgtgcattcatctcatagaggtaaacgtttcctttcatcgagcagcttggaatctctgttcttctagaactgcaaagagatatttgagagttctttgaggcctatggtgaaaaaggaaacatcttcacataaaaactggacagaagctctttgagaaacatctttgtgatgtgtgcaatcatctctcagagttgaactattcttttgattgagtagttgggtaaatgtctttttgtagaatctgcaaagggatatttgggaacactttgaggaatatggtgaaaaaasaaatatcttcacataaatactagaaaaacgctttctgataaactgctttgggatgtgtgcattcatctcatagaggtaaacctttcttttcattgagcagtttggaaactctgttctttgaggatctccacagggatatttttgagtgctttgaggcctatggtgaaaaaggaaataacttcacataaaaactagacaga

SEQ ID NO: 752235 - DNA, 605 bp, Homo sapiens
aatcttcaaagggatatttgtgagcgctcttgggcttattttgaaaaaggaaatatcttcacataattactagacagaagctttctgacaagcttctttctgatgtgtgcatacgtttctcagagttgaaccattgttttgattgagcagtttggaaacagtctttttgtataatctataaagggatatttggaagtgcattgagacctatggtgaaraaggaaatatcttcacattaaaactggaaagaagatttctgagaaactgctttgtgatgtgtgtattcatctaagagagttaaacgtttcttctcatcaagcagtttggaaactctgctcttctggaatctgtagtaagatatttgtgagtgctttgaggcctatgctgaaaaatgaaatgtcttcacataaaaactagacagaagctttctgagaaacttctttgtgatgggtgcattcatcttacagatttgaatccctcttttgatagagcagtttggaggcaggcattttgtagaatctgcaaagtgatatttgggagtatttttaggcttattgtgaaaaaagaaatatcttctcataaaaactagaaagaagctttctgag

SEQ ID NO: 752236 - DNA, 605 bp, Homo sapiens
aatcttcaaagggatatttgtgagcgctcttgggcttattttgaaaaaggaaatatcttcacataattactagacagaagctttctgacaagcttctttctgatgtgtgcatacgtttctcagagttgaaccattgttttgattgagcagtttggaaacagtctttttgtataatctataaagggatatttggaagtgcattgagacctatggtgaagaaggaaatatcttcacattaaaactggaaagaagatttctgaraaactgctttgtgatgtgtgtattcatctaagagagttaaacgtttcttctcatcaagcagtttggaaactctgctcttctggaatctgtagtaagatatttgtgagtgctttgaggcctatgctgaaaaatgaaatgtcttcacataaaaactagacagaagctttctgagaaacttctttgtgatgggtgcattcatcttacagatttgaatccctcttttgatagagcagtttggaggcaggcattttgtagaatctgcaaagtgatatttgggagtatttttaggcttattgtgaaaaaagaaatatcttctcataaaaactagaaagaagctttctgag

SEQ ID NO: 752237 - DNA, 584 bp, Homo sapiens
attatacattctgattatattatgccacagtgaagtactttttgtaatgtattttcatggggattacttataatgtatatctggatttctaactcccttgctaaactggggacgttttcatcaattattgccttaaataggctttctaaacttttttatctcccctctttggaataytgataatacataagtttagttgctttaggtagtccataatgtctcaaagtctgtgattcttcttttttcttctatttttctttttctttttatctgcctggattattttaaaagattggtcgtcgagttctgagattctttcttctgctaggtctagtcgattactgaagcttcaaatgtattttgtatttccttcaatatatttttcagttctagaatttcttttttttttccccagcatagctatacccctggcaaatttctcattaataccctaagttgatttttctgattttataaatttgttttaacttatctcgcctttcattgagcttctttaaaatccatgttttgaatcatttatctggcatttcaaggatttgttttgtgttgagatctgttgctga

SEQ ID NO: 752238 - DNA, 591 bp, Homo sapiens
atacattctgattatattatgccacagtgaagtactttttgtaatgtattttcatggggattacttataatgtatatctggatttctaactcccttgctaaactggggacgttttcatcaattattgccttaaataggctttctaaacttttttatctcccctctttggaatactgataatacataagtttagttgctttaggtagtccataatgtctcaaagtctgtgattcttcttttttcttctatttttctttttctttttatctgcctggattattttaaaagattggtcgtcgagttctgagattctttcttctgctaggtctagtcgattactgaagcttcaaatgtattttgtatttccttcaatatatttttcagttctagaatttcttttttttttccccagcatagctatacccctggcaaatttmtcattaataccctaagttgatttttctgattttataaatttgttttaacttatctcgcctttcattgagcttctttaaaatccatgttttgaatcatttatctggcatttcaaggatttgttttgtgttgagatctgttgctgaacaaatgtca

SEQ ID NO: 752239 - DNA, 641 bp, Homo sapiens
tggaatactgataatacataagtttagttgctttaggtagtccataatgtctcaaagtctgtgattcttcttttttcttctatttttctttttctttttatctgcctggattattttaaaagattggtcgtcgagttctgagattctttcttctgctaggtctagtcgattactgaagcttcaaatgtattttgtatttccttcaatatatttttcagttctagaatttcttttttttttccccagcatagctatacccctggcaaatttctcattaataccctaagttgatttttctgattttataaatttgttttaamttatctcgcctttcattgagcttctttaaaatccatgttttgaatcatttatctggcatttcaaggatttgttttgtgttgagatctgttgctgaacaaatgtcatggtctcttggtggtgaagtattttctctttttttcatgttttctattatatgtttttatattgatacctgcatatctggtgtaacagtcacttcttccaattttttgaaattgctttcatacgggaagattttttttcctgaatcgtacatatatttttggttgagtaagacactttagctttgattttggttgcctatggtagtgtgatctcta

SEQ ID NO: 752240 - DNA, 663 bp, Homo sapiens
cataaataagtatatctctctaaattaaaaaaataaaacttttgtaacatttctattcgtaacagctttaggaaaaatatatagtcaattctcactatttctatacaatcctcttgaacactgaattagtgaacatttactattgttcctcctaggaggaaaacagatagatctatatctaatctatatctacctatatacatcagatacgtaatatgctataattttaaattttaaaaacatcttatcctagtagattttatttgctttattttacaaatgagaaaagaagattcatgattattaagtgatttgcctgaaaccaccccacttaccgatgccaatgctggaattcaagccttatacacctgtcaccagagctgaggcttcttacattgcattgcattgtccccaccctatctatgctctggccatctctgtatgaaagctgaaacaagaagagagagcataactctgttcaacttcagctggatgtatacatgtcggctgactraaagttttttgccactttgcacatgtcctcaaattgtctcaaaagcaccatgagtattgatttgaaagttaaaaatgaattttaccaagtaggtgaattcacaaatacaaaaactgcagataatgaggattaagtgtacttaaaaataa

SEQ ID NO: 752241 - DNA, 556 bp, Homo sapiens
cacatggtcccatgaaaagttaaccagaaaagccagtgtgcagtttgtacacactggctgtataacaggagattgctctattagtattccattgaattctcacaagaaattgtttcagataaaagtaacagaaaatkgacagaagtccaaataagctagagattttaagcacagagaaatatcaggattcaagtctctgagataaagatacctcaaccatggggacaactaactatgatcagaacaagaccagcaacagacccagaatatgagctcctaacataaggtgtctcagaatctctaaacctatggtttaaaattatgtcagaggcagggaggaggaggtcagtgagtttactcatgaatagaggagagaagcctggtaggcaggaacacctccacatcatccatactctgatgagataaatgcactggcattgtataagcacacattacagaaaaggccagttattttgtggctatgccattcttgacttctgatgtaacacaatataaccctatagctccaccacattaaaaactttacgctatttca

SEQ ID NO: 752242 - DNA, 571 bp, Homo sapiens
tgatcttttttaatggtctgatgatttgtctttgctctctttccccaagggaaaaagtttctgttcacttgctccttaatgatagcactttgcatttgtttaatgttactcagtttctcttggtagtgtaccccacagtaacagagacctcaatgaatktaagaatccagtttccactgagcttgctatagttcatatttctttctgctttttctatattggcatgctgacatttggagaagcgtcagtttgcttctcccaacgccctttattcacacagataactccatttccagtgtaacccctcttattcctagtcttggtattttgcccttattctttaatcaaactactgatatctggaattttattgtctttccacattattagttatttattgctgtgtaacagattaccccaaattttataacaaattaaaaaaaacattatctcatagtttttgtaggttgggaaccaagacactgggttgacgtctctcacgaggttgcagttaagctattgggctgctattatctgaagggctccaggatccattcccagttctctcatg

SEQ ID NO: 752243 - DNA, 571 bp, Homo sapiens
tgatcttttttaatggtctgatgatttgtctttgctctctttccccaagggaaaaagtttctgttcacttgctccttaatgatagcactttgcatttgtttaatgttactcagtttctcttggtagtgtaccccacagtaacagagacctcaatgaatttaagaatccagtttccactgagcttgctatagttcatatttctttctgctttttctatattggcatgctgacatttggagaagcgtcagtttgcttctcccaacgccctttattcacacagataactccatttccagtgtaacccctcttattcctagtcttggtattttgcccttattctttaatcaaactactgatatctggaattttattgtctttccacattattagttatttattgctktgtaacagattaccccaaattttataacaaattaaaaaaaacattatctcatagtttttgtaggttgggaaccaagacactgggttgacgtctctcacgaggttgcagttaagctattgggctgctattatctgaagggctccaggatccattcccagttctctcatg

SEQ ID NO: 752244 - DNA, 571 bp, Homo sapiens
tgatcttttttaatggtctgatgatttgtctttgctctctttccccaagggaaaaagtttctgttcacttgctccttaatgatagcactttgcatttgtttaatgttactcagtttctcttggtagtgtaccccacagtaacagagacctcaatgaatttaagaatccagtttccactgagcttgctatagttcatatttctttctgctttttctatattggcatgctgacatttggagaagcgtcagtttgcttctcccaacgccctttattcacacagataactccatttccagtgtaacccctcttattcctagtcttggtattttgcccttattctttaatcaaactactgatatctggaattttattgtctttccacattattagttatttattgctgtgtaacagattaccccaaatttkataacaaattaaaaaaaacattatctcatagtttttgtaggttgggaaccaagacactgggttgacgtctctcacgaggttgcagttaagctattgggctgctattatctgaagggctccaggatccattcccagttctctcatg

SEQ ID NO: 752245 - DNA, 537 bp, Homo sapiens
gcagggcagggagaaaggcacagaagtctactgaggctcccagctgcaggtcccatgctgggaacaccctatgctagactttgcaaggacacacagtgcctgggcttcaaggggcaggacagatggccctctgtatctaagagacctcatcaatagccctctgtcctctctccttgccccaccctcttccctgcagcagcccaggggaccctcaggcaggagggacctggagaacrgaggcctccatttcccaccccaacccatgtgaggcagagatgtccactctctctccccagggactctagaatattcattgttctttttttttctagagaccccactgtttggaacaaacaagctgggagaaggcagttactaaatactaactcgtatttagtaacaattaaatcatttcctttttaaagagtattactcaaaggctcacattattgtaactgtctagacctccccgttgctctaagaccatccgtgttaccactgggtcagcacagctccaacccagtgtgaggtgcatgc

SEQ ID NO: 752246 - DNA, 582 bp, Homo sapiens
ttaaatatatgaaaaaatacccaacttaattcatataaaatgcatattaaaatgaacatttctcaattataagactggcaaaactcaatagcttgaaaatacatccttttggcaaagacgtgggaaaacaggcagcttcagacactgctggaggtaaacgtgacaatacttaccaaaaccacataggcatttaccatccgacccaggaacagcctatctaggaattaaacttgaagatacactcctcccsctacatgtaatacagtatatgcacaagtcttccatgtgaatacataggagactggctgaataaactacggtccatctatacaatggagaagcacatagcagttaaaaaaaaaagatatcgatgaataaatacatacggagtgatttctaaatatgtaatttaagtaagaaaagcacaatgcaaatgagtgtaagaaataaggggaaataatgtgggtatgcatgggcttattttcccaaaaagaaacatcaggaaaacaattcccataaaattataatcatcgaggctgggcgcagtggctcacgcctgtaatcccagcactttgggaggct

SEQ ID NO: 752247 - DNA, 559 bp, Homo sapiens
accctgggtgttggatttgaattaaggcattgtgattaactcattttacacacacatacacacacacacacagacgttaaatcagtgacgccccaatagcaatgagcaaatgtgatgcgcagttcttgtgttctaatgtcatttcccatcaatgarccaagcctcattgaggacatggccggttccaaggaagggctggccaaacacaggataagccaggacacgctggtgtcccagaaagtaaagaagcacttgaggattgtgatgtcatgtcaagaaaacctcaggaagcatcttggaggagctcccactggaataatttgtgcatcaaaaagtaaaataatggaggtgaactaaacacattgaattttttttttaacacattgaatttttaagaaacaccatgcaccatagagacaagagagcaagagtaagacagagagagactgaagctcttctttactgaagaatgccagctaattcatggtggaattagcaaatcaccgttttgtagccttctatgtacctatatcacccatggatccttaaaatcatgggg

SEQ ID NO: 752248 - DNA, 585 bp, Homo sapiens
ggttaacatcctgggatatggaaacagtatttttatggatggagaaaaagtgtgacttaccaacaataaatctgagatgactgtaattccttcttcatgtcgatagacttcctccttcgagttttcttgctcagagacttcccagactctggatatgagaccgatgagctcaagcctcactcctttgtcaatcacaaatggccccgagaactggccttgagcaaggagtgcccgggtgtacttgaggatgagaaccgcactcataaagcctagctgcatgaacagaaaagatgtaaataaaatgcctggccttgagcaaggagtgcccgggtgtatttgaggatgagaacygcactcataaagcttagctgcatgaacagaaaagatgtaaataaagtgcctcatggcatatgatgcatatattcttgcctttttcattattataaggaattaaaatgactgaactacgggctaagagaactggatttaagtccaggtttggtctctaggtgactattggccagcttcctaagtagcaagctgctttttgatattcggcctcttgaccaaaggaaaacaaatggt

SEQ ID NO: 752249 - DNA, 652 bp, Homo sapiens
ttataatagctgtttcaaagtccttgctaattccaacatctgagtctcctcataggcagtttctattgcctgcttatttttctcatgtttgggtcacacttaatgtttctttggatgtctcataatttttcattgataactggacattttagataatatattgcagccactctgggtattggcctacctccttttcctggcttgttgtcgttgtttttgtttgtttggtcattggtttatatgtttattagtttggcaagaygaattctgtaaagtatatttcccctcgttgtgcagccagtgatgtttctgctcagatttatttgttctttttatctttaacttggcttcctagggtcttagtctccataaatcacttattggtcaagggtgaacttaagcatcgtgtatagagcccatgatgcattttctaatcaattagaacatgatttctaattaatttacttcttgcaatgacccactgcggtgtgtccagatgaaaatttctattttatacatttggaaactgaggatcatttttctcttaaacaatactcttgtgctcatacagcaaataaattgcagaacaagggctgaaactggcctttgacctcatgtataggcctcttttcacaatactgtgttatctttt

SEQ ID NO: 752250 - DNA, 592 bp, Homo sapiens
agagaatagattaaaatgatagtatgaactacagtagtggtggtgtagatgaagacaatttgcgtcctcccaggaggtagatgtatcggaacctgctgctgggcaggggatgaagggggttagacgtccaggattagttctaaactcttagcatccatcaatctacctctccatttgcacaactatttcctctaccagacagaccctcccaaaatttctctgggcaacttacaatgagtcaatgaatatggtttccttcgttctcrgatccacacaattgatactacagggccacctaactcattctgttgctcactgaaagtctgttttacaggaatatattagtctattctcatgctgctataaagaactgccccaaactgggtaatttataaaggaaataggtttaattgactcacagttcagcatagtaggggaggcctcaggaaacttacaatcatggcagaaggcacctcttcacagggcagcaggagaatgacagagctgagcgaagggagaagccccttataaaagcatcagatcttgtgagatcacaagaatagtatgagggaaactgcccccatgattcaat

SEQ ID NO: 752251 - DNA, 610 bp, Homo sapiens
aagctgcaccagacacttctctggggccctgggttctgtccgctgaagcacagctcctcaatatttctgtcttggggagtgatgtgttcaggccgccattctggccgacgtcatcgcccctcatccagcatttcctccagtgaccttgaagttttcatagccacagtggctgggacatctgtcttacagaaagactgttcttgtctttgcagcwatcaaaagtagtatcttccagtccataaagcaagggctgccaatccgtaacatagacggtggcttagttgtctctccacccgcaatggagctcaaaggtgtgcagcagtccccgcggccccactcctcaaattcctccgggccacgtggggacagacggtgctgaaaagtgaagggtggatttgtagaggaaacacagccctcaggttcaccaaacatcattcaatctctccttctttcccccagaccaagctgtctctgcaaagaaaatccaccccccaggctgatggatgccctgtctggtccccagaaatcccttcgggcttccgtttctccacattcccagtgccctcctcctcttgcctctctccttggggtgcatttcgctaataaccca

SEQ ID NO: 752252 - DNA, 529 bp, Homo sapiens
ccaccacgcccggctaattttttgtatttttagtagagatgggttttcaccgtgttggccgggatcatttcgatctcctgacctcgtgatccgcacgcctcagcctcccaaagtgctgggattacaggcgtgagccaccgcgcccggccaacaaatggtacttctagataccgttttatatggttctggccctccccrgtgaagttttatttaaagaaaaaagaattatcttggagagatacattcatggggtttaaaaaaaaatagaaaaaaaaagcacacagcgaaaaacgtctttatatcccagaggcaacttttcttgctagtttcttacatgcatagagttatgtgattatataacccttctcttatttacacttgctgttttcacatagtgccaatcattccatattagcatatatagattttatttctttaacatccacagagtaccccaaagtatgtactatggacataccaacatttatttgacaactcttctattagtagatgtttgcatccccctttt

SEQ ID NO: 752253 - DNA, 608 bp, Homo sapiens
aaaatagacctaatttttggagaactggtgcatacctgaggaaaggcctattaggacagaggagagttcttttcagaatggttgagtcggaaggcctgtgacaacatcactggagccagggttcattaccctcatctcttgttcccccagcacctgacatggccagtcacagcaatcccattgcccctcaccctaggccaggtagccatcacctttttcccggacgcctacaatccccagttccgcttttacctcttccatccactttccacacccagccagactccgctgatccccggctttcagggctttccattggaacaaagctcaaaatcctttcagggccccacatgatcgggcctctagccacctcctaatctttttatcttttttttttttgacagggtrtcgctccagttgtccaggctggagtgcagtgatgagatctcagccagcctcaggtgatcctcccacctcagcctcctgagcagctgggactttcaggcacgtgccaccatgtctggctaattttgttgttgttgttgttgttgttgttgttgttgttgttgttgttgttttgaggctgagtctcaccctgtcacccaggc

SEQ ID NO: 752254 - DNA, 622 bp, Homo sapiens
tgctccatctgatatatccttggttttatctccaggttaggatcctttaggtaaagggtcagataatcagctaatgaggctgatttttgtctcaccctctattatcattacctaatgacagtgaatgtaataatgcaaaaatgatcatgagcatgtatgtatacattttctcaattaaaaatattcaattaagaatttwaaaattgagctataatgactttttcaaaagacagaaaacaatgaaataagaatgatattcttgaattaaagataactttaattaaagatgccctgttgtttctgatctaaaaagatatatatggatggccgaataggaacagctccggtctacagctcccagagtgagcaacgcagaagacgggtgatttctgcatttccatctgaggtactgggttcatctcactagggagtgccagacagtgggcgcaggtcagtgggtgcacgcaccatgtgcgagccaaagcagggtgaggcattgcctcactcgggaagcgcaaggggtcagggagttccctttcctagtcaaagaaagtggtgacagagggcacctggaaaattgggtcactcccacccgaatactgcgcttttccgatgggcttaa

SEQ ID NO: 752255 - DNA, 684 bp, Homo sapiens
cttgacaaagtaaattggttttcaatttactttgcccagattggtcagaggattcactatttgtatttgtaaggcagatactatttgtaaggcagatacagccttaaaaaatacatttcttaagtagacttgaaagtcgayggacttttcaagttagaagagttgatccatggactacagaaggaatgttatgttgacaagcatgagaacagcatgaatctccttgtatatcttcatcacagctcttggatgactaggtatactataagtgagtataatttttcaaaggagtattttttttctgggcagtaggtctcaacagcaaacgtaaaatagtcagcgaatcatgctgcaaacagatatgctgtcctctaggctttgttgtttcatttatagagcacaggcagagtagatttagcataattcttaagggccctgggattatttgaatggtaaatgagcattggcttgaacctaaagtcaccaactgcattagtctctaaaaagagaatcagtggttcctttgaagctttgaagtgggacattgacttttcttctagttacgaaaatcccaggtggcatcttcttccaattgaaggctgttgtatctacactgaaaatctggtgtttagcatagtcaccttcatcaatgattttagctagagcttctagatcacttgctgc

SEQ ID NO: 752256 - DNA, 644 bp, Homo sapiens
aagaagcaaaattatttttatgacttgtcctttattattattgttgttattatctaagaataattgcagccaggacaaggaatctaaatgaaataggaaccaaagacttatggtaaaggaaccgaagatttacggtaaatagtagtggtaagtttagtggtacttasttatgaaaaatatttaactgaaggctatttaaatgcaagttataattttaactgtgggaataatgaagagcaacaaaggataaatgacattttaattttcatttttgtaatttctaacaaagttgatgataatgcaatatgacatcttgcccttattgtttaactttctattatggtttttaaagaggttcttttttttgcaaaaatattcagagggttttttagttttcctaaaggtgtctccaatcattaatgtttatattattctcctttcaaacacccattgaatcatgatccttgcttattttctttatttcacttttaactgctcttactggctttatttgtgatgtgagtagtgttcaaatataattttcattaactccatgaaatcccacatctttcccaatattgactttgcataaatttgcatattttataggcatagatagcatcccaaaagaacagatatgttta

SEQ ID NO: 752257 - DNA, 516 bp, Homo sapiens
atttctttttctttttttttgagatggagttttgctcttgttgcccaggctggatggagtgcaatggggtgatcttggctcactgcaacctccacctcccgggttcaagcaattctcctgcctcagcctcccgagtagctgggattacaagtgggcaccatcacgcctggctaatttttgtrtttttagtagagacggggtttcaccatgttggccaggctggtctcgaactcctgacttcaggtgatccgcctgccttggcatcccatagtgctggaattacagacgtgaaccaccgcgcccagccagggattacatttcaacatgagatttgaaggggacaaacatccaaaccatatcaggaggtttcagctgagaccttaaggatgagtagtgtgaaccaagcagagtgggaagaagagaattccaagcagagggactggcatgtccaaaggtcctggggtgaaaagaagctcttcaggttagctcatctccaagtggtgactctgggatcca

SEQ ID NO: 752258 - DNA, 638 bp, Homo sapiens
ggactacacacgcacatgtttccagcattgttgagctccagggttcctacagagccacctcatggttcctgcctgctcttcagtatccctggtggctcaggagggaagggaagagatctagcctttacgtaatcacagttaagcctcacagcactctagactagtggtgttacctgtattttatacataagaaagtgggctcagagagaggaagtaatttgtccaaggtcaggtagctattgagtcgaaaaagcagaatttagtatagctcagtctgcctccaaagctcttgaactttctactagaacacactgccttactgctggaaatttaatagaagtctctgtttgggaaagctgtggcaaatagatgtgacagttctgagacatgacctctgtgttacatggtgggtaggaatctgccaggtgcttcgccaagtgagtagatctgaacttgatcacccagtgaagcttctgtgaggmagcagcgcagtgcactggttacacatttaaatcctggctctgctgcttacctgctggatacatgaattgacctgagcctcagttgcctcatctataaaatggggatgacaatgcttcctgtctcagctagttgatgagatgaaacacacaaagctc

SEQ ID NO: 752259 - DNA, 361 bp, Homo sapiens
tatctcctgaagaccccacctcttaatactattgcattggcggttaggtttcaacgtatgaattttgggggaacctaactactctggccatagcagttgcacatctggaggcctcatctttggatttcttccccacattcccatttcacttttttgacctcagaagagttttccctgatgttcttgcaagctcatggtgtgtttaagatgtttttatttgtkttggttttactttatctagcatttttagtaattttgtagcaggatggttgtatctggcctgccatatttttccatcacttattgattatttatttttggcttgcattgtttaggactatctgtatttctggttttaagt

SEQ ID NO: 752260 - DNA, 563 bp, Homo sapiens
ctctcacccccacccaacaccgaaaacttgaaaagaaggcatcacttgttaaattagtcaaagccaaagacggctaatctcctccattcctgagtgaagaattctggcctacacaaagggcacaacaaccatctaaacaattctgcttaatatatatgaagagcacttttctcagaaagcaagttgatgagcatgtcagcctaggaatttttactcaaaagagcaagactaatttgcagaattagcaatgttgagggaaatgtagccctgactctagcacacactcatcttctagytgcttgaaaggaatgtctcccattgcaaatttataaaggtgcattaccagtttacttaatagattaccatggctttgctctttaagtttctagatctgagagtctgagcactgtggcaaggtcaccaaaataatatcaccataaaagtcattcctatctagtcattctctacaataccataaggtattttcttaaaaagaaacttcttatttacaagcgattagtttgctgtgaattaagttttctagcctcttgtcagtggcttcc

SEQ ID NO: 752261 - DNA, 559 bp, Homo sapiens
acacacaaacacgcgtggacacacacaggcacagatgcacactccatcaagtgatgcttccttctcatcagacacttcagactatgactcctgttgtccagcaagatacaacaaactgtatgcttttccaagacacagcctgcccttctaaataaggaaagagaaatccagtgtccataggtctttcaatgacagttcacttttgtaggtatgttgtaaccaaggctytttgtcaaagggcactctttgatatctgaattcctctttgagaattttccttcctttattataattcataaagatatgcaaaaaatataactttccacttctataaaacctcttatacatacctatcctttaatacatacaaaaaaacatgtattttttagacatgtaaaaccaaaaatatataaaatgatatatggccaatatgtttcctattttatacatatcttaacatgataggtgatataaaatcacacatagctttccgtatctcggaagccctctgggtgaccctgtgagccacaaggaactcagtgtgggttcaggaagtggc

SEQ ID NO: 752262 - DNA, 559 bp, Homo sapiens
acacacaaacacgcgtggacacacacaggcacagatgcacactccatcaagtgatgcttccttctcatcagacacttcagactatgactcctgttgtccagcaagatacaacaaactgtatgcttttccaagacacagcctgcccttctaaataaggaaagagaaatccagtgtccataggtctttcaatgacagttcacttttgtaggtatgttgtaaccaaggctctttgtcaaagggcactctttgatatctgaattcctctttgagaattttccttcctttattataattcataaagatatgcaaaaaatataactttccacttctataaaacctcttatacatacctatcctttaatacatacaaaaaaacatgtattttttagacatgtaaaaccmaaaatatataaaatgatatatggccaatatgtttcctattttatacatatcttaacatgataggtgatataaaatcacacatagctttccgtatctcggaagccctctgggtgaccctgtgagccacaaggaactcagtgtgggttcaggaagtggc

SEQ ID NO: 752263 - DNA, 618 bp, Homo sapiens
ttaaacaaaaacgtaaacataccatggtgcaactaaatacattttttcaaaattttaatgattctattctagtcttctacaattttctcatcaatgcctaattcaataacaattttagtgatgtctgtgttctcatccctggagcctgtgaatatgtcaccttaaatgcaaaagggargtcaggtgtggtagctcacacctgtaatcccatcactttgggaggctaaagtgggaggatcacatgagcccgagacttcaaggttatagtgagctttggtcatgccattgcactccagcctgggtaacagagccaggccctgtctaaaaacaaaaacccaacaaaactgcaaaagggattttgcagatgtgcttgagtcttgcccatcctgagctggggagattatcctgggttatctggtgggctccgcgtcttcccaggggtccttataaaagggaggcagaaagggaggtgactccagaagacaaaaaggtgacttgatgccagaagcaagaggctggagtaatgcgaggaaggggccatgagccaaggaatgcaggcggccaccagaagctgaaaaaggcagggaagtatgttctcccctagccctgggaaactga

SEQ ID NO: 752264 - DNA, 576 bp, Homo sapiens
cttgtgctttgtatctctgacttctgctgctgctagctaagacaagtttgttttagaagactacgtcatttgattagggccacccagattatctaaaataatatcctatcttcaggtcaactggttaataaccataattacatctgcaaagtcccttttaccatgtaatataacatatttgtggatgttatatttcatcctattcatccagggattagggtgggaaatcttgaggggagagaatttgtagaattctgcctaccacgttatctttcaggaacattctagaagagcttattgcagcaggtatttttacccatttttctctccatgaccataaattaaccttatatsctattaattctgcctctaatcagagttgtatcttagaattaagcatatttttagtcttccaaagacatggagcttgtgttcctgagactttcaatctctaataggcactttttagcctgaatttatggtacataccaatctggctttacacagggtaataactacagacatctgttcccttctatagtggtaaaatactttatgttttatattttcctattg

SEQ ID NO: 752265 - DNA, 576 bp, Homo sapiens
cttgtgctttgtatctctgacttctgctgctgctagctaagacaagtttgttttagaagactacgtcatttgattagggccacccagattatctaaaataatatcctatcttcaggtcaactggttaataaccataattacatctgcaaagtcccttttaccatgtaatataacatatttgtggatgttatatttcatcctattcatccagggattagggtgggaaatcttgaggggagagaatttgtagaattctgcctaccacgttatctttcaggaacattctagaagagcttattgcagcaggtatttttacccatttttctctccatgaccataaattaaccttatatgctattaattctgcctctamtcagagttgtatcttagaattaagcatatttttagtcttccaaagacatggagcttgtgttcctgagactttcaatctctaataggcactttttagcctgaatttatggtacataccaatctggctttacacagggtaataactacagacatctgttcccttctatagtggtaaaatactttatgttttatattttcctattg

SEQ ID NO: 752266 - DNA, 420 bp, Homo sapiens
cttcttcaaaaagagcctggcagcttgagtcctatctggggcaaaaaagacataaaccaaaaataagcagacacaaaatcagaattctatttttttataagtccatttctaacctcattttcattaaaataaagtagccacgttattaccttctttatcaaaacaatatgaagggccaggcacggtggcttaygtttataatcccagcactttgggaggccgaggcgggtgatcacctgaggtcaggagttcatgaccagcttggccaacatggtgaaaccctgtctctactaaaaatacaaaaaaaattagccgggcgtggtggcatgcgcctggaatcccagctacttgggaggctgaggcacaagaatcacttgaacccaggaggcggaggttgcagtgagctggaatcatggcact

SEQ ID NO: 752267 - DNA, 627 bp, Homo sapiens
aaataaaaaataaataaaaataaataaaagttttatgacgccatatggtatttcttgttaactgaaaaactttgcagccacaaaaaggaacaaaaccacgtcctctgcagcggcgtggatgcggctggaggccactatcctaagcgaattaacacaggaacagaaaatcaaatactgcgtgttctgacttacaagtgggagctaaacattagctagttatggacataaagatggaaaaaacagacactggggactgcaagactggagggaggcaggcaagggttgagaaactatctactggtactgtgctcactactygggtatcgaggtcattcgcaccccaaacctcagcatcacgcaatatactcatgtaacaaacctgcacatgtaccccctgaacctaaataaaatttgaggccaggcgcagtggctcatgcctgcaatctcagcacattgggaggctgaggcaggaggatcacttgaggccaggagttcgagatcagcatggggaacaatgtgagactcctgtctctataaaaaaaataataaaaattgaaattgcttaaaaaagaaaaacttgtgaggcctgccttctagctattctacagaagaagccttttcaaacag

SEQ ID NO: 752268 - DNA, 627 bp, Homo sapiens
aaataaaaaataaataaaaataaataaaagttttatgacgccatatggtatttcttgttaactgaaaaactttgcagccacaaaaaggaacaaaaccacgtcctctgcagcggcgtggatgcggctggaggccactatcctaagcgaattaacacaggaacagaaaatcaaatactgcgtgttctgacttacaagtgggagctaaacattagctagttatggacataaagatggaaaaaacagacactggggactgcaagactggagggaggcaggcaagggttgagaaactatctactggtactgtgctcactacttgggtatcgaggtcattcgcaccccaaacctcagcatcacgcaatatactcatgtaacaaacctgcacatgtaccccctgaacctaaataaaatttgaggccaggckcagtggctcatgcctgcaatctcagcacattgggaggctgaggcaggaggatcacttgaggccaggagttcgagatcagcatggggaacaatgtgagactcctgtctctataaaaaaaataataaaaattgaaattgcttaaaaaagaaaaacttgtgaggcctgccttctagctattctacagaagaagccttttcaaacag

SEQ ID NO: 752269 - DNA, 588 bp, Homo sapiens
agactaatcaacaaaaaagactaaaacagaattacacaaactcagggctagaagacatcttaggtaatataattcactcgatttattaattaaataactgggatcaggccaggcacagtggctcatgcctgtaatcccagcactttgggaggccaaggtaggaggacagcttgaagccaggagtttgagatgagcctgggcaacacaggagagcctgtctctaggaggaaaaaaaaaaaaaattgaattagccaggcatgatggcacacacctgtactcccatctgctcaggaggatgaggcagaaggatcacttgagcccaggagttcaagggctgctgtgaactttgattggccaccgcactcgagcctgggtgacagagtgagacatcctcccgataaacttttaattaactttycccccccagatatagacctgcagaattatggttgttttaagtcactaagtggtggtggtgttgctgttgagagacatggtcatcactccgttgcccaggctgaagtgccggagtgacatcatagctcactatacactcaaactcctgggctcaatttaacacttaaaaag

SEQ ID NO: 752270 - DNA, 588 bp, Homo sapiens
agactaatcaacaaaaaagactaaaacagaattacacaaactcagggctagaagacatcttaggtaatataattcactcgatttattaattaaataactgggatcaggccaggcacagtggctcatgcctgtaatcccagcactttgggaggccaaggtaggaggacagcttgaagccaggagtttgagatgagcctgggcaacacaggagagcctgtctctaggaggaaaaaaaaaaaaaattgaattagccaggcatgatggcacacacctgtactcccatctgctcaggaggatgaggcagaaggatcacttgagcccaggagttcaagggctgctgtgaactttgattggccaccgcactcgagcctgggtgacagagtgagacatcctcccgataaacttttaattaacttttcccccmcagatatagacctgcagaattatggttgttttaagtcactaagtggtggtggtgttgctgttgagagacatggtcatcactccgttgcccaggctgaagtgccggagtgacatcatagctcactatacactcaaactcctgggctcaatttaacacttaaaaag

SEQ ID NO: 752271 - DNA, 612 bp, Homo sapiens
tttagtaatgtgttttatataaaacattatctatccatctatctatctatctatctatctatctatctatctatctatctatcatctatccatccatcccatgtgcaagtagttatctcagaaaagcaggttggttcaacatatgaaaattaatataacataccatactaatataatggaaaaaaacacatatgatcacctaaataaacacagaaaaatcatgtgaaaaaaatccaacaccctttcctgatagaartgctcaacaaactaagaatggaagttaacttcctcaacccaataaagtacatgaattaatatcccacaactaacattatacttaaaaggtgaacaactataatttgtacacctaaaatcaggaacaagagaagaacatctgctctcaccacttttattcaatgttgtactaaagttttagccagggcaattaaattaaacataaatatatcggtttattttagaatgctcaattttattctattgatctttatgtctactcttatgcccaaaccatacaatcttgattactgtttcattatattaacttttgaaatcacaaacggtgagtctgctttgatttttcacaagattgtt

SEQ ID NO: 752272 - DNA, 536 bp, Homo sapiens
gctttagctgtgtcccacagattctgatatgttctgtcttcgttctcatttgtttcaaagaacttatttatttctgccttaatttcattatttacccagtagtcattcaggagcagacaaccaaccttttaattaaaagttggcaaagaatttcaattgacatttctttaacaaaatagaaatgaccaataagaacatgaaaacatgctcaatcccaagagttattatgaaaatgcaaatcaaaatcacaattaggtaccacttaatactcacttggatggttatattaaaaaaagacaggcaattacraacgttgtcaaggatatggagaaattgcaaacttcataaattgcagataggactataaaatgatgaagccattttagaaaatagttttccacataaagctaccattaaatccagtaattctactcctaagtatattctcaagttaatagaaaacttatgtccaaaaaatacttttacaggaaaatcatagccacattattcatagtagccccaaagtagaaacaatc

SEQ ID NO: 752273 - DNA, 510 bp, Homo sapiens
gccttcaagaatttatcattcttttggatgcaactccattcatagattgggccatgtaaggccctgtcatttattagggctacacagaggcacaaaaaagttatgtccttcatcctaaggaaacaacagtaattgcmgaatactgaagtacaaaattagatcttactgcacaacttggaaagaagtagaaattgatgggaactcttttttcgggtccatagcttttgcaccctgagccttcagataaagaacaaaagcagaataactcagagactcctctccaagcttgaagcagaccctaatgcttatgttgaagaggcagctcatatggccggaagctgcttggctatcccctcacaactgatgttcaaatatattaatgaaagatactggctggagtgtacactggtctaattatccttcttttttttttctgtagccatctaattacattccatttaaaagaatgttttttaccatgccatgtatacccagtattcttaaaaatag

SEQ ID NO: 752274 - DNA, 634 bp, Homo sapiens
caggacaatgccacaataagtaacagtaacattattaaaacaatagaaagtagcctttaaatataaaagcattaagcatagtaaagggcatgatttattaaaataaaaaatggaatttacagaaaagatattagtcatatagttctttacatcagaaaagacaaatttattatgcaaaagtttgctataaattgattgaagatatgattgattaaagaagaaattgattaaaagtttgattatggtaagagagatcaatatatctctttcagaggtggacatattgaatcaggcaaatatatgttaacaatagaatataatacagtagttccctcttatccatgattttgccttcagtaacccacagtcaaccatggtctgaaaatattaagtggaaaattccagaaacaaacaattcataagttttaaattacatgcaattctgagtagcatgatagaatcctgtattgwcctactccatccagcctggaatgtgaattgtccctttgtccagcatatccaaaccgtatacactaccctcctgatagtcacttagtagacgtctggattatcagatggacttttgcagtgcttgtgttcaagtaactattactttacttaatagtggtcccaa

SEQ ID NO: 752275 - DNA, 648 bp, Homo sapiens
ctgttatatctactatgtcaaatgacaaaagcctactaatgatataggatgaatgggaagtgaggatattggaatgaaatttaaaaaataaatcagagttaacaaatgtcagtggctggactcaatctgtgttataagtccagttccagacataactctatgcagctggtataaatgctcaaatactacatgaagggcatataccacttcaaagactaccaacactgctgtgtatccttataggactaagttgagtagcttactggttgatcaaaggctccaaacaaaagaaaaacacctcagacttctttcaytttgatgtatgcattagttatagccatcaagggtcttaaagcaaagggatgaaacctatgtgcccagggcaaatatagaaaatctgtaaccaaaggatgaaagatagttagatcattttgcaagaacttcttataactctgtatgttttctacctctatgttttcagcctgcagagatgcagttttgatcttgaggctatgagatgtattttcagatcagatttagcctaaggttacttagatttagcctaggattttctacagctgtatcattgaataaagtactttacaatggcctagtttcttttcacctatatagacaagcctgatctaa

SEQ ID NO: 752276 - DNA, 695 bp, Homo sapiens
cccctaaagaccttccagtgggacaagatgtagaggtgaaagacactaatattgacagtgggacaagatgtagaggtggaagacactaatgttgacagtcctgaccttgtgtaggcctagactaaagtgtgtgtttatgtgttagtttttaacaaaaagattaaaaggtaaaaaaataagaataggcaggcgtggtggctcacacctgtaatgctagcactttgggaggctgagacaagtgaatagcttgagcttaggagctggagaccagcctggacaacatggtgaaactccgtctctactgaaaatacgaaaattagctgggcatggtggcacacgcctgtaattccagctactcgggaggctgaggcacaagaattgcttgaacccagaaagtggaggttgcagtgagctgagatcatgccactgcactcctgccygggtgacggagtgagactctgtctctaataataataataataataataataataataatacaaagaatacaaaaaagcatatagaataaagctataaagaaaatattgtatagctgtacaatgtgcttgtgtcttaagccaagtgttaatgcaatagagtcaaaatgtttttaaaaaattaaaaagtttataaagtaaaaacttacaggaagttaaggttaatttattgttgaagaaaaaaaaatttaagtttag

SEQ ID NO: 752277 - DNA, 545 bp, Homo sapiens
tgcaagttccattcatggtaaatgccctttacatatgtactgttttttttttaatcttttatggcgtatttttactgtactttttctatgtttatatatgtttagatacacaaatactattgtgttacagttgcctagtattcagtacagtaacatgctatacaagtttgtagtcttgaagcagtaggctataccatataggctaggtgtgtagtagactgtaccatctaggtttgtatgtgtacactctgtgatgttcrcataacaatgaaatcacctaatgacacttttctcagaatgtatgcctgtcattaagtgacacataactgtatttagctttgtaagaaattcctaaactgtcttccaaagtggttgtatcattttgcattctcaccagcaatgaacgagagagttcccgttgctgcatatccctgtcaccatttggtgttgtcagtgttttggattttagttattctaatagatgtgtagtgatatctcattgttttaatttgcagttctctaatgataaaagatgctgagcatct

SEQ ID NO: 752278 - DNA, 420 bp, Homo sapiens
agtaccaatgaagtcttcaatcttagtgcaaagttgcagcatagtctttcattttcttcatatgtttttaacttgaagactattttgtataataactaatatagctatactagctttgcatggtttatcttttccatcctttatttttttaacctttctgtagctcatgttttggaagtttctcttataaatagcatatggttgggtttctcaaatccagtttggcaatatttgtctttatgttccaaataaaaaatagctctgtactaatatwtcactaatatattttatttgagcttacatccatattcttcctaatgctactgtcctatcagttctgtgtttttttttttgttgttgttgttgtttttttttgaggcagggtctcactctgttgcccaggctggagtgcagtgatat

SEQ ID NO: 752279 - DNA, 592 bp, Homo sapiens
agcaattgcagtagtccccccattatccaaagaagatacattccaagcccccccagtggatgcctgaaacctcaaatagtactgaactctatatatactgcactacgttttttcctgtaaatacatacctatgataaaatttaatttataaattaggcacagtaggagcttaacaacttctccttggcatatgtttggcttctctttggcatrtctgaaatgccagcagcattactcttgtactttggggtcattattaaataaaataaggcttacttaaacacaagcatttccataccgataccaaaacagttgatctgataacagagacaagctgactaaggggcaggtgggtaacatctacagtgtgggtacactggacaaaggcatgattcacatcccagataggttggagcaggaaaatgagagagttcatcctgctactcaaaatgatggcaatttaaaactaatgaattgtttgtttctggaattgtccatttcatattttcagaccacagttgaccacaggtaactgaagccatggaaagtgcaactgtggataagggggaactatgtacaagagaaaaacagg

SEQ ID NO: 752280 - DNA, 582 bp, Homo sapiens
acgtgacaggctaaactcgaaacattaattagtcacttcatttgatggcaatagtaataaatgtgagtgacagacacgaaagaggctaccctcagtgtaccacccagggagagccagagttaagattttggaatatatgcttgcagtcttctgtgttgtatatagtgtgtgcacaattattcacacacacatacctgcctgctttttacaaaatgggattatattgtgcttgctacctcgtaacctttccacytgagaatggatactgtcattactgatgcctttccgttcaagtttttctgcagttgcagtctcaaactttttggtctcaggacccctttataccctcaaaaattattggtagcttcaaagagcttttgtttttgtagtgtgtatttattggtatttactgttctagaaattaaaactgagaaatttaaaagatattttaaacttatttaaacctaatagtaatagacccatttcatgttaatgaaaacaaccaatttttatggaaaatatttcccagaacaacaacaaaaatgtgaaagatggcattacttttcaatttgacagacctct

SEQ ID NO: 752281 - DNA, 582 bp, Homo sapiens
gggtctgttgcatagcagcctctggacacccacagtgtctattcaagagagaagaagagtgaaaaacacaaataatgtattagtatagagatagttttgactttgcagaccccttgaggcagtcttggggaaccccagggctctgcagtctacattttggtccgcttttgaatgcctacagaatgtttttgaccttcccacctgaggctgggctgggaacatccctccagcaaccacaggctccccgagcctcctcatctgaccgaacctgtgtccacagagcatctgagctctcctctctatcaytgtgaaatggaccgacataaaatctctcttgtttgcagagttcgtaacgacagagaacatttccataccttctcacaatcatctttgtggggagacagccaggagactgcaccctcttgcctagaacacccatgttgtggccagatccccatgtcgggaacctgctccagggataatctgctgcccccaagtcctgggggtctggttccatggggtttgctcatcttctaggactttggtcacaggggaacaatccaactcctgcctcctcctcac

SEQ ID NO: 752282 - DNA, 686 bp, Homo sapiens
cctagaacacccatgttgtggccagatccccatgtcgggaacctgctccagggataatctgctgcccccaagtcctgggggtctggttccatggggtttgctcatcttctaggactttggtcacaggggaacaatccaactcctgcctcctcctcaccccagaggctcccggctgcacacagctggccagagtgacggtgttcaaccgcctggtgcctccttttcagaaccacccctcccagccaacagagcccggtctgtgcgggctccgtgggtctgtgtgagagcccctgtttgccttggctttggtctgtcttctcaactggctggccggcccttttcaaaaatcggctgggtgttatgaaactttattttccaaagagaaaaatttctgggcctgtagcaagagggaaaaaagttatactaataatcaaaagcaccagtagtcaaagtaggatggtgagggtttggagaaacactgaaagttgtcacaaaacastgcagctcacccatcagccgcagcccccgtctgtgcgcagagccctagccatgctggcttctccctgcgtcagcatttggggaaagacggatgtgcctggaagcgggccttgctcctgtctgtgtagacaggccggcgttgaatgtctacgggtggcatctatcatccgtgacctgtagcatttgtg

SEQ ID NO: 752283 - DNA, 688 bp, Homo sapiens
tggggtaaagatgggaaaaggccaattttgggcaagggatccttccggggccctttccagctgtcctgtccttcagaattcacattgagtagctacagggggctggcctgtgggagccacacagtcagtaccctcaggaggccacgtgtaccttttccaaccggcaacagtctccacagctggagcagagttgggggccaccatcctggcttccggagggatctggctggaaggcccgctttggagaggcctctgcagagcaaggtagaggcaggcggtaccggggcatccccctggggcccagtgcagcctccagcagcatgaaggtggaaaggtaaaatgctgtaccaggcacatcttagaagtgctccctggtaaacatcggacccctttcctggccacagaaaagagcacagaagtatccaagttctgggaagggcaggctctgctccctgccaggatgtctttygttgttaaggcccagcaagatgggaactatggtgtaaaccagcagcgcgtgctaaatgagaatgaggactttgcctaacgagagcccaaatgagtcagtagagtggtagctgccaaatatatcgtgcccacacagactgcctttttaataataacaaccaagatgtactgtgtgcttactatgcgccaggtaattgtctcatactaactcttttacctc

SEQ ID NO: 752284 - DNA, 558 bp, Homo sapiens
cagctattgagtgactgggtctcccagtccctggggataactccaaggggttcgggctaattatctttatattgcagccatccatcactcttgtgctcttccttagcttcttccagagggaaacagccgggaaggatggtatatataagaaagtcttcctaacagttatctgggtagtcctctggcccaactttctacaccagggtcaccttcataggccggtatttaatgactggctcttaagatgatttctttttttattttwatttttttgtagagacagggtatcgctatgttgcccaggctggcctcgaactcctgaactccagcaatcctcccacctcagcctccccaaatcctggaattacagtgttaagatggtcttaactagcaaaggacaaaggacaaagaagcaggaaggggagcggggaggcggcacatcagagccctttacccttctctacctggcagttacagttattcttcaagacaaattcaaatgggaagccttccttggtccccaaagcagagagagttcagtcccactggatatggtac

SEQ ID NO: 752285 - DNA, 657 bp, Homo sapiens; identical to SEQ ID NO: 750004

SEQ ID NO: 752286 - DNA, 574 bp, Homo sapiens
gacaatgtctggcagggccggggtggtgaaacatgcttcttttgtgcatctgttcccaaggaggaattggaggcttctgaagacttaaaaaccacaccaaaacaaaataaccagagaaaatgtttccctgtgctgtggttctaagagctgcattgctttggggaagaagggaaggcaagaaccccctttgaaatcttttcccggaggaggtgggggatggcgtgggtgcccatggacatgcagtccacgtgatggctgccacgtgcccttgagcatcctcatcccagaatggcccatgcgcacagaggaacagcctgatcccctcagctgcgttgagtcttgggagagggagagccaagctccaggkgtcgattgaaactctgagtcctgctcgtgcaaggactttgcagctgcgtgactgcccggggcgatgggtgctaccacacttgtctgccaggccattctcctgacaatgttcttgtacatgcagctgcagctggccccagatccccaggtcccccaccaccaccctggcccctcactgctgacttctcctccatctcttgccattctt

SEQ ID NO: 752287 - DNA, 634 bp, Homo sapiens
cttcctcaccctctcgtctttctaataaacagaggggaggtgcctgtgcatagacttggggactattacattgactcagaaagaccctcttttcccttttgccccaaccagtgctttacgaggttgcctaagcctgtgctgcgacccccagaggcaggtgcaaccccattttacagatggggatgctgaggctcttcaccagggccgcccagctggatggcagtggggtgggtcacaccgagcctcctttcccctgggctgggctgccacccgaggcccccactatgtgttcctgtttgcctttgactccacgggggccgggagaaagtggcaytggggatgccaccaggctgcttgtcaactggcctttgctgtgttccacacctctgacatggaggtgaggctgtggtggctaagaccgggcggtgggccgagttcatgttcctgctatgccagtgatagctggacgagacctagagcaaggctgtgaactcttgtggccttggagttcttgtctgtgcagcatcctttcgggtgcaaggattgttacaagggttgagtgagctgttatcagcgaagcactgaacagtgtctggaaggtgataaactcaacaaagtgtctctggagttagag

SEQ ID NO: 752288 - DNA, 600 bp, Homo sapiens
gtgtaagatccttcgtcagcaggatttcaaatgtcacagcctgtcttaggaggcaatgggacctgctggcctttccagatgggaccttgaaaaaacagctcaagcctcctgagccacagtttcctgatctgtaaaatggaaggatgatagtctgtctgtaaatgtttcacatgagctgatgcgygtaagtactctgggcagtgcgggctcatgacagtgcacagcggatattaccttggtttttactttacatgggaagggtgtgggtatatagggaggggaagtttatgctcttccttctttgtgcttccctgagagcctggctcctgagtcagccatgatggggcctcttaacccaaattttcccctgtccaatttcccctgaagcatccccaatcccatttgccgggcaagcctggtggcccaagtgaccaaatcaacccagggttacaccttcctctggttcaacccagcacttccactggcaaagccggaagcatattttacaaagcctcttgtatttgcaagccaacctggtggcttccctgtcgcagcttcaggagcaagacaagcaggccagaggccatgggtgtgccaggt

SEQ ID NO: 752289 - DNA, 493 bp, Homo sapiens
caggcactggggggctctttcaaacgccaggaagggcgtctcagcacctccggagcattagcgcactgttcgcatcagaagccatccagcaggcacacgtgacaccaccaccaactacccctgatggacaccactgaacggcaccgggagaggtgaggctacataaataacayacgcgtcacgaagcataattattaaatgttgtcatttcggaagaaaattaattagcaatagctgtagctgtcttgtgtctgcttaagcagcgtgcatctcaattaaaatttaattgccacagcttcaatcacagcaggttaaatggcttgaaatgctgagcgggcccatatctacacaaagcttaaattagtgtggagtggaggagctgtcacagaaggggaggtgataggtaggaaagtgggcaagacaacaaggtcccggcatacccacgtccctatgtcgaccagtcctggcaaggggcagcatttccaagtgtaga

SEQ ID NO: 752290 - DNA, 527 bp, Homo sapiens
ccacacaaggatgaggactcagtaaaccaaaccctcaaaaaagtcaagaacaggggttttatttcaattttcctgtatagtaaaacagcctggtgatgaccaggccacgggttaccaattttccacttcctgtctaggaatttgtgcaaataaatacacatgaaaaggtgtcatctkagatagtaaattagtggctgccagggatggggagcgactgctaatgggtatagggttttttgagagggtgataaaaatgtgtagaacttagatatgtggtgatagtggtttagatagtggtggtggttattcagctttgttaatattctaaaaagcagtgaattgtacactttaagagggtgaattttatggtacgcgaattacatctcaataaagcagttatttacaaaaacagcagggaggggatgcagtctttacctcaaatgcacccaaagctgccagatttctcagcagagcatctttcacttgtactagttattggtgaatggaaggcccagttcagccagact

SEQ ID NO: 752291 - DNA, 643 bp, Homo sapiens
ttactttctctacaaaagaacacaattgccgccatcatcatcatcatcatgatcatcatcatcatcatcactattggcataaaagataaacacctggattctagtcattctatatgggaggttgagaggaagagaggaatcaacgacacccatttaattttttwaaaatgatggtaaaatatatataacataagacttaccattttaaccatttttaagtgtacagttcagtggcatcaaatacattcacattgttgtgaatcttcaaaacttttccatcttcccaaactgaaactctgtgcacattaaacattaactcctcattcccctcttccccagccgctgacagctgcgattctactttctgtctctctgaatttgactaccctaggggcctcatataagtagaatcatgaggacgtgtcctctagtgtctggcttgtttcacttagcgcatatccttggggttcatccatgttgcagcatgtgtcagaatctccttccttttgatggttgaatactattccattatatggtaagctacagtttgtttatccttgccttcatcatccatttaatattaaagccacttagagtaatacatgacagagtgtgcagacctgtccttgtcacacaggggcag

SEQ ID NO: 752292 - DNA, 638 bp, Homo sapiens
gcaagtcgagcaggaatttgatgactaactgagtggattttattttattttttaagaattagaaggagaaaaaagaaaagaaaaagaggagaaggagaaaatgaatggaaattgcacattactatgagtcaatcatggtactggggattaagratatcgtctaatttaactgtctcaaatcttgagaagggtgtttatacaccttttacagaaaagtggttgaagctgaaatatgttcagcgtatgctaattggtaataaacaactttttgaactccactgatgcttgaattttcactctgctggaagttgtcaggtccaaattttaaagcagacctgtcagcttcaaaccatgagcttctgccgttgtactgttctgcagaaaagtaatatgacttcagttcctctggcattagtgtgtagcaagatcagagtgtgagagatcagaagaaggagcactctggtgatgatgataatatgtaccatttatggtgcacacagatgtcccagttgctacctctagcatctctcattttttcaataatgtgcaagctcagtaacatacatttttaagaagtgagaattagagatgtcaagaatgtaaaactatcaagggcgaaggttgaaattcaaaatagg

SEQ ID NO: 752293 - DNA, 638 bp, Homo sapiens
gcaagtcgagcaggaatttgatgactaactgagtggattttattttattttttaagaattagaaggagaaaaaagaaaagaaaaagaggagaaggagaaaatgaatggaaattgcacattactatgagtcaatcatggtactggggattaaggatatcgtctaatttaactgtctcaaatcttgagaagggtgtttatacaccttttacagaaaagtggttgaagctgaaatatgttcagcgtatgctaattggtaataaacaactttttgaactccactgatgcttgaattttcactctgctggaagttgtcaggtccaaattttaaagcagacctgtcagcttcaaaccatgagcttctgcygttgtactgttctgcagaaaagtaatatgacttcagttcctctggcattagtgtgtagcaagatcagagtgtgagagatcagaagaaggagcactctggtgatgatgataatatgtaccatttatggtgcacacagatgtcccagttgctacctctagcatctctcattttttcaataatgtgcaagctcagtaacatacatttttaagaagtgagaattagagatgtcaagaatgtaaaactatcaagggcgaaggttgaaattcaaaatagg

SEQ ID NO: 752294 - DNA, 550 bp, Homo sapiens
gccccttcatatagtacaaaatcctcacaacagtatacttccatttcttttctcctggcctttagtcctcactgtcttctgttttcatccaaatcttcttcctgactgttgactctattgaacccagtggccccaagtctgtcaccacatgytgggctgtgagatgtcggtgccctgcagccaaaggcctccaagagctcacctgcacttaagtaagttgggtttctcatttgtcaccgtgagggagtacacacacaccatggagaattgccaggtgtcccagtaaagggtgtcagaaagaacctattataggatgtgagctttgcttggtggttttgaaaggatttagtgaaatagggaattggtctctgttggctgcagtcaagaagggaaggtcattctatgattggtacctcaataaatcttacctatgggagggcattctagatgctaaagcagtaattaataataataaaaaacgcagccactcatattacctgaggaagagagatttttgtattttgcagctcggatgatatgcatgttttgt

SEQ ID NO: 752295 - DNA, 545 bp, Homo sapiens
taacagattatatgaaaataatatcttttattattattgtctggatattatttgaaatattacattttgtatacatttatttatttcaaaatccaagaattaattcaactgtctttctcactcaaaccacttttcgatacacatcccccagaggtaactctcatggtgacttttgtagcagtcatttttttaggtaccgtgctttattgttttatcattgaagtcactgcagcttactcttgtccatttcatccttccctcttctttacaacctccctgttgaacatcctggtcatttacttcagtttcccctcagctcaggactgctgcctgtacactgtggctgtccatcaacctgctcctctgtcttccttatttctaaaaaaattrgcatctgggccatctctagtaccattcctttggtgagactgttgttggagttatgttctttcattaggaagaagtttatatctgattgtctctcttttactgatgccagcaccattgctgcttaacgtctgcatcattaatccactgggcttaca

SEQ ID NO: 752296 - DNA, 613 bp, Homo sapiens
aaataataaccatatattatttttctctctgctgttgtttccccaaaacaagttcactgatatgtaatctgtagttattaaagagctaatgaagagtaaccacagtttcatcattttccctgtaggaattgacagcaaataccaagtgtttattaagcctatgctatctttaattctcacaagaatcctaagagtgaggtaggtattattctcatttaccgacacacagaaaaatcagtctccaataaatcacataatttgactcataggcatcctggtgatacttaacgtgtgtgtgtgtttgtgcatttggcttatgcctgtttcttccactatctgataaacactaaaatgagtaggcttagagaatgatgaaaaaaattagtactgcagatcacttcttcttatgcytttttcttgtaattaacaatcctgaaagggtaaagatccgtctataatattctttttttaagacattagaatagctcctgccaaaataaatgcttagaaatgctttttaatgatagtaatacacaggatagtcaagataaaacattaactttataaaaaatttttcatgtctcggatattatatttaaaaatatgaaaaagc

SEQ ID NO: 752297 - DNA, 633 bp, Homo sapiens
caacctctttgaaataatctctttcatgcactcattactccctttccctgaattctttctttattttcttgagcagaagattccttgttctctcagcccctgtgactggttgcatgtctcatttttggcaccaatttcaggtgaccttgcactgttgtyttttatgcatatctttcttctgggagatcacgtctcattttagggaggaaatatgtcctcttctttaatgccagttgcagttcagactgtcatgtgcagatttaaagaattagtgatgtggaagctgtgaattcatcgtcctctcatgttaaagtcaggttttgcaccactagtcttgcttcctgcagcaagaatcatcttctatatgcaatccttcagtagttgtccttgggctataaaatgagctgaaatagttaattatgcatttaagattccctataagctggtctcatagttctctttatctttcccctcatgctttcacaccccacactcagcaatctagaaactcaacaactcagaaagcagagctcctcccatctcccttgcaccatgcctttcatggccggtgactctgtgaatatagttttcttgggagagaagctgctgtaagttcctttcttttgctcattt

SEQ ID NO: 752298 - DNA, 643 bp, Homo sapiens
cttcttcaaagaagaattcctaatactccagactgttagctgttcccctagcatcttcacttctttacactgcctattacagttgtagttatgtaattagttgctgtttaaacactgtgtccctagtcagaatataaactttgtgaactcagacgctatggctgtcttgttcactgctttgtccacagcatttatcccaatgcccagcacacaatggggttcattaaatatttgatgaatggatagcaacattcatgttgtagagatacatatggcctcttcyttgacacgtgggttctggaacagaaagaacctggcctgtcccgtatcgtattgttattcttttaactttggtttggtttgattatttttatcctctgtgtttttacattttgttttgtaaaggcaagaaagaaccctcaagtggattgcctctggcagttggagccacaccggtgttctcagaatacaccctgtcctttccaatttccttcatatgcggtaaccaccaacagtcttggagtaacaagtcttaaattctgattctcagtcggctaaagtaagatcccttgtggccccaaccacacgccactttctctctgaaagcctatctgttcttgtcagaacttctctcttcttgcta

SEQ ID NO: 752299 - DNA, 643 bp, Homo sapiens
cttcttcaaagaagaattcctaatactccagactgttagctgttcccctagcatcttcacttctttacactgcctattacagttgtagttatgtaattagttgctgtttaaacactgtgtccctagtcagaatataaactttgtgaactcagacgctatggctgtcttgttcactgctttgtccacagcatttatcccaatgcccagcacacaatggggttcattaaatatttgatgaatggatagcaacattcatgttgtagagatacatatggcctcttctttgacacgtgggttctggaacagaaagaacctggcctgtcccgtatcgtattgttattcttttaactttggtttggtttgattatttttatcctctgtgtttttacattttgttttgtaaaggcaagaaagaaccctcaagtggattgcctctggcagttggagccacaccggtgttctcagaawacaccctgtcctttccaatttccttcatatgcggtaaccaccaacagtcttggagtaacaagtcttaaattctgattctcagtcggctaaagtaagatcccttgtggccccaaccacacgccactttctctctgaaagcctatctgttcttgtcagaacttctctcttcttgcta

SEQ ID NO: 752300 - DNA, 631 bp, Homo sapiens
cacacatgatgtttggtcattcttgtgctatttctggtttgaaactcttctccatgactcttagtagtcatggctcaccattgcttgcttctatgtgtgatatgtggccttggtggccacacattggaatttgaataaatatattcttgtgctaaaggaaagttatttgataaataattgttttaatttttatactttttaagacttttataaacatayatgaactaggcaaatttccatagcggatcaaacttcctaaaatttgcatcagaaaatatgatctctgtatagccctcatttctccttccagatagtcctttgtaagatttgggtatagatttatgccacctcctctgtcatgtaatcatatttccatttcctgttatctctttcccctgtctcccacatggtgagtgctgccactttgccctcttgctgcccattgttttcttgcggaattctactcagggccatcctctcctatagtgaagtgaatttaaagtttttcctttccgtttctctctctcaattccagtctcctgattttggtaaggtttgggtgagagcaacttaattgtaaacaatttacattaaagctttgtattcctttgtggctattcaacagatgagg

SEQ ID NO: 752301 - DNA, 637 bp, Homo sapiens
gccaagagcagcattggtagtaagttggacactggacgccaaagacagaatcagcctcttcatcagtgatatccattcatttattgattaattaacagattaatttattagacaaatgctgactgaaactctgttatactggagatgtgctatgcgatatgatacgaccttcagtacaaaatatataagcccaggaaggagtgagctgataatattaagcttttactatgccatttatagatctcatttcctctattacattattctctaggcaacttgatattttctctcctgcatcttctcaatactcactaaagactgaatttattggcttaaagtaagaaacatgaagctatcaaaactaacgagctcacacctgcttagccaaggaggatttttcacccatrcctctcggtttaggtgcagggtttggggaaggggaaaagacttaaaactgggaagttgtgatgtcctcacatagatggctagtccctgcagcttgtctttatgccgtaagtgtgacattagccattcccaatgaaagtggctgcttcagaaggtgcaggttgcagtggtctccatttatgtggggagctttacaaaacccatgaccaggctacatccaaaccaattaaat

SEQ ID NO: 752302 - DNA, 637 bp, Homo sapiens
gccaagagcagcattggtagtaagttggacactggacgccaaagacagaatcagcctcttcatcagtgatatccattcatttattgattaattaacagattaatttattagacaaatgctgactgaaactctgttatactggagatgtgctatgcgatatgatacgaccttcagtacaaaatatataagcccaggaaggagtgagctgataatattaagcttttactatgccatttatagatctcatttcctctattacattattctctaggcaacttgatattttctctcctgcatcttctcaatactcactaaagactgaatttattggcttaaagtaagaaacatgaagctatcaaaactaacgagctcacacctgcttagccaaggaggatttttcacccatacctctyggtttaggtgcagggtttggggaaggggaaaagacttaaaactgggaagttgtgatgtcctcacatagatggctagtccctgcagcttgtctttatgccgtaagtgtgacattagccattcccaatgaaagtggctgcttcagaaggtgcaggttgcagtggtctccatttatgtggggagctttacaaaacccatgaccaggctacatccaaaccaattaaat

SEQ ID NO: 752303 - DNA, 635 bp, Homo sapiens
attaaccactatcaaggtggaaacaagtcctatggaaaaccttctcattgaacatcccagcatgtctgtctatgctgtgcataactcctgccctggtctcagtgaggccacccgtgggactgatgaattacatagcccaagtagtcccaggtacgttacaagtatttaactctctgtaggcagtccactgagcatgcattttgtctctactgtaattcaaasctaagttattagaagatgcaaaactaattttgttagagatttatgaaagcatgtgcatagtacacaagatggtccgtaagataacttgttgaccagtcacagtgtctcacacctgtaatcccagcactttgggaggccaaggcaggcagatcacttaagctcaggagttcaagaccaccctgggcaacatggtgaaaccccgtctgtacaaaaaataacaaaaaattagccaggtgtggtggtgcacacctgtagtcccagctactcaggaggctgaggtgggaggatggcttgaaccaggaggcagaggttgcattgagtcaagattgtgccactgcacatcagcctgggtgacagagcaagactctgtctcaaaaacaaaaacttgttcattttagatttttttaagaaag

SEQ ID NO: 752304 - DNA, 512 bp, Homo sapiens
gttggagtgcagaggcacaatcacagctcacttcagccttgatctcgcaggctcaaccagtcctcccacctcagcctcccgagtagctgggagtacaggtgtgagctcctgcgcctgtgattactttacttttttattgaatgtaccccataattactggttcttgtttattttttctttatttttctttttatcaggcagctacctgagccagagtaggctcagagagactcctagttcacttgtttattctcaagtaagaagtcaaacagtttagaatgtcattcattttgtgcagttcccatgatttgctctgtcattttcagarctaccaggaatacatagcgttgaatctgcccacttgttttggctactgttgttccatcccagggacagagaggatgctccaagccctctagagtgatagccactcctcccaggccacactggaaccccctggtggcactgaacattactatcctgtctcctggaaacaggtcaatatcctgcat

SEQ ID NO: 752305 - DNA, 608 bp, Homo sapiens
gagtgtagtggcatgatctcagctcactgcaacctccgcctccctggttaaagcgattctcctgcctgagcttcccaagtagctaggactacaggtgcacgccaccacacccagctaatttttgtatttttagtagagacggggtttcaccatgttggccaggatcgtctcgatctcttgacctcatgatatgcccacctcggcctcctaaagtgctgggattacaggcgtgasgtgccacacccagcctctttttttcttttgagatggagtcttgctctgttacccaggctgggtgcagtggtgcaatcttggctcactgcaacctccacctcctgggttcaagcaattctctggcctcagcctccccagtagctgggattacaggtgcatgccatcatacccggctaatttttatattttcaatagagacagggttttgctatgttggccaggctggtctcgaactcctgaccttaggtgatccacccacctcggtctcccaaagtgctgggattacaggcgtgagccaccacaccgggcccattctatttattttttaaaatgctagtcataactttctacattgattttgcaaactactaata

SEQ ID NO: 752306 - DNA, 608 bp, Homo sapiens
gagtgtagtggcatgatctcagctcactgcaacctccgcctccctggttaaagcgattctcctgcctgagcttcccaagtagctaggactacaggtgcacgccaccacacccagctaatttttgtatttttagtagagacggggtttcaccatgttggccaggatcgtctcgatctcttgacctcatgatatgcccacctcggcctcctaaagtgctgggattacaggcgtgacstgccacacccagcctctttttttcttttgagatggagtcttgctctgttacccaggctgggtgcagtggtgcaatcttggctcactgcaacctccacctcctgggttcaagcaattctctggcctcagcctccccagtagctgggattacaggtgcatgccatcatacccggctaatttttatattttcaatagagacagggttttgctatgttggccaggctggtctcgaactcctgaccttaggtgatccacccacctcggtctcccaaagtgctgggattacaggcgtgagccaccacaccgggcccattctatttattttttaaaatgctagtcataactttctacattgattttgcaaactactaata

SEQ ID NO: 752307 - DNA, 661 bp, Homo sapiens
aaaaggaacatgcagggccctttgttcaaaacttacgaagaattttaagatggcaacagcagagccttaaaccaaacatggaacctttctaagcatggggccccgtggaactgcacaggttgcacactcgtgacatcagccatctccaaagggtcagtccccacttttgccttcacctgtacccatgtttcattaccgtgggtgggcaggggatctcttctgtctttgttccatgcactacctcctgaggtcattgggaggattaaactaaacatgacattgaacaggactgtaaccacctggcttacagcaggcaytcaacaaattaccattatcattcttattatcatcttcattatgccaaagtcccttcacaactccaaggctacccataggcaggaacatatgggaagatcatattccccttttggcagagaacatctatcaactggcgctgttcagaagtcatttcgttagtcgtgtgtgagagaatgctgtaaatgaggtgttcttaacctttcatctgtacgatggatctgttttgtaatctagtgaggcctacaggcctcttctcaaaataatatttttacatgacaaattaaaatattataagatttaaaaaaatttatattaaaagacaatgtcaaaatactttttaaaa

SEQ ID NO: 752308 - DNA, 627 bp, Homo sapiens
atattttaattaatcccacccctgtcaccttcatctctccacccactctccagcagccactgcactcagtgcacaccatctccaggagggacaccacgagggctaagcctggagcctgacagcaaacaccctacccttcctcctagccgccaaggatttctctctcttatctcaatccccacactttccccgaaggcaaaggtcactgcaggaagctccccaaagttaattagccctcattctcrgaagccaacagcctcctactctaaataaggaagagccgtccagtccctttgaacccgcgttctccttaggtaaatgggttctgcacaagctcattatcagaatcacctgggagctttaccaaactacaggtgcctcgctgcctacgaccaatttgctgaatcagtcatttcaagatggtgcccggaaagctgtattttgtgcccctttggagagtccaatgttcagccagatttagaagctgatatgcttcattggaaacaacttctccataggctctttatttggccaagtaacaaccacaattatcttatcaaggcaggaagtgtcgtttagtacacaggctttggagttgagcaaacctggattcaaatcctgggccca

SEQ ID NO: 752309 - DNA, 536 bp, Homo sapiens
tttttgtatccattgaccacccctacttctttccccagcccccacgacccttcccagactttagtgaccatcgttctattctctgcctccatgagttcaattgttttttatttttagacccaacaaataaatgagaacatataaagtttgtcttgctgtgcttggcttatttcacttaatgtaatgacttccagttccacccatgttgcaatgacaagatcacattcttttaatggctgaataatactccattgtgtatatgcagcacatttcctttatccattcatctgtygatggacacttaggttgcttccaaatcttggctactatgaacagtgttgcaacaaacatggtggtgcagatatcccttccctatactgatttcctttcttctagatatatacttagcagtgggattgctggatcatatggcagctctatttttagatttttgaggaacccccaaactgttctccatagtggtagtactaattgacattcgcactaacagtatataagtgttctctttcctccac

SEQ ID NO: 752310 - DNA, 626 bp, Homo sapiens
tccattgcagctgttttcctgggagcaaacatttggaaatgatttaaatatctatcaatagaaatgaataaatttcaatatattttctggaatggaatatgtttaatggaacacttaaaataaatgtggaaaacttcaaattgagagaacaacaaatactaatattgataaaacacacactgcagaatgatacagacataggaccattcagataaaatcttaaaatgtgcaaaattttgctatttacagtttagggatgcatacatagatagtaaaagtataaaataagcatgagtactcagaagagaagcagaagaataggaccggcgcaatggtaccctgtggtctccaattgtatctttcrttgtaactctgtttcccaaaaagaaagaaaaactctatatattttctatgtttgaaatatttcacaattattttaaaatctaaaaggaaaactaaaattaaagttttaacagatttcttttcctttttcatcgttgtggttgttcagaaaggccaattcatttttttctgaatataaaataattaggctttctttttatctgaatattgtgtgactgtgtgtgtgtgtgtgtgtgtgtgtgtgtgtgtggtgtagcacttaa

SEQ ID NO: 752311 - DNA, 650 bp, Homo sapiens
actttagctgcagctttaaagtcttcatattttgttttcatttttatgcagttaaaatgttttctaactgcctttatgattttttacttgacccattaattgcttagaaatgtattgtttaatttacatatgctgttyagtttccaaagttggcattatgcagatgtctttgttatcaatttctaatttcattccatcttgttgaaagaacaactccatatgatttcaatgcttgtgaattcattgaaacagatttctatctcaaaatatggtttgtcctggtgaatgttttatgaacaatggaaaagaatacatattctgctgttgtgtgtagttctataaatgtcaattaggacaggtttggttaatagccttttaaaagtcatctatatctttactgatatatctatttttgttatcaattattgtgagagtaatgctagtgtttccagctatatttgttgatttgtcaatttcttttatttttagtttcaaatataggttttgcatcctgtatttgaaacttttattagatgtattcactaaaattaagatttttattcttgataaattgacccttttatcactatgaaatgtctcttcttgtttctggtaatattccttattttaaagtctgctttgtttgatta

SEQ ID NO: 752312 - DNA, 605 bp, Homo sapiens
cattgttgctcttttctttttctcatgtcctatcttcttttaattaatttttttatttaaatttgtctttagttttatcttactatttattcctgttttaacttttatttatactttcagtgcttaatgtaaaatgtgcaataataatctgcaaattctttcctactgttctttgttattgtcatagaatttatttttgtttgttgtaaaatccacaacacattgatattaccttggcattaaayagacagctgttttttaacaaaataaaaaaatagagtataagtattttattgccttacatgtttaatattttcagttctctttatttcttaatttatatccaaatttatttattgtattagtgttcttcctctcaaagaacttctatatcaattcttataatgaagatgtaatggtggtaagtcttaccagctgtgctttgactgaaatatatttactttatctccatatgtgacagatgtttttgctgggcttagaattttaggttatcaaaagtttttcagagtttaaaaatgctattttctcttctcacttgcctagattctaacaaaaaggttactatcactctgatctttgtttct

SEQ ID NO: 752313 - DNA, 623 bp, Homo sapiens
tttgcaattttcatcagcaaattgaaccacacattgataatgagagatagcactttgaacacatcgcctattgtctgtaatatcaataaaacatttgttatatatatttttctatgtttctagcctttatgaacaccctgtagaagagcacagtacccagagaaaataaataattcctatgttctttttccctccatctctagagtttctcacccaccatgttttaatgcttgctcctaccttatttatatagtgaatatattgaaataaaagaaatgccacgaataggagaacaatcaagcccatcatttttcccacytgaaagaaaattatatggtcattaaaaataacattaaagtagaagaagactgagagcactaaggaggagatgaggcatcttggccaggaatacagacagatttaagagcagagctcaggttttccctggtgagtcatttggttggtatcctcaatgctttatcccaactgcatacctctaccaatcctttgggaattccaaatggccattgacaatagcaggtcacgcatggagaaaaaaaagaaaataaaatatgttttcaaaactgattgggtaaaggcatagagatttgtagaggtataaa

SEQ ID NO: 752314 - DNA, 606 bp, Homo sapiens
actgaagctcttttgctctccttgttttacagatgagcaaactcacagagggatgcaacttgcctaggatcgtatagccagcagctcatgagtgtggaatggggattcaaataaggtctaggagactccaaaatccatgtgcttaaccatgaagttttactaccccttctctgcttcttcattaagtatttttagtgcctaattgcccatgctctctgccaggtgcagtaaaggaggattacacaggtgcaatatgagccatgaytcttgttgaaatcagcacgtcaaaaataaggctaatgagcacgtgaaaagatgctcaacatcactaatcattagggaaatgcaaaactgcattaaaatatcacctcatatacattaggatggctactatgaaaaaaaccagaaaataacaaatattggcaaggatgtggaataactggaacactcatgcactgttggtgggaatgtaaaatggtgcagctgctgtggaaaacagtatgatggctctttaaaaaattttaaaaaaatagatttctcatataattctgcaattccattcctggatatataccccaaagaatggagaaaacaggatcctggaga

SEQ ID NO: 752315 - DNA, 626 bp, Homo sapiens
gtggtcaatgagagcaccaggagcaccacagacagtgagaggcagagccaaaggatcccagagctcgcgggacgccccttaatccagcgccaaaggatcccagagctcgcgggacgccccttaatccagagccaaaggatcctagagcccgcgggacgccccttaatcccgcgccaggcaccccgcggctctgcaaagatcctttgcttctgatggccacagcacattccatgcacaaagtgcccttttaacagaagatcaatacagtctctctgggttttttkttttttgttttttgttttttttgcttatgtgacattattcaaatttcaatttaatgtgacaacacacacagttctaaagaggcctaaccttttgtagtcaattcactgatactattctctctaccctaaaatagaaaacaaattcacttccatcaggcattatggaagcctttacaacaaacattaccatggctaaaagcaaacaattctactgtatagaaattctgtggaaagattaaatacttaatgaaataactttttccaaattgaaattgtaacaggtaaagtcacagactttagactggaagactgatcaaaggctaaggtaaataagagaaatgt

SEQ ID NO: 752316 - DNA, 583 bp, Homo sapiens
agtttgtcacataggtggatgggcagctatttcttttccttcaggctatatccttcagcatacacctctaatagattttaacaatctgtaggttgttattcttgcccctagactgtgaacttactcagggcagggtgggtcctgattsgtttctgtgccctaaccatcagtcaactagtatttcctgatgtaagcgtcatgaatcagcccagtcatttctctggtcaccttcagtcaccagagtttgccctgaatagaacctcttgatctttgaacacagtagctgtggtccatcacccagatgaatgaccccagcaccaaaactgtccattgatatactggaaaattaccattaatggacttaagcgggccattaacttattttttctgcataattgaggcgtaaagaattattcaattgttcatgattgaatgtcgggtctataggtagatcaagatactgtctaaggtcaaacatttgagagctggtctgtgtttgcatgtgattgacaggcaaaggcttaaggaaaatggagaggagaattgaaggggaggagggtcaaggaaacgaggatagagagta

SEQ ID NO: 752317 - DNA, 494 bp, Homo sapiens
attatggggacagagagtcatcttaaacatataatactagattttaatgtccaaattgaacaaagcaaaaataacctcagtttaatgactcccgaaataagttaacagtgaagtctggtcatctcattcctcaactcaaatggctgaactatgaactacggtcatggaccacataacatttcagtcaacaacagaccacatgtatgaccgtggtcccataagattataatgccatatttttactgtgcyttttctatgcttagatatgtttagcgatgcaaatacttgccattgtattacagttgcctacagtattcagtacagtaacattctaggagcagtaggctacaccatacagcctatgtgtgtaggctacacctctaggtgtaggcaagtccactctgtgatgttcatgcaatgatgaaattgcctaacgacaacgtgtctccctctttaaatcaagcatgactggcacatttttcactgacaaagaa

SEQ ID NO: 752318 - DNA, 573 bp, Homo sapiens
atcatggttcactgtagccttgacctcctgggttcaagcgatcctcccatttgaggctgcagtgagtgatgatcacgccactggactccaggctgggagacagagcacgactctgtctctaaaataaaataaaataaaataaaatttaaaaataaggaatctttaaaaaaaaaaaaaggaattgtagataaatatacataatgtacacagcaaaatactaatgacttcatttagggatgtgtgtgtgtgcttgaagaagtatacagatatttattacacttttttttctttttattttttgagacagggtctcactctgtcacccaggctggggtgcagttgtgtgatcatggctcactgtagacttgacctcctgggctgaagcctcccaagtagctgggaccacaggygtgtgccaccacaccgggctgtttttttgtttgttgttgttgttgtttttaactttttgtagagacgaggtctcactatgttgcccagactggtctcaaattcctggcctcaaatagtcctcctaccttgccctcccacagcgctgggattacaggcgtaagc

SEQ ID NO: 752319 - DNA, 498 bp, Homo sapiens
acttaaagcaaacataaccttaaacggtaaataaagaacccggaacttggaattaacatatgcgtttctgatgctagctctgccactaagatcacaccactgtatgatcttggatgagtcattaactctctaggtctgtttttttcatctctaacattaagaggttttataatttcaaagttctcttccagctatgaaattttattattatattctgcaaaagtatttgtcagattaawtcctagacatataaagacatataaaggtttaacacattatctattgttatttactctgccatttctcctctccatttgtgtggacaactgaaagtcaattacgtatgctaaggcaaagacattggggaagactccctatacttttactccactggcatatctagatgaacaacttagtgccctgctgattaaaggactcaaagactcatccatatccatttctctcacaagtttaaagaagcaaaacccagtcgctgct

SEQ ID NO: 752320 - DNA, 635 bp, Homo sapiens
aagcatgctttgttttctgaatagaaaacatcacctgagaatacaccctgatttccaagcaactggaaaatatcaacaaagctgagctttatctctcattctcaggtccacacccaggtcttaatttgagttcacattgtaagcagtctccactttyttttgtttgttttgttttgttttgttttgagacagaatctcgctctgcccaggctggagtgcagtggcgcaatctcggcttactgcaacctccacctcccaggtggttctcctgcctcagcctcctgaatagctgggattacaggcacgtgccaccacacctggctaatttttgtatttttagtagagacagggtttcaccatgttagtcaggctggtctcaaactcctgacctcgtgatctgcccgcctcggcctcccaaagtgctaggattacaggcgtgaaccaccgcgcccagctgcagtctccactttttagatgcaggagatcagccagcagtttggatgaatttccactatgggttgcataacacaaatctatatagtacttgttctacaaaaagaacataaaagctatttggggagcaggatgtgctcacatgaaaagctagataacaatacatgccaacaccactgaag

SEQ ID NO: 752321 - DNA, 617 bp, Homo sapiens
cttgctatgttttccaggatgtagtgcagtagctattcacaggcacagtcccactgctgatcagccggtgtattagtccattcctgcactgctataaagacatacctgagactgggtaatttataaagaaaagaggttaattggctcatggttctgcaggttgtacagttttctccttctgggaggrcctcaagaaacttacaatcatggtgcaaggtgaaggggaagcaagcatatcttacatggcaggaacaggaggaagatagacaggagaaggtgctacacagttttaaacaacaagattttatgagaactctatcatgagacagcactaggggaatgatggtaaaccattagaaactgcccctatgattcaatcacctcccaccaggccccgcctccaacactggggattacaatttgacatgagattttggtgggaattcagagccaaaccatatcagcagaggagttttgacctgctctatttccagcctgggccagttcacccgtcctctggcaacctggtggtcccccattccagggagtttaccatattggaagcaagcttaatgcagacacctgatcagcatagcaccctgatcagcatagcaccc

SEQ ID NO: 752322 - DNA, 617 bp, Homo sapiens
atttttcattcctgagtgctgtgttactgtgtcagcagatgttgtaatgggctgtgtgaggtgacctctggccaagagatggtgcttgccgaagagggccaggcagtggcggctgtggaatttatgcttggcttatgctacccaggccaagtactcagatcttccaggtgatgagtggggccatgagcctcccaatagtcmtttttattgtgttatgctacaaaggccagttgaggggcaatgttagatgagtgaggaaagtccacattctggctacccacatgtggacacaagccaatggggattggaaggcaggttcctgtgtactgaagtagtgttccagggaggagttaaactgcctctgctgctcaaaagaattggcatgagagaggggtgtaacaagcagcagtgaggcgtgcctgctcccctgtccttgatatggtggatctcacgcccatagacttctcctggcaacagctagctgggtcttgggcagttctgggcttacagtgtaaaacttccctaggccacaagccttcccacctgggaaaaaggccacagctttcaggacacgcccctcccatttacccacaaaacaggggcaccagcacccacac

SEQ ID NO: 752323 - DNA, 634 bp, Homo sapiens
aagacaaaaatttagaaagtataaagccaagtatggaaagctcaaattctatatataaactttgccatgtctttggttaattcctgaaccaagcatgcataaagcagacacaaagacattcagataaaaataagaggtgagcaagacggctgaacaggaacagctccagtctagggcccagcgtgagcgacgcagaagatgggtgatttctgcatttccatctgagctttgaagagagtagcagttctcccagcacacagctggagatctgagaacgggcagattgcctcytcaagttggtccttgacccccgagcagcctaactgggaggcacccccaagtaggggcagactgacacctcacatggctgggtactcctctgagacaaaacttccagaggaacaatcaggcagcagcatttgtggttcaccaagatccgctgttctacagccaccgctgttctgcagccaccgctgctgatacccaggcaaacagggtctggagtggacctctagcaaactccaacagacctgcagctgagggtcctgtctgttagaagggaaactaacaaaccgaaaggacatccacaccaaaatcccttctgtacgtcaccttcatcaaagaccaaaagtag

SEQ ID NO: 752324 - DNA, 520 bp, Homo sapiens
agatctgatgtttttttaagtgtttgacagctccccctgcacgggcattctctttctctctcacctgctgccctgtaagatgtgcctcttccccttccgccatgactgttaagtttactgaggccttcccagccatgtggaactgtaagtcaattaaatctcttttctttataaatgacccagcctcagatatttacttatagcaacgtgaaaatgaactaatatacgcaggtggtaagcatattaccctataagtagtttttcaacccttgtcctyggcctctctcccacctttagtagtccccagtgtctgctgttcccatctttatgtccatgtgtaccaataaatacatttcctgaacaaataaatgacagtcatttaaatgaacaatctaatgaactaaaaaggtaaataactttttctactgaatatttatttatgttattgaacaccaaaaattctacttcaaataaggaatagaaataatgtccatttaataatatttagatatattgtcaa

SEQ ID NO: 752325 - DNA, 538 bp, Homo sapiens
tttacaataaatagtgctgagaaaactgggtatctacatgtacagaaatgaagttggactgttacataacagcatgtccaaatattaactcaaaatggatcaaagacgtaaaaataaaacctaaaattatgaaactcttggaagaaaacaaagagaaaaaattttatgacattggatttggtaatgatttctyggaaatgacactaaaggcacaggcacaggaaacaaaagaaaaaaacagataaattagactttatgaaatttgtttttaaattgtgcatcaaaagattctataaacaaagtaaaaaggcaacccacagaccagaagaaaatatttataaattatatatctgataggtattaatatccaaaatatatatagagctcctaaacctcaacaacaacaacaaacagcttaataagaaatgggcaaaggattagaatagacatttctccaaagaagatatacaaatggtcgataaacacatgaaagacactggacatcagtaatcattagggaactgcaaattaaaactac

SEQ ID NO: 752326 - DNA, 582 bp, Homo sapiens
  misc_feature 381: n = A,T,C or G
atgttgcaagatttaattcaggatactacattgaatttagtggtcagttctccttagtctcttctaatctttgacaatttctcagtattttctttttttcatgaccctgacaattttggagaatactggtgaggcagtgtctgagtcaatttgggctgctgtaacaaaatgccttagactgtgtaatttataaacaataaagttcttgaggctaggaagtccaggatcaaggcaccagcagatttggtgcctgrtgagagtctactttctcacagatggcatcacacttggtagaaggagtgaacaagttcccttgagcctcttttacaagaacactaatctcattcatgagggctcttccctcaagacctagccacctcncaaaggccctacctcttaatattattaagaggtagagattatgtttcaataatatgaattttggggggatgcaaacattcagaccatagcaggcagtttgtaaaacatccttcaatttagatttgtctgaggttttctcataattaaattgaaattatgagatttgggaaacaacatcacagaagtatccttcacattgta

SEQ ID NO: 752327 - DNA, 550 bp, Homo sapiens
tgacatttctatctttcatcacttgacattactttgaggtcttgatatttacttcactcaagggacagaaacttctaagccctcccatgctagatttttggtgtgttcaggctgtcttatgagatttatcttactctgtactcacagtgctgcctcccaaataacacacagaatttctatgttgttgtgcagatttttataatatgtacttagttttcattcttatgcaggtgaccttcatgttgcaagcaggatgagtttatacagtatctcaggggtacgttctatttgattgccctccctgcctacacacacacacacacacacacacacacacacacacacacacacacacacagaaagagagagagagagagagaragagcgagcgcaacctgttctttgggatacattacattatctagccaggtgatgtactaatacaaaaacaattttaaaaataatttttctgcactctgatacctccttcaatttgttgatgaagctgttgctataaactattagcaaatacaaagttcttcattcagtt

SEQ ID NO: 752328 - DNA, 550 bp, Homo sapiens
tgacatttctatctttcatcacttgacattactttgaggtcttgatatttacttcactcaagggacagaaacttctaagccctcccatgctagatttttggtgtgttcaggctgtcttatgagatttatcttactctgtactcacagtgctgcctcccaaataacacacagaatttctatgttgttgtgcagatttttataatatgtacttagttttcattcttatgcaggtgaccttcatgttgcaagcaggatgagtttatacagtatctcaggggtacgttctatttgattgccctccctgcctacacacacacacacacacacacacacacacacacacacacacacacacacagaaagagagagagagagagagaaagagmgagcgcaacctgttctttgggatacattacattatctagccaggtgatgtactaatacaaaaacaattttaaaaataatttttctgcactctgatacctccttcaatttgttgatgaagctgttgctataaactattagcaaatacaaagttcttcattcagtt

SEQ ID NO: 752329 - DNA, 629 bp, Homo sapiens
cctcaatatctgcttcttcctgtattgacttttcaaatgagctaacaagggatttgtgataaacgcacttaacttaccaaacctcaatggtacataatctgaaagtagctgactttatcaggagttgtgattcccgaagtaaggaatagcctaacttactgaagtaaagaatcacaactgcgaatccttgactgttttattcttgttgtttttaaatataggttgtgtacagtatgctataaactatattgccaaaacaattccatttcccacattttggggaaaaccttaacaaaaacgtttgctggactgcatttttcatttattcttacaatgactmcttggggtaactcaaaattgccaggtggaaatagccacaatcatgaacactagcagctgaatgaggatgagcccaggtatggatcaattaaggaaggtcaaagggaaagaaagctcatgctcactgatctcttacagctctctgccttctttctctcattctaatctgtttctgtaaatactaaggcactttgcctatcaggggtgaaaagaatcattgtaaagaacaaaagaactttcagctttaactcctctgcagccatatttgggtgcagggtgagaaaatagtt

SEQ ID NO: 752330 - DNA, 605 bp, Homo sapiens
gaaggaggaagttgatagatgagaaaatattcacagactttaagatagggagatttccctggcttattgggatgggctcaatctcatcatataacccttaaaagcagaaaatttctcagcagaagagttaaggcagaaggagaaatcagagagattccaaacatgagaaggattccatctgctgctgttggtccgaagatggaggggccacctacataaggaaggcctgcaggagctgagaacagctsccagctgacagcccacaaaaaaaaataaaaagaggcctcaaccctataaccagaaagattgatttctgccaacaatctgaataaacctggaagtgaatcatctcccagagcctccacataaaagccctgccagataacaccttgagttcagccttttgagacatgaacaaaagacccggccaacactatctgcgcttctgacccacagaacaggaggataatacatttatgctgttataagcctctaggaatatgctaatttgttacagcaacaatagagaactacaatagaaaaagagtgaaaatacaatacagaatcctggaaaactaggcttggagagtgggatcctattagca

SEQ ID NO: 752331 - DNA, 570 bp, Homo sapiens
gagaagaggaggcttggctaacaaaggtggtcttcttatataaatgaaacctcacaggtagcagttgtcagagagtatagatgggaaatatttctttcagtcccttagaggtatcagattctcagttaatctttcctagatctggacaagggaaggcctgacagcgtcaatgcagattctctatagatgcaaatctctcccacaaaagacagctttgcaagcctacttctgtttgctggctctctgaacagccaactcaaaatgtgtcaaaaacatatattttgccgtaaaatatttttatttgcttcagtgcatttttcagggrtgggagagggtaacaccttcaccctccatgcccctgccaccccacacacaatacaccccaatgatgctccccacggtcttttatacagcacttggctcagagtcaaggctccaagaatttccgctgagctggattaaaaggattttaagcttaaaattactcttaggtaaagaaataaaaaaaatcacttcttgggaatttatgatatacttggaaatgtaaatatagcatttaataatcaagat

SEQ ID NO: 752332 - DNA, 616 bp, Homo sapiens
tcaccattcatttgggaaagccagggcttgacagatgctccctccggaggagtgtgtagtaggagatgaagtctggtgtcaggtaaccttgggaaagttacttactctccctaatctcaccgatcctgtgttcttttaatctacacaatagagctacaagttcctagtcacataaatattctaagactggcatacagcaggaaccaacacaactctgtgccctggggtcgggttcctcaatgaggaaatggcggagctggggctgtgrtccaggacgctggttctcaagcctgctcctgttcctctgcctgtggtcctttccctcattcccacacaggcctgcagatgctcagcactggtccagaatagcaaccaccagggcatcctccctgttttctctcccttggagggaagtgcagtcaatggggcctgggaacacctagatgaggaggcactgtcatttgcaaacacttttttttttaactttaatttcttgcacggaaatcaaagaaatatcattcaactaacttcataataagaggcaaatgcagtttcctaaccccaaaatctccagaggatgagtatgaattgatgtgctagaatttgaagatggaag

SEQ ID NO: 752333 - DNA, 622 bp, Homo sapiens
aaaggaaaagctgagcattaaaaaatcaagttacaaaagaacacatttagtatgcagccatttatatcaactgtccaaaataataccagatattttattagygatacagacatacattcataaaagttaatggaaattaatctgaataataaatgcctaatccaggttattgattacatttggtgtgggattcgagagcagggaatgcaatgaagggagaaaccatgcggcacttcagttaaactatgtcttaagctggtacatggccatattctttatatatttttacatgatagaaataattatttcaattgttattaaaaatatgaatactttaatagttgaattatgcagatccttacttttaaaatgagtcattcaaaattgcagataattattataactggggcctaacgaaacttgggaaaatattgcccatgattttctaatacgacacagaggaaagagaaggaacatggagaaggaattccagaattaatctttgaattggggtaaaaaggagaaagaatagactgtggggaaaagtgatcatttcagaccagttcatgttgagctggtgaagtctgtggaacaaataagctatttgagttgtggtccaggg

SEQ ID NO: 752334 - DNA, 622 bp, Homo sapiens
aaaggaaaagctgagcattaaaaaatcaagttacaaaagaacacatttagtatgcagccatttatatcaactgtccaaaataataccagatattttattagcgatacagacatacattcataaaagttaatggaaattaatctgaataataaatgcctaatccaggttattgattacatttggtgtgggattcgagagcagggaatgcaatgaagggagaaaccatgcggcacttcagttaaactatgtcttaagctggtacatggccatattctttatatatttttacatgatagaaataattatttcaattkttattaaaaatatgaatactttaatagttgaattatgcagatccttacttttaaaatgagtcattcaaaattgcagataattattataactggggcctaacgaaacttgggaaaatattgcccatgattttctaatacgacacagaggaaagagaaggaacatggagaaggaattccagaattaatctttgaattggggtaaaaaggagaaagaatagactgtggggaaaagtgatcatttcagaccagttcatgttgagctggtgaagtctgtggaacaaataagctatttgagttgtggtccaggg

SEQ ID NO: 752335 - DNA, 616 bp, Homo sapiens
catctaccttcaagagccaaggttctaaaaagctcgtagtatagagcaataacttgcttctcctcatttccttccatgtctctcccttcagaggcaaccactgttgtctcttgtagctgattcttttggtaccttcggatacttaaatggcatgtttataatgtgatgtcttgatttctcatattcaggtattaactgttgttttttttcctcaaggaaaatgagaatttcgctttcttgcccctccctccctgcctccacgacctctacccacaacgcacacacttcctgtctgagtcttttgcaatgatttttgatagtttaatattcgttatttccctgtgtcatgaccatgccaaatgccttccacagttgcatcatgttctgtgatattttttycctttactgcacaactttttgttttccatgaagttaataatagttgccttttaaaaatttgcttaacgttttgtatgatctcaaccctggttcagtctccaatttttggctagttctgtaactctcctctgattgtatccctctgtatcacaaagctattaattctactttccaggagtatgaagatcctggggcttcaagcctgctctctgctccc

SEQ ID NO: 752336 - DNA, 595 bp, Homo sapiens
tggtccttatcttttcccaatggcacattgagattattttataatcaccacatactcatggtggactataggaccaatcccaatttcaaatattcttgtcctcacaaaccactgaagcatcctggaaataagatgctggtcagcagaaagagcatctgcttcctctgttgctagacacctgcccattcaaagtcatgtcttggcagaaggcaccattcaaagtcatgtcttgacaaaatggcttcatgtcataaagccatggtatctgtgttacctttcgggtatccgtgaataattgaacctatgtttgktatattagttagacttgctgtgcagcagtaaaccaaattgccacatttctaatttaatgtaacaaagacatatgtctctttcacctcaaagtcagaggtggtttaggagtctccttggcttttctccttgaacagtgactcgactcagggatctgggatgtttccattgtgtaactccgtcttttttttttttttttttgagatagagtctcgctccattgcccaggctggagtgcagtggcgtgatctcggctcactgcaagctctgcctcttgggttcaaga

SEQ ID NO: 752337 - DNA, 596 bp, Homo sapiens
tagaggcaggatttccccatgttggccaggatggtcttgatcttctgacctcataatccacccaccttggccttccaaagtgcagggcttacaggcgtgagtcaccacacctagccatctttgcagatttaattgagctaagaatcttaaggtgaggagatcatcctggattatctgggcagactctaaatccaatgacaagtgtcctcataagagacacagaggagagacacacagaagaagaagagggtatgtgcagacagaggcagaaattagaatgatgtggccactagccaaggaagactaggaacaccaatagccatcagaagtggaagcagcaaggaaagattctcccctcaagyctccagatggaatgcagccctactgacacctgctttcagacttctggcctccagcactgtgaaaagaataaatttctgctgctttaagccaccgactttatggtaatttgtttcggtagccaaagcaaactaatatagatttaaatatagggatagatgtacatgtagacatagatagagataaacatagactgaatcgcttaaaaagtacttaaagtctgggcacggtggctc

SEQ ID NO: 752338 - DNA, 621 bp, Homo sapiens
taataaatgctggcaaggttgtggagaaaaaggaatggtctggcgcagtggctcatgcctgtaatcccagcactttgggaggccgaggtggtaggatcatgaggtcaggagatcgagaccatcctggctaacacagtgaaactccgtctctactaaaaatacaaaaaattagccaggcatggtggcgggagcctgtagtcccagctacttgggaggctgaggcaggagaatggcatgaacctgggaggcggagcttgcagtgagccaagatcacgccactgcactccagcctgggtgacagtgtgagactccatctcaaaaaaaaaaaaaaaaaaaaaagaaaaagaaaaaaaaaaaggaacacttatacactgttggtgggagcataaattagtctagccattgtggaagacagtatggtgattcctccaagacctaaagacagaaatactatttgacccagsaatcccattactgggtatgtacccaaaggaatataaaccattctattataaaaacacttccttaacctgcacaatgcacatgtaccctaaaacttaaagtataaaaaaaaaaaaacaaaaaaacacttccacacacgtgtttattgcagcactattt

SEQ ID NO: 752339 - DNA, 606 bp, Homo sapiens
atgctgccggtcccaggaccacactttgagtagcaaagggccagggggccttggcattgcactctaccctgagagtcagggttcttctgggactacagcttatcctgtctgctgaaacagagcctcttctaattggagtcagccctggattggggctggcatggggatggaagttgagagaagacaaaataatcagtgtgctattccttccagagttttgtagaacttgtggaaagtaaagtgacatttattgacatctttcatgtgttccaggttatctcaatcaacatgcacacacaccaccaccaccaccaccaatgacaacaacatctataaggtaagaagagagaaagggtaagaaagtgcactctagagccraactgcctgggttcatatcccagttctgccatttattagctgtgtgactttaaatgttactaacagctctctgcctcagtttcccatcaccaaaattggggatcataatagtacctacctcataagctgccgtgaagattaagtgatgacacatggatagtgctcaggacagtgtctggcatctagaaagtgcccaacaaatatttgctattaataatatcccttcct

SEQ ID NO: 752340 - DNA, 566 bp, Homo sapiens
tccccaagctcacatacttggcaagttccaattctgtataaagtcatccagaaaataggacagggaagaatactccccagctgactctataagaccactatcaccctaccattaaaatcagacaaagatattacaggaaaagaaggctgcagatggatattcttcatgactatacatgtaaaactgcaaawcaaaatattagcacattgaatcccacaatacgtaaaaaggataatacattatgatgagtagtgcttcatcccagaaatgcaaggttggtttaacattcaaaaacaaatcaagtagtttaccaaattcacaaactaaaaaagaaaaaaaaattatctcaatagatgcaaaaaactcgtttgcaaatatttaacaacattcgtttctaataaaaattttcagcaatgtagaacctgaagagaacattttcaactatgtagcatcttcaaataacctatagcaaacatcataatgaaagaataagtgctttcctctgaggataagaacaagacaagtatgttcactatcactgcttctattcaacattgtactaaagg

SEQ ID NO: 752341 - DNA, 647 bp, Homo sapiens
cacagagttgaagatggatgaatgtgtgcagaacaaactaatggatccacttggaataagagcacatagcagggctcttggggcctctgcccacacgcactcagaccacgctctgcacacagctccttgtgtgctttctcttagccagcacctgcatgttggcagagggctgctctcactttgcctgtgtgtgctgagactggagtgcctgggaatttgcactccccttggaggccagcccttaaccaattagtggtgaaggcaggcttagaagcatgccagctggccgggtggaatggctcatgcctgtaatctcaacactttgggaggccaaggcaggaggatcacttgaggccaggagttcaaatccagcctgggcaacacagcaagaccctatctctacmaaaaaaaaaaattaaaaatagccggacatggtggtgagtgcctatagtcccagctatttgggaggctgaggcaagagaattgcttgagctcaggagtttgaggctgcagtgacctatgatcgcaccattgcagtccaaccttggtgacagagcaagcccctgtctctgaaacatcacgccagctctcttgtcttgatcggaaaactgcaaggagcagcctgaactctccctggagctgtcctg

SEQ ID NO: 752342 - DNA, 546 bp, Homo sapiens
cagtccagccttggacatattaatctgatgtgcctgagacatcttaatggatctgtgaagtaggctgttcagatatgttgcttgggcaacagaattttcactacaatagcagaataaatagggtccaccctgccaagatttccaccgattactatacctggagggatttttcagtgcaagactttacgaagaccacaaaaagatttatttagaattatatagtctccaccaaggaatgagaactatatacattttgctccaaatggggaaataaccaaaaacaacygaagtatgaatgatttacacctgcagttctgatttttgtttctataaaagaaatagtaaaggataagacggtggcatactcagcccccaggctttttttccaattctgacgctaccacatagcagctattgtgccttggttccctcgctggtatgctggagataattcctatgtcactgggatgctgtgagggttgatacatgtagaagtctcatcccgtgcacaagactcaacaaacattacctagtgctggttttatc

SEQ ID NO: 752343 - DNA, 566 bp, Homo sapiens
ttatggagcaaagaaatctggaggaaaggatcgagagctccagatggtgatggtagggataggggtggtgcagaacaagctttaataaaacattaggtggtcagtaaaggctctgccctcaagagggatacaatcgcttcttaaaggtcccacctctcaatgctcccacttttgggattcagtttcaacatgagttttggggggtcatttgaatcawagcacatggtgtccaccatcagctctaagtttacagcctaacacttccgcaataacaagaaagagagagagagagagagagagagagagagagagagagagagagagatctttcctagttacttcagcaaaagtccccaggttaggtctgattgggcttgcttgaggcaggtgcccatttctgatctgaccactgtggcccagacaatggttacaccaattggccaaggctaggtctgattaccctaaatcctaccacaaataacattgactgagcaggaaaggactgattccagaagagatcaattactaacatgtggtaggcagaattctgagatggcccccaagat

SEQ ID NO: 752344 - DNA, 509 bp, Homo sapiens
tcctgggttcttcatcctctaaattcattcccatccacggccaataaaacgtagaatgactcctacaaatcgtatatacaggtactcagagagagagagttgaaatttgctgagtgcttactaaatttcaagttctattctgaacatttcatacatgtyaagccattgaatccctattgacacagccattgagtggaagctgactcagcatggctcctgagactaaactcataaacactttgtgacatttcccccaagtgggcccctgattaggttgaagtggggaggttttatagtggcagccaaatataccacccagggaaaatactagagaaactcaacatatgcctcccatttctgtctactggaagtatcccatgcctccatttttctattgcacatcttccaaaatgtaggcccagaagcagaggccacagctatgcctagaactacagaacaactgccactggggtcaggctagtgtatgaaactgcaacaattaggccagt

SEQ ID NO: 752345 - DNA, 510 bp, Homo sapiens
actatctaaaatcatatgaatgaacaaattctaaaattggcaagagaaaaacatctagtcatctacaaaggaaactacttcagaataacagcagacttatcagcagaaactttgctggtaagaaggtagtgaaatgacgtattccaartgttgaaagaaaaaaagcaaactagtagccaagaattctgtatacagcaagaattaagctttaggagaaatactcttttccagataagcaaatgctgatagaatttgccacgactagattggaaatagaagaaatgatcaaaggattcctaaacttgaaagtgaaagaatggtattcaccatcatgaaaacacacaaacataaaactcattgttaatgcaataatacaaaaggggaagtgaaaggaacacaatgacaccactacagaattccacaaaaccaaaaatgaacaatgagaaaaacagagaaaagagaatgtataaaataactagacaacaattaataatatgacaggaacaaaac

SEQ ID NO: 752346 - DNA, 510 bp, Homo sapiens
actatctaaaatcatatgaatgaacaaattctaaaattggcaagagaaaaacatctagtcatctacaaaggaaactacttcagaataacagcagacttatcagcagaaactttgctggtaagaaggtagtgaaatgacgtattccaagtgttgaaagaaaaaaagcaaactagtagccaagaattctgtatacagcaagaattaagctttaggagaaatactcttttccagataagcaaatsctgatagaatttgccacgactagattggaaatagaagaaatgatcaaaggattcctaaacttgaaagtgaaagaatggtattcaccatcatgaaaacacacaaacataaaactcattgttaatgcaataatacaaaaggggaagtgaaaggaacacaatgacaccactacagaattccacaaaaccaaaaatgaacaatgagaaaaacagagaaaagagaatgtataaaataactagacaacaattaataatatgacaggaacaaaac

SEQ ID NO: 752347 - DNA, 547 bp, Homo sapiens
cccctttattctctgctctcaacggcacgtttaagaagatctgaagttgtggtcatcgcttttgctgtgagtgaacagcaagttttgtggccaaaatcatccatcttagagtgcaatggggcccacatggaaaattcctttgtacgagaaataattaattttaacctttggcaagaattgtgtctttttgagggatctgggtcaagttcacagggcaagacttagatggaatggttgcttctctgctatctaattatctctgattctttcagtaaacaaggtttatggtcctcagtctctcccattattcaactcttctcacttctttgcttccatttcccccmcctagggcttttccttgagttctctttcgccttacagaaattttctgacctcaatgaaaataataatctcaacataaaatttcaagttattactctgggatgaaaaataggtgttgaattccagttctgcaatttcttaaggatatgatttgacctctgttactttctgtttttttttcacctgttaaaaaatgaattctgtt

SEQ ID NO: 752348 - DNA, 566 bp, Homo sapiens
ctcaatatattaaaaagatgagtattctctgctcctctcttgatttactctggcagatttatttaaatttaattgatcatatacgtatgcctgtatttacagacttcttttcaaatgatccatgtctagcttcatgcccattttatgtggtwttgatggttgtagctgtctaataaatcttgaattcagatagtataagttctctaactttgttttcttttacaaagttgttttatgtattctaggttctttgcatttccatagaaaatttacaatcaggcatggagtcctggttcatgcctgcaatcccagcactttgggaggctaaggcaggtggatcacttgagcccaggagtttgagaccagcttggcaaatatggtgaaaccctgtctctacaatatttatatatatatatatataaaagctgggcatgatgtcatgcgcctgtatatagtcccagctaattgggaggcctaagctggaggaccacttgagcctgggaggttgaggcttcagtgagctgagattgcaccacagcactccagcctgggtgacagagagagac

SEQ ID NO: 752349 - DNA, 601 bp, Homo sapiens
tcagctcaaggtgaagtctgggaaccagagagctttttctttttttctttttaagagtctcactttgtcacccaggctggagtctagtggcacgatctcagctcactgcagcttctgcttcccaggctgaagtgattcttgtgcctcagcctcctgagtagctgggattacaggcatgtgccaccacgwcctggcaaatttttgtatttttagtagagacagggtttcaccatgttggtcgggctggtttcgaactcttgacctcaaatgatccacctgccttggcctcccaaaatgctgtgattataggtgtgagccaccatgcctggccccagagagcttttatgcaagtcttcagctacttatgtatttcttattgccatagggctgacctcatagaagtcagatacatatttaattgtgcaatgtcctgaattacatcaggaattgagttcaaaggttttctgtgtctctgttgtgaaaagtagagtgttgattggagtgggaatataaggtagcacttaaatggattgcttccattttaccataacatataatttgtgttataatatttatattgactttttattaggttaagaaa

SEQ ID NO: 752350 - DNA, 601 bp, Homo sapiens
tcagctcaaggtgaagtctgggaaccagagagctttttctttttttctttttaagagtctcactttgtcacccaggctggagtctagtggcacgatctcagctcactgcagcttctgcttcccaggctgaagtgattcttgtgcctcagcctcctgagtagctgggattacaggcatgtgccaccacgtcctggcaaatttttgtatttttagtagagacarggtttcaccatgttggtcgggctggtttcgaactcttgacctcaaatgatccacctgccttggcctcccaaaatgctgtgattataggtgtgagccaccatgcctggccccagagagcttttatgcaagtcttcagctacttatgtatttcttattgccatagggctgacctcatagaagtcagatacatatttaattgtgcaatgtcctgaattacatcaggaattgagttcaaaggttttctgtgtctctgttgtgaaaagtagagtgttgattggagtgggaatataaggtagcacttaaatggattgcttccattttaccataacatataatttgtgttataatatttatattgactttttattaggttaagaaa

SEQ ID NO: 752351 - DNA, 596 bp, Homo sapiens
ctgagttcttgtcctgcaacaaggaagaatgaaatacacagggtgagtgtgagcaaggtgaagaggagcattattgagcaatagaacagctcagagaagccctacagtgggcagctcctctctgtagccagggtgtcctgacgagtgttcagcttctaacagaaagggtaactcctctctgcaagcaggtcattccagtaaatgttcagttctcaggagagagggtagctctctgcaactggtcatcccatcctctgctctgctctgctctgtctgagccaggggcttttatgggcctcagaggggagaaagtgcatgtggattggtccatgggtggccatarttgggcctggaaaaggcaatacaagttctaactctggcccatgggtctggcatcagcctggcccccagccttcaggccctccctggcctgaaagtggggcctcactggggaccgacccctttcacccaagagcctgtctgccagatgcctctgtccatggtgcccaggctatttgcaccaaggggcacctgcaggccagtgctgagtcaccttcagttccccctcagcttaccccatgctctttggtgaccaa

SEQ ID NO: 752352 - DNA, 493 bp, Homo sapiens
caccaatgcatgccagcccaccagcactctccctctactgcagcctccctcatgccactttgacagggctcaattgcccatggccacagccctgctgctttgtgggcatgtgcacacagacctcacctcccctacctatccagtatgcgtgtgcaggtgcaacccactgtgcaaattttgccagtgtaagtggagcygaatccaccatcccttacgccacactgccattgcagacccaaatgggcacatggagaccagcaaccccatcccctctgtgccaacattgccaccattgtgaacacacatatgaatgccaaggcctggtgcctctctctgtgccaccactagcatgaacacatgtacagatgccaaaaactgccaccactgcaaacacacgctcagaggctggcagccctgtgcctgccagcagtgtgatatagtgccccacttctactggtgtgagtgtgagcaagaacactgaaacagcactctg

SEQ ID NO: 752353 - DNA, 586 bp, Homo sapiens
cagacacagaggctcacgcctctaatcccagcattttgggaggccaaagcaggtggatcacttgaggtcaggagtttcagatcagcctggcaaacatggtgaaaccctatctctactaaaaatacaaaaattagctgggcgtggcggtgtgcacctctaatcacagctactcgggaagcttaggtaggagaattgcatgaacctgggaggcagaggttacagtgagccaagatggtgccactgtactccagcctgggtgacagagcaagactctgtcttaataataataataataaaattaacaaaactatgagtctaggttcaggaacaactgaaaagatgacttaagaacagagtgcagaaattattgtggcrgggcctggagctcatttcttgactttgcagcttgtttcttgacagagcagctataggagagaagataaaattttccctttgctctctgaacgttcactgaaaaatcagctggcaaaaggcagattaataggagaaagggcatacaaaattctattttaacatgagtagcacagtgaacctcagactgattacccagtaacccagtgtgtta

SEQ ID NO: 752354 - DNA, 506 bp, Homo sapiens
aggtctcactctgtcatccaggctgtagtctagtggcactatcttggcttactgcaacttccaccttccaggctcaagtgatcctcctacctcagactctcaagtagctgagactacagccaccaccatgcctggctaatttttttgtgttttcatacagccaagatttcatcatgttgtccaggctgctcccaaactcctgggctcaagttatccaccccaytgggcctcccaagtgctaggattacaggcatgacccattgcgcctggctgttttttagaaattgtctaccttaaggttttacattttaatctatgataaattttgaataatttttaatatatactacaaaataagggtgaacattttggtttttatttttggtatatgaatattcagttgttcaagaatcatttgttgcaaactctgtcctttcgccattaaatttctttggaacatgagtcaaaaatctaccaaccacataagtgtaggtctatttctgggt

SEQ ID NO: 752355 - DNA, 550 bp, Homo sapiens
atacagaaaagtgtatttaatataaaaccgyagcttaatgaataattaccaaataaactcctgagctacccgccacccaggtgaagaaataaaatattgttagcattcttgaaacccacccctttcagatgctcaacccctttcagatatgattctcctaatcatatcacttttccaccaaaaaggatgatttcataatagttatttccttacctttcttggaattttaccgccaaagtgtagatccctaaacaatatagttactgtttttgaatgttgtgtggagataataatattgaatatattcttttgtactttctttccaaagattaatctcctatggttttaattcatttatatcaattgctgtatagtattccattgtatgaatataccttagtttgtttatccatattcaactgttggtgaatattcaagttgtttccagtttttggctgttaatgacattctactaaagaactttcttaagagtgtatcccactgatcgacatgtgcatatgtttctctagggtctgtacctcaacgttga

SEQ ID NO: 752356 - DNA, 633 bp, Homo sapiens
gaaaattcaaatggcaaggtgaaatctagttattacttagtgaaataactttcttacttttttagggctaatgttagctctaagtatctgtttatagttggactagttcagggtcaatggaagttttaaaaagaggtgtgggaatggtattaaaggcattaagatattcaaacccatttctgccttgactgactccactacttctactccctcatcacgcctttgaaaaaggaaaatatagtttatttytcttacctttgctcgaggcctaatgcttaccttcttattagctctcacctaaatatcagtagtatacttctataagtaattggattggaacagctttttgaagattttgttgctggctaatataaataatacacttaatcaaaattattcttaaaaactaaatttaggtatacatgattggcttctctgggttttataacataaagaatgtgagcaagagaaccagttctaaatcccagtataaaatgccaatactccaatgccaaaccattggtttgcctccaaaaacaggtggttatagggttcttgtattgctgggtgactgcataaaatatcttttgacaaagaatttgatatactgatctcataattacacctaagtat

SEQ ID NO: 752357 - DNA, 483 bp, Homo sapiens
ggcgcacaccaccacacccagctaattttttgtgttttagtagagacagggtttcaccatgttggccacgatggcctcaatctcctgacctcatggtccgccggcttctgcgtcccaaagtgctgggattacagacgtgagccgccacacccggcatctattatttttgttttactttttattaatagccattctggctggtataagatggtatctcattgcggttttcatttgcatctctctgataattagtgatgctgaacatttttacatggttgctggctgcttgtatgttttcttttgagaagtgtctgttcatatcctttgcytactttttggttttgttgcatttgcttttgagaacttagtcatattttttttgcctaggccaatgtctagagagtgtttcttaggttttcttctaggatttttatagtttgaggtcttatatttaagtatgtaatccatcttgagttaattttt

SEQ ID NO: 752358 - DNA, 532 bp, Homo sapiens
tgtccttcttcacattacagcagcaaggaaaagtgctgggcaaaaggagggaaaagccccttataaaaccatcagatcttgtgagaacttactgacttcatgagaacagcatgagggtaactgcccccgtgattaaattatcctccactggttccctcctaagacatgtggagattatgggagctacaatttaagatgatatttgggtggggacacagtcaaaccrtatcacctattgttactggtggcaagtctgaacagggtccttggtcctcgattcttgtcctgttggaagaaagaatttggccaagaagaggtagtagatttaaggcagaaatgagagtttattgaaacaaagaaaagtccatttggaaggacccaagttggaaactcaaaagattgactgcctcgcctgatccttagctcagtgctcttatagacttattatttcctgctttttatcctggtcttttccccttgtccttcctgttgggcaggatgttggctaatcgcagtatgtagagtgacttgc

SEQ ID NO: 752359 - DNA, 532 bp, Homo sapiens
tgtccttcttcacattacagcagcaaggaaaagtgctgggcaaaaggagggaaaagccccttataaaaccatcagatcttgtgagaacttactgacttcatgagaacagcatgagggtaactgcccccgtgattaaattatcctccactggttccctcctaagacatgtggagattatgggagctacaatttaagatgatatttgggtggggacacagtcaaaccatatcacmtattgttactggtggcaagtctgaacagggtccttggtcctcgattcttgtcctgttggaagaaagaatttggccaagaagaggtagtagatttaaggcagaaatgagagtttattgaaacaaagaaaagtccatttggaaggacccaagttggaaactcaaaagattgactgcctcgcctgatccttagctcagtgctcttatagacttattatttcctgctttttatcctggtcttttccccttgtccttcctgttgggcaggatgttggctaatcgcagtatgtagagtgacttgc

SEQ ID NO: 752360 - DNA, 647 bp, Homo sapiens
atttttaagtttactgttgcttatcctttaaactttaataatatactgaaatttctactgctcttttaactcgagtctaattcatagctttttatgtcatgaaatgaggatcattttattcctcctttttccttcatctttcctaagctacttttatgttttttttcttctacttgtattttggcaattctgtgcagcaaatacaatcttatcttctatacttcttcttagactaactctataaactggaaaatcaataaatatctacagattattaatatataattatgacttaatatgatatttttccaggtttttaagccacttcctagacatgtatactatactggatgtgtttttcatactaactgaaactttgaattaaatataacctaaagaaaaataagrctaataacattaataagaatgcagtatagtttggatgtagtgtttcttaaagttctgctgtacaaaaacaattagtagtttggataacagtgttcagaaaggaacatgagtcactacagtgaaaatcgtaatgaaggcattggtgtggttaagaaatcacggggagagagtatgaaatgagaagagaagtgactgtaaggtcaagcctgaactaatctacattacattaggagggtaaa

SEQ ID NO: 752361 - DNA, 631 bp, Homo sapiens
tctttttgatgctattgtaaatggatttatttttaatttcttcagatactttgttgttagtgtacagaaacaccattcatttttgtctgttgattttgtattctgcgatttactgaatttgtttattggttctaatagctttttgttggactctttaatgttttctgcatataagattatgtcatctgcaaacagagataattcatatgaaaccataaaagatcttcaatagccaatgcaagcttgagcaaaaagaacaaactgggtgcattatacttcctgatctcagaatctaccacaaagttataacaatcaaaacagcatgtactggcacagaaacagacatataggcatatggaagagaattgagaatcaaaaaacgagttgacacatctacagttaactgttatttgacaaaggtgctaacaacacaccatgaggaaakgacagtctttaataaatggtgtaggaaatactagatattcacttgcaggtgaataaaatagggcctttgtctcaccccatatacaaatatcacctttcaatggattaaagacttaaatgtaagacctaaaactgtaaaactgctgaaagaaaacagaggaaaaagcttcttgattgttccttgtaa

SEQ ID NO: 752362 - DNA, 601 bp, Homo sapiens
ttggtggtggacatgtaaattggtatagccttcatggaaaagattataaagatttctcaaaaactaaaaataaaaccactatatgatccaacaattctacttctgagtatatatccaaaagaattgaaatcagcattttaaagatatctgcrttcctgttttggcagcatatatttacaacagccaagatacgcaatcagcttaagagtccatcaacaaataaacagataaaagtaggtgatatatatacataatggaatattattcacccttgaaaaagaaggaaatcctgtcatttgtaacaacatggatgaacctggaggacattctgctaagcgaaataagccagacatagaaacgcgaatattgcatgatctcatttatatgtggaatttaaaagtgtcaaactcatataagtggagagtagaatggtgatgaccaagtttgatattcattgaaaataatgaactttgatccatacctgtatcatacaaaaattaattcaaaatacagcagagacttaaatggaaaacataaaactacaaaacttttaggagaaaatgtaggagaaaaccttttgcccttggtttaggcaaatata

SEQ ID NO: 752363 - DNA, 601 bp, Homo sapiens
ttggtggtggacatgtaaattggtatagccttcatggaaaagattataaagatttctcaaaaactaaaaataaaaccactatatgatccaacaattctacttctgagtatatatccaaaagaattgaaatcagcattttaaagatatctgcgttcctgttttggcagcatatatttayaacagccaagatacgcaatcagcttaagagtccatcaacaaataaacagataaaagtaggtgatatatatacataatggaatattattcacccttgaaaaagaaggaaatcctgtcatttgtaacaacatggatgaacctggaggacattctgctaagcgaaataagccagacatagaaacgcgaatattgcatgatctcatttatatgtggaatttaaaagtgtcaaactcatataagtggagagtagaatggtgatgaccaagtttgatattcattgaaaataatgaactttgatccatacctgtatcatacaaaaattaattcaaaatacagcagagacttaaatggaaaacataaaactacaaaacttttaggagaaaatgtaggagaaaaccttttgcccttggtttaggcaaatata

SEQ ID NO: 752364 - DNA, 605 bp, Homo sapiens
atggtgatgaccaagtttgatattcattgaaaataatgaactttgatccatacctgtatcatacaaaaattaattcaaaatacagcagagacttaaatggaaaacataaaactacaaaacttttaggagaaaatgtaggagaaaaccttttgcccttggtttaggcaaatatatcttagctatggcactaaaatctcaatccccmccaaaaattgaaaatttggacttcatcaaaatttaaaacttgtaccttttgagacacactagtaaggcaataaaaagacagtcccagagtgggagaaaatatttgcgaatcacgtatatgataaaggacttgtttccagaattttaaacaactctcacgcaaaatttaataataaaaatatcaacatctcaggcaaaaatattggcaagctattaactaaagaaatatgcagttatcaaataagcacataacacagtcaatatcattagtcactggggaatcaacataaaatgtgacaccactacatgcatattaaatggcataattacagattaaccaagttttggcaaagacgtggaggtacttggactctccaacactgctgctaataataatgcaa

SEQ ID NO: 752365 - DNA, 605 bp, Homo sapiens
atggtgatgaccaagtttgatattcattgaaaataatgaactttgatccatacctgtatcatacaaaaattaattcaaaatacagcagagacttaaatggaaaacataaaactacaaaacttttaggagaaaatgtaggagaaaaccttttgcccttggtttaggcaaatatatcttagctatggcactaaaatctcaatccccccmaaaaattgaaaatttggacttcatcaaaatttaaaacttgtaccttttgagacacactagtaaggcaataaaaagacagtcccagagtgggagaaaatatttgcgaatcacgtatatgataaaggacttgtttccagaattttaaacaactctcacgcaaaatttaataataaaaatatcaacatctcaggcaaaaatattggcaagctattaactaaagaaatatgcagttatcaaataagcacataacacagtcaatatcattagtcactggggaatcaacataaaatgtgacaccactacatgcatattaaatggcataattacagattaaccaagttttggcaaagacgtggaggtacttggactctccaacactgctgctaataataatgcaa

SEQ ID NO: 752366 - DNA, 605 bp, Homo sapiens
atggtgatgaccaagtttgatattcattgaaaataatgaactttgatccatacctgtatcatacaaaaattaattcaaaatacagcagagacttaaatggaaaacataaaactacaaaacttttaggagaaaatgtaggagaaaaccttttgcccttggtttaggcaaatatatcttagctatggcactaaaatctcaatcccccccaaaaattgaaaatttggacttcatcaaaatttaaaacttgtaccttttgagacacactagtaaggcaataaaaagacagtcccagagtgggagaaaatatttgcgaatcacrtatatgataaaggacttgtttccagaattttaaacaactctcacgcaaaatttaataataaaaatatcaacatctcaggcaaaaatattggcaagctattaactaaagaaatatgcagttatcaaataagcacataacacagtcaatatcattagtcactggggaatcaacataaaatgtgacaccactacatgcatattaaatggcataattacagattaaccaagttttggcaaagacgtggaggtacttggactctccaacactgctgctaataataatgcaa

SEQ ID NO: 752367 - DNA, 621 bp, Homo sapiens
aagttgttaaaatggaaaaaagctaaaattgactaagacctaacaaaagataccacatagacaggggatcaaattgtcaaatatgtgcagtgaaaagaaaccacagggagagacaaagagatgcaagtagaccaggttctctgcccttggatcttaacacatgcagttcttccctccaaaaggagaccagagacagcacaaaacaacaagcatgcagagatggttttgtgacaattacagcatctgtttaggcaaggggactctatccaagaaaacctcccagttcttcctacaccagcccctaggacaattatcaaaattgttattggcttcaggtctgtcatgacagtgtgaccaaatgatccaattggacggggactgtccttttagctggaaaactcccacttcttaccttgacagtcaatgtaatcaacagaacctcttttcacactcacatttttcctgttttgatatgtycaccccttaaagaaggtctgtagcaggaatggtcatgtttcacagtgagaacattctatatcatgcatatgtaatggaaactataaagggagcattttagtcctcctcctccaccaggagttttcacaaacagacctcatttag

SEQ ID NO: 752368 - DNA, 625 bp, Homo sapiens
tatacttggcctgattatttgcataatgtgcagcaagaatggttacatctacatatgccttttggattggctttgaagaaactgttccacaaggaatttcagataagacatttaaagccgagcccagccatggttcgtatcctccatgagttgtgtgagtctttctcttgagttcccragatcaacatggagttagttcccagacctgttagaaagtgacattcctgactgaccagaggttaggaaccctgtgccacactgtgtagacaaggtatgaggccagctctccccaagaggctttattggctctgcgtgtcacgcttgattcctcaaagggaaacacaccctttcagtcaaagcatatgtaaaataaccagtttttccaattgtgtcctgttgacaaagaaaaatggattattgtcacactgatgcaaacaactatattgccgtaagttaagagtactcatagatagtctcctaattctagaggaaccaggcagagaaaaataaacatgctccaaatttggttcacaatatgtaccttactcaattattaaaagccataaatagttaaaaataagtttacttgatgatacaaaataaaacaagcatcagcaatattcca

SEQ ID NO: 752369 - DNA, 530 bp, Homo sapiens
attacagttgttatgaggtatcgcctctcttcctattgggaatggtgttttgcctatatttttgccttccctatttttttcttttccattttggcacactataggagacatattacttatttccaaaattctcatctgcttgcagagctgcctattttagctacagttagggtttggcttaggagcagcataactttcctccatgagagggmaaataactgagttaaattttggaaagcttctatatagctatcagggtggtcagaaaatcagcctaagtctgcctttacttgtctaaagtcctgcaatgagaagggaacttgaaggcacccccaaataagggaatcctcaggtggtttcccaggaccttgcttttctaattttggggaattattctctttgggcctgcctgatatgattgctaaaagagctgggttgattttgcaacacttgcaaaggtctagtacaaaggccacactcttgtgcaaaagaaaataagccactttttcttcaaagtttcaaggatgaag

SEQ ID NO: 752370 - DNA, 559 bp, Homo sapiens
attcactgttgagggtgcttcccctctcccctgcagaccacccccaccaagggtcaacccaagacccccaagctcactttctttcctccaggtcttcactctgatgtcaagtcgtttcatctctctgagttcctctttctttatttgctagaaagggatcctgccctccctttcctatgactcttaggtttgttctgtgataaggtgattcaaggggtrgacactgcttcataagctgacccacagtgactgctggaaatgaaagaggttggctgggctcagtgcttcatgcctgtagtcccagcaccttggaaggccatggtgggagcattgcttaaagctgggaggatcgttggaagcctgggcaacatggcaagacactcatctctacaaaaataaaaataaattatctaggtgtggtggtgtgtgcttgtagtcccagctactctgacggctgaagtaggagaatcccttgagcctaggtgtttgagactgcagtgagctaggattgcatcacctcactctagcctggacaacacagtgagaccctaccttcaaa

SEQ ID NO: 752371 - DNA, 559 bp, Homo sapiens
attcactgttgagggtgcttcccctctcccctgcagaccacccccaccaagggtcaacccaagacccccaagctcactttctttcctccaggtcttcactctgatgtcaagtcgtttcatctctctgagttcctctttctttatttgctagaaagggatcctgccctccctttcctatgactcttaggtttgttctgtgataaggtgattcaaggggtagacactgcttcataagctgacccacagtgactgctggaaatgaaagaggttggctgggctcagtgcttcatgcctgtagtcccagcaccttggaaggccatggtgggagcattgcttaaagctgggaggatcgttggaagcctgggcaacatggcaagacactcatctctacaaaaataaaaataaattatcyaggtgtggtggtgtgtgcttgtagtcccagctactctgacggctgaagtaggagaatcccttgagcctaggtgtttgagactgcagtgagctaggattgcatcacctcactctagcctggacaacacagtgagaccctaccttcaaa

SEQ ID NO: 752372 - DNA, 632 bp, Homo sapiens
attaaaacctggaaaactaatacatgatgatagaaataggaatgatggttagttactttaagtgagaggcactgaatagaaaagagccttacagctttctgaagtgttgaaaaattctacaagtgatttatgtggtggctaaataggctaaatacattgatttgtatactgaagatatgtgcatattaatatacatatgctatatctcattaaaacatttttaaaagcagaaagcaaaataagggttcaatctgtgactttttgtgtaaaaggaggataaaaataacgatgcatattttatttttagtgttgttattatgaaacactattacatataaaatattaattgaaatgttggaatagtgagagagaagaaatcaattaagaatggktgtggaatgaggctcctcgtatagttgtatatagttttgatttttgaatcctgtgaacacataattctaaaaacactaaatttaattttaaaatttctaaatataaattataggctcagagcttttttttaaaaaaagtatttttttatgcacagattttttttattgggtgcttgagcatgcaaacatattttcatcccatctcctgtaagttatctttactctatttcaaatttgaaa

SEQ ID NO: 752373 - DNA, 567 bp, Homo sapiens
atgcactataaaaaatatgtattggagttcaaatttttctctttaataatttttctcttcaatttttctctttcttcaagaaacaaatatacaagtcacataatacatactttgaattcaatcataagtaaacattaggcaaatccaagtcaaaagacattctaatgcaaaactggtttaaatttttcaaaactctacatagaatgccaaaacatattttccttttgaatgtggaagcaatttttttaatgtttaattcaacattgtaacagaggtcctaaagagtgaataagggagggaaagaaataaaaagttatgaagtttagaagtaaagaaattaaactttccatcrtaaattacaagattttacataaagaaatcaaaaataatccataaggaaatgatcaggactaataagtaaattcagcaaagttactacctcaagtatatttctaaattccagcatcaaaataaataaagaattgaaataaatatactaattatatacctacaaaacataaaattctaatatccaggaaaaacgagctatgtgcacaagctccacat

SEQ ID NO: 752374 - DNA, 496 bp, Homo sapiens
acggtgatttcttttgaattattttcagttgattttgtagttaatttgggggattttaatttgtgaatgaaggacacaatagaaaatttagaactcttaagtctaggttttaagaaactaagaattatttcaacaattaatattcctagtttgatatttgcgatacattgcttcttaatatagaaatttttctgacagtttgtgatcaacctgtttgtttcttatwctaagatatttataaatggattttttaaatctaattgttttatttgaaatttttaaatttattttcactaagctgtccactctcatgttcttatcctacattccaaatattaggattgttacaatattatactcttgagtacagctttcttgggatataaggatacttccttcaggccaggcaaggtggctctttcttgggatataaggatacctcaggccaggcaaggtggctcacgcctgtaatcccagcactttgagaggccaaagc

SEQ ID NO: 752375 - DNA, 575 bp, Homo sapiens
acagctataaggagaaaatatttttgtatagctgtacagtgtgtttgtgttataagctaagtattaaaagagtcaaaacttttaaaatctaaagttcataaaataaaaagttacagtaacagctgaggttaatttattattgaagaaagaaattgttgtttaagtacagtagtgtacagtattgtcctaggcctttgcattcactcaccgcttactctctgactcacccagggcaacttctagtcctataagctccattcatgttaagtcccttatattgataaaccatttttttatttttcatgctttttatactttattttttatttttatgccttttatctttttatgcttttttaccrtaccttttgtatgtttacatatgtgtagatacacaagtacttaccattgtgttaccattgcctgcagtattcagtacagcaacatgctatacaggtttgtggcctaggagccacaagctataccatatagcctaggtgtgtagtaggctataccatctaagttcatgtaagcacactctatgatgttacaacaacaaggaaattgcctaacaa

SEQ ID NO: 752376 - DNA, 643 bp, Homo sapiens
tttaagtagaacatcttagaagagaatgcacactaggaaaagctgggatgattagaccaaaatctcaaagacagcagtagaatcagtgttgacacttcactattcttacttaaaaagtattatttgtagttctgttgtagagactgatcatgtgtcttagctctcttactaaatagtaactctctgagggcagagtgctatgcttgctttctatctcatacagtatagatatccaacattacacaatatagacatgaaaaaatgtttgcataaatgactgtcagtaagttaactgtgctgatttaaaaaaaactcayagtcatcatgagaattaaggttaaaattcagtgaaataatgtcaccatcagaaatccaatgtcagcagcattgacttcagttaattcagttaattttaacctgtcagagtcagcctctctaaaagctatgtcagttctttcccctttgacacgtgtggcaatatgtgttcaggttgatatattgttggtcataggaagtgagcagatttttgcaaacatattactgaatgaagaattaaacctccattttataccaaactttctgataggcttttaacacacattatctgattatctcaaagaactctgggaaattattaccccca

SEQ ID NO: 752377 - DNA, 650 bp, Homo sapiens
gtgatctcacccctccaacctccagaactgtgaaaaagtaaatatctgttgtgtaagccacatgtctagggcattttgttatgttagactatattaggccatctcttgcattgctataaagaaatacataggactggaatttacaaagaaaagaggtttaattggctcacagttctgcgggctatacaggaaacatagtgctggcatcagctcatggggaggactcagggagctttttctcctggcagaaagcaaagcaggagtgggcacttcatgtagtcaaagcagaagcaagcaatggagagaacaagagagaaagagagagtagaatgggaggctccacattctcttaaatgaccagatctcatgaaaactcactatcacaaaacagcaccaagccataagggatcacctccatgatccaaacccctcctactaggccccacctccagcactrgggattacaattcaacatgagaattgggtggcgacaaatatgaaaactatatcatcctgcatctggtcctttccaaatttcatgtccttctcacattgcaaaatacagtcatgctttcccaatggttccccaatgtcttaactcattccagcattaattcaaaagtacaaagcctcatttgaaacaaggcaaa

SEQ ID NO: 752378 - DNA, 631 bp, Homo sapiens
tcccctgaaccagcaccatcagcatcacatgggtacttgttagaaatgtaaatctttgggctccaccccagacctagtgaatcagaaatgtgtggctgcagctcggtaacctgcgttttgtcaagtcttccaagtaattctgatgctgaagtttgagaaccagtgagaagacatagattgcctcctggctttgtttttaacttttcaaaatccctgtaatttctctgggcatatttcttcaggagatccaaaaagattcatattatacraagttctctctctaaattaatgcaggggcttaacatttatttattaaattatgggcatggtaggcatagattatatgtccctgtagaatcttgcaaggtagaagccatcttccccccctgcccaccccagaaaatatgcaaattcaagtttctagaagactgggctgtaattcccatttatttttaagtgtatacctacctccttcatccccccaaacttcccacatggtatatgtataaattcaaccctagaacctgttgtaggtgagccacagctcttcaggacaaatactcaaaatcagtaattgtatgtaaagctaaaaattaaacttctttagaatgggaaatattacgtagatatt

SEQ ID NO: 752379 - DNA, 621 bp, Homo sapiens
aagagcaatgaacaagaagaaccttttcttactccctttattaagagccatccagtcatcgcttggcctcagtaacaagtggcttttgacttataggccaagtgaagtctcccatgtcaatttacagattagtaacatttcatttcagttagtcttagggaagaatcataaatataatttctaatatctacttcctacacttcagtataaatcacatatttttactgcatcacttagtacttgaatctaaaactcttcattatttgcttttgttcaagtatatttatatgctcctcagaatgtctgtaatgaagataggggtmatgtcttacacttcttcagtatcttctatatcatccaagagtatcttgtaaaaagttaatgctcacaaatactatgtgattaaggactgtagctcattggaaagtctgacttctctatgacttttttgattcattacatatatttaataaatcagagaaaaatagaaatcacctcagtgtagcttattaaaatgggcagtatagtatataatatcagaaaaatgaatgagattagaaactggaagctactgcagaattgtaattattagaattatataattattagaatttctaattc

SEQ ID NO: 752380 - DNA, 581 bp, Homo sapiens
ttctaatgtttgtagaactcagaatgtcttgttccttcaacctcagtataattatgactccttttatgtgttttacttattcagttaagccctctaataatgtcttacttttacttaatgaaggttcaatggatttggaaccttaattgcgtttgtgtaatcccttctcttttcccatattctgttggctagaatagccacatgttytgacactcaaggaggaacataacaccaaggaacagaaattatagggccatcttaaattctgactacagtatggctcaacaaatatttgttgaaaagtgaattaattaatacaaaagaaagccagattctatactataatgggcctgtatattacactattgattctcaggtttatcttgtcaccttagcaagtacttaaaaagtatgaagtagcaaagaaaatatcaaatcagattcatattttggaacattagtttaacagcagttatgtaattgttggtagaaagtttgcttattttgagctaacattgtccagtgatttaagagaaactgttaaagaaaacattaaatagaaaataatgagacaaatataa

SEQ ID NO: 752381 - DNA, 603 bp, Homo sapiens
tattttgatagtggggtctattaatgcttttgccatgctgaccaaatcaaaattctctggtatgtgctccttgtataaaatctgtcttcctcctattattgctctttgagaatgtaccactaattttcccaaaagcaagtcctatccctccaatactatcattcctctgctgggcaaccgacagatttcactatgtcttccaggcattggctacatcataacgtctgytatagcataataacttctttgcagctgctctggtaagtatttctaccaatacatcagaatggatgtggaatagttcatgaataagtgagcaaaatgcctatcttctttattccatgtcatactaagtcaatttgatatgtagtcagcatgcttttgtacccatattttactcttaagtttatgaaaatggctactgaaactctactgcaatcaatttctccttggggaatagacactagtctatggggctcagctaagtaaacttcttctctcttgtccatttcctctaattttctaaaacacacacacacagatctctttcttatatcttctgtcacaaacaagatgtgatagttaatactgagtgtcaacttg

SEQ ID NO: 752382 - DNA, 603 bp, Homo sapiens
tattttgatagtggggtctattaatgcttttgccatgctgaccaaatcaaaattctctggtatgtgctccttgtataaaatctgtcttcctcctattattgctctttgagaatgtaccactaattttcccaaaagcaagtcctatccctccaatactatcattcctctgctgggcaaccgacagatttcactatgtcttccaggcattggctacatcataacgtctgctatagcataataacttctttgcagctgctctggtaagtatttctaccaatacatcagaatggatgtggaatagttcatgaataagtgagcaaaatgcctatcttctttattccatgtcatactaagtcaatttgatatgtaktcagcatgcttttgtacccatattttactcttaagtttatgaaaatggctactgaaactctactgcaatcaatttctccttggggaatagacactagtctatggggctcagctaagtaaacttcttctctcttgtccatttcctctaattttctaaaacacacacacacagatctctttcttatatcttctgtcacaaacaagatgtgatagttaatactgagtgtcaacttg

SEQ ID NO: 752383 - DNA, 592 bp, Homo sapiens
taattattttgatccaaagttttcctatcaattcaagggagagatgttttgctttttttttttttttcctttgagatggagtcttgctctattgcccaggctagagtgcagtggcgagatatcggctcactgcaacctctgcttcctgggttcaagcrattctcctgcctcagcctcctgagtagctgggactacaggcgtccgccacacacccagctaatttttctttcttgtatttttagtagagatggggtttcaccgtgttggccagggtggtctcaatcttctgacctcgtgatccacctgcctcggcctcccaaagtgctgggattacaggcgtgagccatggcactcagccgggagaaacgtttttcttggaaagctaggatgctgtggcctgtgaagaaaacaaagataacacctgatgtcttctacattgtccagaaaaaatgaaggatgcaacaactgtagctgagatgagtaccttctaaaaatagagaattattaaggaattataaacatgttatgtttatacactgttttctgttaagcctctttattttaatataatctgctgacagttacttttgtt

SEQ ID NO: 752384 - DNA, 683 bp, Homo sapiens
tctgtgctattgcaaatagtgctatcatgaacatgtgcatgcatatatctttatggtacaatcatttatattccttagggtataaacccaataacgggattgctggattaaatagtagttctatttcaagccctttgagaagtcttcaacctgatctgcaacatgtctgaactaattcacattctcatcaacagtgtataagcattcacttttctgtaaaaactcaccagcatctgttattatttgactttagagcaatagccattgtgactggtggtatactatagtatctcaatgtggtttttatttgcatttccctaatgattggtgatattgagcattttttcatatgtgtattggcaacatggagtcttcttttgggaagtgttgcttcatgttccttgcccgtttttaatgggattatttgctttttcctggttgmtttaagttccctatagattctagatattagacctttgtcagatgtatattttgtaaatattttctgtcattctttaggatgtctatttaccctgctgaatatttattttgctatgcagaagactttagtttaattgtgtcccacttaccaatttttgtttctgctgcaattgcttttggattcttcatcatggagtctttgccagggccaatgtacggaatggtatttcctaggttttctt

SEQ ID NO: 752385 - DNA, 625 bp, Homo sapiens
ccaatagctgaatattgtcatcagcgactttctgaaaagggtgatactcaagtcagtaacagacattttagcttattataaagggatttagtttgtggtactagattgtggcatgaaggagggtacaaaaagagaagtatattcatacttcttacctgttctagtgaaatctctagataagtaaaaaacatagcttcataaatttccagaaatttctgattttytacacacagacacacagacacacacacacacacacacacacacacacacagacatacacacagttgtaagcatttactcttttgtcttatccctactgttttctgctagcattctctatgtcacatatcagagtgtgcaatcactgtgcactatggtattgaaatgaggtcccaattttgatataacttgctcaaatttccaaagaaaatataacctttttactctccatagataaattttactaacttttctgtttcttctatacttgacattttagagtaattccttctcttccctttaaaacaatctcttccaagttagttaaacttaggcaaattcttggtctcataatgcctctcccttctgatgctgctgttataaatagtctctgggtatatga

SEQ ID NO: 752386 - DNA, 623 bp, Homo sapiens
tatatatatatatattttttttttttcttttttgagatggaggtttgctctgtcacccaggctggagtgcaatggtgtgatctctgctcactgcagcctccacctcccgggttcaaggaattctcctgcgtcagcctcccgagtagctgggactacaggtacacactgccacacccagctaatttttgtatttttagtagagatggagtttccctatgttggccaggatagttttgatctgacctcatgatccacccacctcagcctcccaaagcaaacatttttaagaagaaacacttttagtttcctctggcatactatcaagcaaatcaaaataggtacaatataaattacaaaagcagaagacaaagaaaataatcagaaaaawatatatatatgagctgggagatggtggcttaagcctgtaatcacagcattttgagagtctgaggcaagaagaccacttgaggccaggagttcaagaccagtctgggctacatagcaagaccttgttgccaaaataaattgtttttaaacatagctaggcatggtgatgtgcgtctgtagtcctagctactcaggaggctgaagcaagaagattgctttagcctagtagttctaag

SEQ ID NO: 752387 - DNA, 629 bp, Homo sapiens
taaaatacactatggatttcaaagatttgtataataaaataatgtaaaatatctcattatttttaaaatatgaattatatgttgaaatgatgtacatgtacatcattttgcatgtacagttggcctgtgtgtctgtgggttccacatctgtggattcaaccaatggcagatggaagatttttttttaatgggtggttatatctgtactgaatatgtacagacatttttcttgttattccctgaacaatatactaaaagaaatatttacwtagcatttacattatattaggtattataagtaatctagagatgatttaaagtatacaaaaggatgtgcttagttaggttacataaaaatacgacaccattttaaatcagggacttgagcattcagggattttggtatctgaaggggtccaggaaccagtctcctatggatatcaaggactgaactgagttaaacaaaacatactagtaaaatgtattttatctttttattctgactttttacaaaatgaacttctaggatgttttaaattgcccgtgtgtctgcattatatgtctattgggcaatgctgatctagcatttacctttgcaaaatactttcaatagtcatagttttaataat

SEQ ID NO: 752388 - DNA, 618 bp, Homo sapiens
tcgaattagatagaactcaggattaagaaactcactcaaaaccacacagcttcatggaaattgaacaacctgcttctgaatgacttctgggtaaataacaaaattaaggcagaaataaataagttatttgaaaccaatgagaacaaaaagacaacataccagaatctctgggaagcagctaaagcagtgttaagagggaaatttatagcactaaatgcccatatyagaaagctagaaagatctcaaattaataccctaacatcaaaattaaaagaactagataagcaagagcaaagcaatccaaaagctagtagaagacaagaaataactaagatcagagtggaactgaaggagacagagacatgaaaaacccttcaaaaaatatcaatgaatccaggagctggttttttgaaaaaaaaaaaaaaaaattagatacaccactagctagactaatgaagaaaagggagaagaatcaaatagacccaatataagatgataaaggagaaatccccactgaccccacagaaacacaaactacaatcagagaacactataaacacctcattgcacataaactagaaaagctggaagaaatggaaaaattcctggacacataca

SEQ ID NO: 752389 - DNA, 618 bp, Homo sapiens
tcgaattagatagaactcaggattaagaaactcactcaaaaccacacagcttcatggaaattgaacaacctgcttctgaatgacttctgggtaaataacaaaattaaggcagaaataaataagttatttgaaaccaatgagaacaaaaagacaacataccagaatctctgggaagcagctaaagcagtgttaagagggaaatttatagcactaaatgcccatattagaaagctagaaagatctcaaattaataccctaacatcaaaattaaaagaactagataagcaagagcaaagcaatccaaaagctagtagaagacaagaaataactaagatcagagtrgaactgaaggagacagagacatgaaaaacccttcaaaaaatatcaatgaatccaggagctggttttttgaaaaaaaaaaaaaaaaattagatacaccactagctagactaatgaagaaaagggagaagaatcaaatagacccaatataagatgataaaggagaaatccccactgaccccacagaaacacaaactacaatcagagaacactataaacacctcattgcacataaactagaaaagctggaagaaatggaaaaattcctggacacataca

SEQ ID NO: 752390 - DNA, 601 bp, Homo sapiens
ctttttttcttagtctggctaaaagtttgtcaatttagtttaacttgtcaaaaaaacaactttttattttgatttttgtattttttattcattttaaattcatttatttcttatctcatctttattattcattttcttctagtaattttttcatttggtttggtcttggttttataattatttaagatgcatcattacattatttacttaaagtttctcctcttttttgatgtagctacttatagctataaatgtttctcttgagtactgcttttgttgtagcccataggtttttctatgttgtgtttccattatttgtttcaagaaattttttcaatttccttcctaatttcttcattgacccactggtcattcaggagcatattgtttaatttctttgtgtttgtgttgtttccaaaattcctcttgttactgatttgtagttttattccactgtrgttagagaagatacttgatattattttaaattttttgaatgatttaaggcttgttttatggtctaacatatggtccattttttagaaggatccatgtgctgaggagaaaaatgtgtattctatagctactggatgaaatgtcc

SEQ ID NO: 752391 - DNA, 443 bp, Homo sapiens
tcatttcaagaacgttatataaatggaatcacacagtatgaaaccttttgatattaactttttcacttacttcgattatctgaatattcatctagattgttacatgcattaatagtttaaagctgaaaaaaattaaaaatttaaaaaagcactggccaacacaaaaacacacttaaatacataaaacattgaaattaaaaaccaaccacacaatcaagtctgtataacaattggcgaacaatataacaggaaaaattctgcacatatcaatgttaatcttgaacataaatgggytaaacaccccacttaaaaggcacagagtggcaagtaagataaagaagcaagatccaactgaatgctatcttttagagacccatctcacatgcaatgacacccataggctcaaaataaagaactgaagaaaaatctaccaagcaaacaaa

SEQ ID NO: 752392 - DNA, 553 bp, Homo sapiens
gttgtttggagggtcaggcatgataatatagccattcccaaaaggtattctgggatgggagctgtgtatactaaatacagttttggtggcagtctctcaacttgtcacactagtcaacttgcctgactttcatggcccccaccaatctattgctgttatagacccttggaactgataaacgttaacatatgtgagagtacattcggttccagtatccaccaggacaagcacagtctatttattcttaggggaccaatatgtagttagttctacctgtggcctctggtccccagacacctggacaycatttctcttatcagaattctggagccttggccttcatcctagtctaaaggggttggcacctgccattccctctgcacagggggcagctggctgaacctgaagctccttagtgaagcactgttttctggcttgcgctttggccatcatcccaccagaacagcattaggctgtttaagccgtttaatgaaaaggtgtccctgctactaccaggttacatcacatttgtctgtgggtcaccctgacaggc

SEQ ID NO: 752393 - DNA, 405 bp, Homo sapiens
agatgtggaagatactatagcatggcctacctttgctggtgagtggcagcgattaagcctggtggaactgccatcaataaaccaggtgtgatcaggatgaggaacaggaaagaaggaaatatggggaaatggagtgaatgtcaggtggatcagagagatacagtcatggggktcaggtgtggtatccggaataatgtgggaggccagattgaagtctgggccagggacaatggtaattgtgggagactcaacaaagagtgagtatagctgaaggagccaggcagcagaaagtatatgtgtcaggtgggaggaagaaaatagattttggaagttatgagaactgtagagagtgagttgagcatagtttgtgaatttgagggcctctaaaagtattaaagcagtggc

SEQ ID NO: 752394 - DNA, 606 bp, Homo sapiens
aatttcattcaatattcattcaaacaaattattggatacctattagtattcaagtgagctaggacaatgttcttgctttccaggtgctcatcaactgtctgggggggataacagttaacaaagcagttaagcaacaatctaaatgttcagcattggtagttcagctcagagtaccataggtggatggattaactgggtcagaaaagtctgggaagcattttggaagaggttgtactagctggtccaggaaggacgggtgagaagggtcatatttttctcctatttcaagtatggagatgccatcctttaaaatgtgagtggggctccgcgggcattgtagcctctgcatccaatgtcacctggggayagtgctttcccagtacatctcagatgtcccatccagaaccagatggatttcaggaacagcaggaattccaagtaaagggccagatagccggaactctctgaagagagccaaagtagatcttctccaccctgacataccacaggcatagcctttgccaggagtagaaatatgagcctcagtacctgtgtatttaataaattcaccattacttttccttgaggattcctgcctgtgagata

SEQ ID NO: 752395 - DNA, 606 bp, Homo sapiens
aatttcattcaatattcattcaaacaaattattggatacctattagtattcaagtgagctaggacaatgttcttgctttccaggtgctcatcaactgtctgggggggataacagttaacaaagcagttaagcaacaatctaaatgttcagcattggtagttcagctcagagtaccataggtggatggattaactgggtcagaaaagtctgggaagcattttggaagaggttgtactagctggtccaggaaggacgggtgagaagggtcatatttttctcctatttcaagtatggagatgccatcctttaaaatgtgagtggggctccgcgggcattgtagcctctgcatccaatgtcacctggggatagtgctttcccagtacatctcagatgtcccatccagaaccagawggatttcaggaacagcaggaattccaagtaaagggccagatagccggaactctctgaagagagccaaagtagatcttctccaccctgacataccacaggcatagcctttgccaggagtagaaatatgagcctcagtacctgtgtatttaataaattcaccattacttttccttgaggattcctgcctgtgagata

SEQ ID NO: 752396 - DNA, 559 bp, Homo sapiens
tcctttctccattagccaaacatatatgtactatattccacaataggctagttactgttacctaaagccctgtaacttccaatatttcctgtagaaattcagagtccttaaatgggcaatatttttatacaagagttttctctgagcaatccccacacagcaacctcgctcactctgcagtcaccagggctgggcatattataattctgtgctctctggataacttggccaggcgggtatggcagcctgcttttggtccctagtcattgtgcttcccctggaagttaacagggagccttctcctagaagttaacagaagttctttccaatytggccaatgattacagtttgtagtaaaaagtacacgttttgaataatgagatgcctctttgccgccagaggttggtttctcttcaaaagagctctgcgtataaaacctcattcatctcatcttacgaatcagagccccatttcccttgtacaatagaaaagccaacatataatatgacaaatactacttctaattctactgtcttttaactttcatatcattgctttc

SEQ ID NO: 752397 - DNA, 657 bp, Homo sapiens
tatttcctgtagaaattcagagtccttaaatgggcaatatttttatacaagagttttctctgagcaatccccacacagcaacctcgctcactctgcagtcaccagggctgggcatattataattctgtgctctctggataacttggccaggcgggtatggcagcctgcttttggtccctagtcattgtgcttcccctggaagttaacagggagccttctcctagaagttaacagaagttctttccaatctggccaatgattacagtttgtagtaaaaagtacacgttttgaataatgagatgcctctttgccgccagaggttggtttctcttcaaaagagctctgcgtataaaacctcattcatctcatcttacgaatcagagccccatttcccttgtacratagaaaagccaacatataatatgacaaatactacttctaattctactgtcttttaactttcatatcattgctttcctactttgatgtgcacactaattatctggagatcttgttaaaatgcagatacttgtttagtctggggtagggcccagattctgtatttgtaacaacgttctaggagctgcttgctgttggtggtctgtgacactctcagaatagcagactaaccaatagcatgcattgggcattcctcac

SEQ ID NO: 752398 - DNA, 592 bp, Homo sapiens
ttcaatatatgcaaagcaccagatacaatacctggacatagcagtttcgcaataaatgacaactgctattgtttcttatcaagtttggggttgattgggaagcctaggttcaagtcccaaatccagcacttacatcttatctgtgtgacctccagcaaatcacctaacttctctggtcctctctgactatggtgtcaataaatggattgattgacaaaatacatggcatagcacagtgcttggtacatattcagggctcaataactttcttattgttatcatcagggagcttctaatctcctccctttgttgcaacagcatggagatgagagatatcctatagacatagtggatatttttatggkcatttctagaccctcttccccacagctgttttccttgttttattcatgtctctgttcactgggccaccgtcactctgtattccttgtcctgctttatttgtcctccatcacagtgattgacgtaaaatctgctagacatctactttagtactgtctgtctctttcaactaaaatataaactccatgagggcaaaaggagccttttcttctttagttcattgatgtag

SEQ ID NO: 752399 - DNA, 383 bp, Homo sapiens
cttagataaaataaacaaattattaaaaagagataaactaccaaaactgatttaaggttcactggttatttctatcaaacacttgaataattaaacattaattcttcaaaagctcttccaaacagtagaacggaacacttcccaacgyatgatatgaagccagtgttatcctgataccaaaactacacaaagataccatgataaaaaaaatctacaaaccattatctccttttttttttttttttttttttttgagatggagtctctctctgtcacccaggctggagtgcagtggcgcgatctcagctcactgcaagctccgcctccagagttcatgccattcgcctgcctcaacctcccgagtagctgggactacaggagcc

SEQ ID NO: 752400 - DNA, 616 bp, Homo sapiens
gaatatgggtcagtttgaagactaccacaagtttacaataggatggttatgaattagataatgcatctcatcttaaatctctcctgagatttatatattataggggaaaaagaaaataatggtaagaacaataattatgtaaaattcatatagtggagtcatagtgacagtggctgactaagggactctgaaattttgccccttcataacagcaatagaaaaaactggtgaaaattatcagaatcaacttttatggaagtctggaaatcaaccaaaggcttacagaaacctgaactttagtccctggaagactaaattgaaaggcttgtttttagttcatctgatttggaaatccccagtgccaaaatcactacctasgtggaggtgttttctgtaaaaatttatatccaaatgttttagtcgctgctgcctgaggtatagataaaagttgggtcaaacaattgactaactgaaagcttgggaagaatgactaggaagggaaatgtgtataaggactttggaaagctctgacatatttcttggaatgtaaaaggccgtgtgcctacctagaactgcaaatatgctcaggatagtcctgagaaggccctgagttctc

SEQ ID NO: 752401 - DNA, 574 bp, Homo sapiens
tgtgatgaaaagtcgaagagcatggcactaccttctgctttgcttctggtgacggtcatgtgctatgtcacaacatggcacggaagcagaaaggcgagtgggcatatacagaaagagaccaaacatggaggcaagtttgctttaaaataagttgccctcacagtaaatattccagtgctgcaagagtgagaactcactcctgcaagacagcattagtttgttcaacatggatatgcccccatggcataaacatctcccactaggccccacatccccaacatggctccactggcaatcaaatttcaacatgagattcaaagggaaaaaaactaaaattcaaaccatagaatcctgggactaaatgtgctcaaatggrttaaaacattgtgtgtgtgtgtatgtgtgtgtgtgtgtgtgtgtgtgtgtgtgtgtgtgtgtgtgtgtgatggtgcatgtttgcaattaagtatcagaagagcttctagcttaaactaaaagaagcattatgagtttaaataaaaacaatgttctgtggaatgctaggatcctacacagttagtgggctgctctctga

SEQ ID NO: 752402 - DNA, 596 bp, Homo sapiens
attttctgccatatttttctctagttataccctgaattactttttattatttatttaatatttattatgattattatttgagacagaatcttgctgtgtcacccagggtggagtgcagtggtgccatctcagcttgctgcaatctctgcctcctgggctcaagcaattcttgtgccttagcctcccaagtagctgggactacaggtgcacaccaccagcctgggctaattgtttgcatttttagtagagacacgattttgccatgttgcccaggctgatctcaaactcctgagcccaggtgatccacctgccttggcaccccaaagtgttgggattacaggcgtgagtcatggtgcccagmctgaattactctttttttaatgagggattagaaaagatcagaatgatttgtatgggagatacttttcttaacagaagtatgcttcaaagctatcttttttacttcaaacaatggagaatatgatagtccaaaatacaatagggtacttggcgggaatctgagtcaggagtaactggtaagttgtggataataaggagaatgaagtgctgatgatgggggaaattgtggctgtctg

SEQ ID NO: 752403 - DNA, 599 bp, Homo sapiens
tatgataataatagggaacttcaacaaccaactttcatcaatacacaattcacctctacagaaaattaacatgagagttaaactacactccagaccaaataggcttaaaagacatttacagaatattgccttgaacggctgcaaaatatgcgtttttctcaataacacatggagcattgccaaagatggaccatattttaggtccccagacaagagttaacaatttttaaaaaatcaaaattataccaagtaccttttctaaacacagtggaataaaactagaaatcaacaacagaaggaactttgcaaactatatgcattcatggaaattaaacatgcttttgaaatatgaatggggaaatgaagaaattacaaagacaattttgaaaatttcttgaggtaaatgaaaatggaaacacaacagaataaaacttatggtrtactaagtgatcctaagagggaagtatatatcagtaaacacctacatcaacagaatagaaagacttcaaataaacaatccaacaatacaccttaaggaactaaaaacgcaagaacaaactaaacccagaattattagaaggaaacaaataataaagatc

SEQ ID NO: 752404 - DNA, 516 bp, Homo sapiens
gctctaacatcaggtccagcactttgttagccattttttttttccatttcaggcacatgtactagaaaaatacatttgttttctttggaaatattttcctgttcatattttactaagttagactggccttatccttactgatccaaattagtgcaatattacagcatacacactcttgaatacctattcctttgttctcacactattcaaaagctattttcttagtttagttttccaaaacgtgattatttccagctcttccattttaagctcaagtatcttttaaataaaccatgataaagataaatgtcttgcatatcaactcataaagacaaacacctcaatttcagactttattytgtttatagccaaaaaatttggtatagaatattcttattatttataatcccattatgtccccaagacattgagtcatgtaatgttttgggctgattttttttctcgcttttcctttttcttctattagtgcagtaaaatcagtatctcagcctttga

SEQ ID NO: 752405 - DNA, 512 bp, Homo sapiens
ttgtgacagacatgggtacagatacggagaactagaaccttgcttttaagaagcttttttttcaagtaaaaaaaatctcaggaatattcgttcattttatcaaacacgggtgtggtggctcatgcctgtaactccagcacttttggtggccaaggtggaaggatcacctgagctcaggagttcaagaccagcctagacaacacagtgagagcccatctytaaaaaaaaaaaaaaaaaaaaaaaaaaaatcagccaggaagtgtgggggtgtgcatacctgtagtcccagctactggagaggctgaggtgggagaatgcttgagcctgggaagtagaggctgtagtgagctgtgatcatgccactgctctccaacctgggtgacagagtgagaccccatcttaagagcaaacaaaaccaaaccaagcctgacaaatcagactgcatagtattctgcaattcagttaatctgttgtttaattagattgttggttgttctcttttcagctgtgga

SEQ ID NO: 752406 - DNA, 588 bp, Homo sapiens
  misc_feature 123, 125, 126: n = A,T,C or G
agaggcgctcttcacatctcagacagtgcggcggggcagaggcactccccacatcccagaccatgggcagccgggcagagacgctcctcacttcctagatgggaggtgagcgcctagactgcntnncatttcccagactgggcggctgggcagaagggctcctcacatcccagaggatgggcggccaggcagagactctcctcacttcctagacagggtggcagcctggcagaggctcsaatctcggcactttgggaggccaaggcaggcggctgggaggtggaggttgtagcgagccgagatcatgccactgcacttcagcctgggcaacattgagcactgagtgagcgagattccatctgcaatcccggcacctcgggaggccgaggctggcagatcacttgcggtcaggagctggagaccagcccggccaacatggcgaaaccccatctccaccaaaaaatatgaaaaccagtcaggcgtggtggcgcgcgcctgcaatcccaggcactcggcaggctgaggcaggagaatcaggcagggaggttgcagtgagtcgagatgtcggcagtacagtccagcctcggc

SEQ ID NO: 752407 - DNA, 538 bp, Homo sapiens
gtgggctgcagaatggatgttgtgttagcaggtatgaaaataacattcatctccatgtacatctttgtcagagctcttgggcaaccaggtgcatggttaatgagcaataacattttgaaataaatctttttttatgagcagtaggtctcaayagtgggcttaaaatattcagtaaaacatgctttacaggcaacataacagatgtgctgtcatgaaggttttgttgttccatttctggagcaaaggcacagtcaattaagcctaatttttaaggggctagggttattggaatggtcaatgagcattggtgtcaacgtaaaagttagcctgtcctttcaagttttgaaacaggccttgacttctccctagtttgaaaagtcctagatgatatcttcttccaagagaaggctgtttcatctacattgaaaatctggggtttagtgtacctaccttcatcaacaatcttagccaaatcttctggataacttgttgcagcttctctatcagcacttgctacttcaccttgcatttttatgct

SEQ ID NO: 752408 - DNA, 502 bp, Homo sapiens
cttaaacaacatttaatttttacattagaaaagtgataagaatttatcaaatgataataatgttgatggagtactgagagagtttttaataaaaactcaagctcctctttaacctcattcgtagtatctaattaccgggtccatcgagaagaagagagcattgcctacagcaatttcaacgtttctcctgaactatatgacacatctcacttttatatctggggagaaactcctctggaaacagtttaaaaaggatcacmccccaagcacagtgcatggcacacagtagtgccccatgcattttggttaaatgactaaaagactgtacagtcacacctggttttattaatgttgaaatactttggcaggagatgggcccaaaagctgttaagccatttgctatatatttagggataatgtgatttgattggcaccacataacttccagtgacgctcctgatttcagtgtattagcgtttatggcatttcatttcatctcttc

SEQ ID NO: 752409 - DNA, 579 bp, Homo sapiens
ggaaagtgagttttgttttagtaaagtctgtttatgcagttttccatccctacatacacttctcatctctgatgagaggagtcacccttttcctctggtacaggaagcctctcctaaagggtgggatttatggcagcttttgggaggctcggtttttaggcagaaaaggtaagtttaaacaatgattcttcttgtgtctgctgattttgaaatgtcttcagctcaaaataatttttatgccacagtagtgtaatctggagcccttcaaatatcttgcatattttccttgcttttatgacaagggaccscacattttattttgtgctggaccctgcaaatcatgtagctggccatggaaattggatgggaaagactaaaaaagtccagaatcccatgtcttatgcctgcctctattagatgtccctagggcatgctggtaaaatccaaaataatccttctccttgtccttcttcctttcttgcaagaaccataagttccataaggaaaagaacgttgcctacaagctacaggttatacaactcccgggggcaccatttacaaggatgatgcctcctaaat

SEQ ID NO: 752410 - DNA, 580 bp, Homo sapiens
catctctgagtccacagtctacatacaccaaggcttgcccttggtgttaagtttttttttttttttttttgagacagtgtctcacttgtcgcccaggctggaatgtagtggcgtgatctcggctcactgtaacctctgcctcccaggttcaagcgattctcctgcctcagcctcctgagtagctgggactacaggcgcgtgccaccacgcctggctaatttttgtatttttagtagagacgaggtttcaccatgttggccaggctggtctcgaactcctgacttcaagtgatccacctgccttggcctcccagagtgttgagatgacgggcgtgagccactgtgcctggcctgcttcatgttttaaataayggctttattatatccctgcagttcacccagttaaagtacacagttgaggtatattcatagttgtgtaatcatcactgcagtctattttagaacattttgtcaccttgaaaggaaaccctgaaccctgtcccagctactgcttcctttttctgcatctcctcccgcagcccctggcaccctcaaatccccttcctgcctctgtggcttgg

SEQ ID NO: 752411 - DNA, 598 bp, Homo sapiens
ctttactctgatgcagattgccccccccccacaagggctgggacacagtgtttggttcatcactggtgcccacagatgcccacttggcatttggtggctaaacagcgtctgcctctggtgtccctgcagatggaggacggccataccctcttcgactacgaggtccgcctgaatgacaccatccagctcctggtccgccagagcctcgtgctcccccacagcaccaaggagcgggactccgagctctccgacaccgactccggctgctgcctgggccagagtgagtcagacaagtcctccacccacggtgaggcggccgccgagactgacagcaggccagccgatgaggacatgtgggatgagacggarttggggctgtacaaggtgagcctcccctccgcagctgctctggggttggacgttctccctgccattctggtctttgcatacccagggctcacaggaggggcttcccacgcgcctctctagctctggctgggcagaaatggccaaggggtggtttcctgcacgttccttgaggggaacatggtaccctgggattcctttgtggacctctagagcagagtcctgttcgggg

SEQ ID NO: 752412 - DNA, 473 bp, Homo sapiens
ggctatgggcgcagcttcagcagacttaaatgttcctgcctgctggctctgaagagagcagcagatctcccagcacagcacttgagctctgctaagggacagactgtctcctcaagtgggtcactgacacccatgcctcctggctgggagacacctcccaacaggggtcgacagacaattcagacaggagagctcctgtctgcatgtggcatgtgtccctctgggatgaagcttccagaggaaggaacaggcagcaatttttgctgttctgcagcctccactggtgatacccaggcaaacagggtctggagtggmcctccagcaaactccagcagacctgtaacagaggggcctgactgttagaagaaaaactaacaaacagaaaagaatagcatcaacatcaacaaaaaggacatccacacaaaaaccctatctgaaggtcaccaacatcaaagaccaaaggtagaaaaatc

SEQ ID NO: 752413 - DNA, 523 bp, Homo sapiens
gtgggatttcttagcttccataatcataggaaccaatttccataataaatatcctcttatatagctatgaatcctattggtcctatttctttggagaatcctaatacaccatcctatgtaatgatgtccaaaagcagagagggcgctctcactctctttctctgcttgtctttctctttctccctctcaaggctttgacaaaagccaaaaaccyctcagcagtattcctttcagctttcaaaccactttgtccaagaaaggctgagaaaatgaggatggatttttgcagagtctgccgtgggaagcagaacttggcagtggggaaacgagggtggagggaggggaagactgcagggaaggcaacgaggagagtcttccacagccctttacatttttacttaaaacaaatatagtgcttttgcaaactagaaaaaaaatagaacacataaaaagtaggaaaaaaaaagaacaaaaacgattccaatttaaaagtctatgatgtgcgcatttgtttaagacattt

SEQ ID NO: 752414 - DNA, 591 bp, Homo sapiens
gacaccctatccatacaagggaatatagtgacttagggtcttgagtcattgaggaatacttgcatttttcaatagggaatgctggaatattgaaaatactctaacatgtcaaagcctggcagttctggaatttggattttcaggttgaatagcttggtgtgatttaagtcatttatttgggcatgtgcccagctaacaggccagtctatgtggtctatttttatagggttttgctctcacctgggcttaaactattatcattgcaactgttttkcagactataaagtcttgtgagcatataaatggctcttgactttacgtatttaccacttatgtgacaattcatggatctgtattacttacttcagtgaaacagtgctagcctaatgatgctcttctggaatctatgcatccttaaatctcaggagtagccttttaaccatgataattaaagcaggagttgctgtgaattacctgggttctgaagtactccctaaaactcaacagttgcctgtggtatctgcacagaaagcccccttggatttgtggccctggcatggtcaccgttggtaagtcatatggcagaaaacc

SEQ ID NO: 752415 - DNA, 529 bp, Homo sapiens
atatatcagcatttgctgcttcaccttgtacttttatgtatgacgattccttcccttaaacctcataaaccaacctctgctagcttcaaatttctcttctgccactttctccccttactttgccttcacagaattgaagaacattagggccttgctgtggattaggctttggcttagaaaaatgtkgtaactggtttgattttctatttagaccactaacactttctctgtactaggaatgagactgttttgcttcttatcattcgtgtgttcattggaatcgctcttttaattttcttcaagaactttttctttgcattcataattttgccaactgtttggcacaagaggcctagcttttgggtaatctcagcttttgacataactttctgacaaagtttaatcatttctggctttaaatttaaagtgagagacttcaatgtacaaaacttcctttaactggaacacttagaggctattatagagctattaattgacataattttaatactgttgtgtcacagtgaat

SEQ ID NO: 752416 - DNA, 503 bp, Homo sapiens
aaattagctggacctggtggtgggcacctgtaatcccagctacacaggaggctgaggcaggagaatcgcttgaacccaggaggcggagattgcagtgagcagaaatcgtgccattgcactccagcctgggtgacaagagcaagactccgtcttaaaataaataaataaataaataaataawaaataaaaataaaataatacatgaaactcttttaatgtgaagcataaacatgaaacattttaaaggcagataaaagacctaaaaatatatgtatttcattcaaaaggaccatctatgtcaagatcaatattatatatatatgtgtgtgtgtgtgtctgtgtaaatgtgtgcatatgtacacacatgtatgtatcacttatactcatctgtatatctccatgtgtttttaggaaaagttatatgtgttggatatgtatatgtgattgtaattcactttgagcttagtgtaaaaaattttttttttaaattttcattatacttt

SEQ ID NO: 752417 - DNA, 503 bp, Homo sapiens
aaattagctggacctggtggtgggcacctgtaatcccagctacacaggaggctgaggcaggagaatcgcttgaacccaggaggcggagattgcagtgagcagaaatcgtgccattgcactccagcctgggtgacaagagcaagactccgtcttaaaataaataaataaataaataaataatwaataaaaataaaataatacatgaaactcttttaatgtgaagcataaacatgaaacattttaaaggcagataaaagacctaaaaatatatgtatttcattcaaaaggaccatctatgtcaagatcaatattatatatatatgtgtgtgtgtgtgtctgtgtaaatgtgtgcatatgtacacacatgtatgtatcacttatactcatctgtatatctccatgtgtttttaggaaaagttatatgtgttggatatgtatatgtgattgtaattcactttgagcttagtgtaaaaaattttttttttaaattttcattatacttt

SEQ ID NO: 752418 - DNA, 633 bp, Homo sapiens
agggcacctaatacaattttaagtcgtggggaacattttcttaaggagtgattcctaatcaatgacaagtggcttcactagaatctatccacaaaaaggaagaaaatatttttagaaagaagagataataaatgtagagacccagaagctaaataaaagatgtatctgagacctaaactaaaattccatataggtgatattgataaagggtaaagagaaagtgctaaaataggaaaacagagagctaagcaaagatgtcattcagaatttattttcatgccatattaatggtgttagagttaattctagagaaaacttggaaaatagaagcagaaagacagtatacacaatttgtgctagaaaaatgtctccaatttctgtctagagtttgtctttggaaggagcagactagaagcaatacaaccaggtggtagactttatcartactccagggaagatttaatattatctggaattatttggccacatgttttgatatttaattacatattattatatagagtgctcagttttacaaagaagaaactttgtctttccagggggtttaaataatttaaatttctcctcttttgagttttttagttccttgtttatattatgacgttaataaca

SEQ ID NO: 752419 - DNA, 627 bp, Homo sapiens
aaagaaatgaatttatggattgagttagcaatttaatctccatagcaacatgcaaaaattgagaaagtaattaaatataacatttatagtttgtggaataatttagttatctggtaattattagcatgattataaagtgacataaacaactgtgtggctcaaatgtgtgattatgtacaatatacaccaagctggcacttactgaacatattatgctgattttacaggcaattaataaatacaccgtgcagctgtgctgaaaatgctaaataatttgtcaaaaattgaatgtgtatgcacaagtctgcatttgtgtgtgtgtgtgtgtgwgagagagagagagagatctagatgcacttgaactcgtattgagctaaatggtacagaccattaatatatgtaagggcaatttaagtactgcagtagtaacaacattttaagtggaaacaagccatattttcttgatcctgttttttaagcctcattttgatttctaggttgaatataacaattatcatagtaataatagtttactattatcatagtaaaaacgttctatattttcatattttaccaaaaggcagttcacactatttaatgttgtaggcttttgtcaaaatggcaaca

SEQ ID NO: 752420 - DNA, 627 bp, Homo sapiens
aaagaaatgaatttatggattgagttagcaatttaatctccatagcaacatgcaaaaattgagaaagtaattaaatataacatttatagtttgtggaataatttagttatctggtaattattagcatgattataaagtgacataaacaactgtgtggctcaaatgtgtgattatgtacaatatacaccaagctggcacttactgaacatattatgctgattttacaggcaattaataaatacaccgtgcagctgtgctgaaaatgctaaataatttgtcaaaaattgaatgtgtatgcacaagtctgcatttgtgtgtgtgtgtgtgtgagagagagagagagagatctagatgcacttgaactcgtattgagctaaatggtacagmccattaatatatgtaagggcaatttaagtactgcagtagtaacaacattttaagtggaaacaagccatattttcttgatcctgttttttaagcctcattttgatttctaggttgaatataacaattatcatagtaataatagtttactattatcatagtaaaaacgttctatattttcatattttaccaaaaggcagttcacactatttaatgttgtaggcttttgtcaaaatggcaaca

SEQ ID NO: 752421 - DNA, 592 bp, Homo sapiens
aagagacaaagaagttcattatatgatataggtgtcaattcagcaggaggataaaacaattggaaatatatatgcatccaacattggagcatccagatatataaagcaagtattcttacagttaaagatataaaccccaatagaataatagctggagacttcaacaccctactttcagcattgtacacgtcatccacagagaaaatcaacaaagaaacattakacttactcttcactatggaccaaatgtacctaatagatatttacagatcatttcatccaggggctacagaatatacattcttctcctcagcatatggatgattctcaaagatagaccatatgtgaggccacaaaacaagtttgaaaacattaaaaagttgaaatagtatcaagtaacttctctgaccacaatggaataaaactagaagtaaatacaagaggaattttggcaactatctaaacacagggaaattaaacaatatgctcttgaatgactaatgggtcaatgaagatattaaaaaataaattgaaaatttttttgaaacaagtgataatggaaacacaatagccaaaatctatgggatacaac

SEQ ID NO: 752422 - DNA, 564 bp, Homo sapiens
gagaacaccaggtaccaggcttgggcaaattttggtatgctgtctctagaagcttcctatttttccccgactgtgggtcaaaacattaggttaagtaaaataagcaaggaacagaaagaaaaatactgcaccatgtcattcaaatgtataatctaggaaaactgatctcatagaagaagagagtagaatggtggttaccagcaattggggcagtggtgggggaggaatttgaaagatgtcgatcaaagggtataacatctcagttaaacaggaggaataagttcaagagacctattgtataaaatggtaaccatagktaataataatatatcatatttttgaaaaatgccaagattttgagtgttcttactacaaaactaacagtgatgtgaggtaatgcatatgctaattagcttgatttgtccgttccacaatgtacaggcaaacctctataatatgtggatttggttgcagatcaccataatgaagtgaatattggaataaagtatcacatgctttattgagtctctcattaatataaaagttatgtttacattatactat

SEQ ID NO: 752423 - DNA, 613 bp, Homo sapiens
gtctactattttatttttaaaccaagatgagctttgaagaggaacttttctactttctgcactggggaatgagtgaagacagccagcctgtgaggttagaagccatgtcagatttctcttactgtcataattttgcaaaggcagtttcaacttgcaggattgttcctgaaatattggccttttcctctactggctactggtctgaaatatttaaggacacaggtgaaaacatgtggcctacctctttgattcctatttccagtgtctggaatagcacacggttaaaaggtttttcttaaacttttttgtttttgttttgttttgtgtttttgaggtgacgtcttgctctgtcgcccaggctggagtgcagtggtgtgatctcggctcactgcagcctccacctctgggttcaagcaattcttctgcctcagcctcctgagtagctgggactacgggtgcataccgccacgccckgctaatttttatatttttaatagagatggggttttgccatgttggtcaggctggtctcaaactcctgacctcaggtgatcctcccgcctcagccccccaaagtgctgggattacaggcctgagccaccacgcccaggct

SEQ ID NO: 752424 - DNA, 580 bp, Homo sapiens
cacctcctgctggctaaacctgagtggaagctggccggcaagggagtttaataatgcagtcctcagcattgtggagcaagagcagggtgagaatgctggagcatgggtctgcagaggcaaagtgaaaatccagcagagtaggatgaatccatragcaaaaagcctcctactattaaaaagacaaagataaccaacattgtgaaagccgttattctgcatcaacctttttatttcacaagggtggagattgaggtagaaaacaaggactcaagttgatccatttgtaaacctagaacccttgtcacctgatggcaatccctaatttgtctcgagaacatctttgaactttctctcttggatgtacttcagagtcacacgcttctctaaggacagctatttgcaaccactttcgtgatttttcgaggatgaggtttcttaaatcacctgccgtagcccatctgcctgccactcctacgcctgtgaatttacagttccagttaaagtaacgtccatgaacagggagggaacgaaggctctccctatcccttcaagcccccaaattgatttggcactcgaagtc

SEQ ID NO: 752425 - DNA, 623 bp, Homo sapiens
aaaatacataagcatgtgtgtgtgtgtgtgtgtgtgtgtgtgtgtgtgtgtgtataaaataaaacttacaaaatatgtatgtgtgtatgtatatattaagcttgtgaagtcctaaaagcctggcagagtgggagagacatgtagctccagtaccagtaaaacaaaccacatggctaattaaatgtgttctattgatctctccactaaccgctgaaaaatacatacagattttcagttaatcagctaatagtttggcattctgcgtgctatatctttctcrcctattgttgtgattaactctatgattttaagcttttatttgtagatttgcactttacagacttctaagtccttgaagcaagcaaataaaaaaatgtagctcaatgagaacactgcaagttattgagaacactgcaagttataaaagtggtccaaggagtttcactattttttccttgcaatgtcagaacaggatgaaaagcaaatttgaggctatgtttctttccctggaagaactatatatatagttgacagggaccccctctcttttcacccttgctgacttaccacactgtccaaccaagacttgctctctttcccaatcacttcttcacgaacctctc

SEQ ID NO: 752426 - DNA, 623 bp, Homo sapiens
aaaatacataagcatgtgtgtgtgtgtgtgtgtgtgtgtgtgtgtgtgtgtgtataaaataaaacttacaaaatatgtatgtgtgtatgtatatattaagcttgtgaagtcctaaaagcctggcagagtgggagagacatgtagctccagtaccagtaaaacaaaccacatggctaattaaatgtgttctattgatctctccactaaccgctgaaaaatacatacagattttcagttaatcagctaatagtttggcattctgcgtgctatatctttctcacctattgttgtgattaactctatgattttaagcttttatttgtagatttgcactttacagacttctaagtccttgaagcaagcaaataaaaaaatgtagctcaatgagaacactgcaagttaytgagaacactgcaagttataaaagtggtccaaggagtttcactattttttccttgcaatgtcagaacaggatgaaaagcaaatttgaggctatgtttctttccctggaagaactatatatatagttgacagggaccccctctcttttcacccttgctgacttaccacactgtccaaccaagacttgctctctttcccaatcacttcttcacgaacctctc

SEQ ID NO: 752427 - DNA, 652 bp, Homo sapiens
agtttaaataaggtaatttaaaagaaagtaactttcccaagattaccaaataatgaagcacagagaaacctgcttgggtccttcccttctctttatctttattttatctttattctttaggtccctttatgggtccacctctgcctatcttaatgattaactatacaagctgaaaaaaattatagaaatatattaataactkatttaaccatattaagttcaattacaaagttcagctggtctctcagctctgggtgtgaccacagatcacaaagttctgagaacggctgggaagcatgtctaatagattgtgcttttctattaatcacacagctcttagttctggggttttatgataaatcctaaggtttatcccaaactactttcttccaatgcagcttttggtatatgaatattctatgggtagtatattttcattaataatgtctattaagtataagttagaatacatgtccctaaatactttaaacatgtggagaaatgttaaatctttaggcaaattacatacagaatagtcaatcatctttattgttcttccccagagaccaagggattaataagatattaaatggccaattttaagtattgtgttaaggcaaagttgattatagttcacagaaggaatgttagc

SEQ ID NO: 752428 - DNA, 608 bp, Homo sapiens
caacatccatctcagcaggtagagtagatggtgagattgtgatgaccatatgttttttcctgaagcatacgtactactatttaaagcatgggtcattttctcctaagacagaacttaacaaaacatgagcctttaaataaagtatsaatgtatgtataaatgaagtcatctcactagcatcattcagtttgaagaatacattcaatgatccagagccaatattaaatctataatatgaaatgggcagaaaaaaaataagactccaaattatcaccttcccagaaaccaacctctctctcaccaactgctcagaaaagaagaaagcaaatataaaagaaatatgaccattttgttattttgctcttacatggaattgaaattaagctatatggaaaattcactaaattctaccgatctatctttttaaaagggaaatgttaagcagttctgaaagagtgcacccagcttcctttccaaaggatactgctaatggagttgaacacacccttcctgtcaccccaggtgctaaatatgtggaagttgggaatatctaaatgcttggagatcctgaagatactccctgaggtggctataaaaagactacgctt

SEQ ID NO: 752429 - DNA, 477 bp, Homo sapiens
cacttggaaaactatgtaggcaaaaaattagctctctctcaccacccccccagaattaactgtttttgataattgacatgctttgttaatactgtaagctttcaacctatcatttaaaattctatcaaaacataacrtttggtggctgtaaaatagtctgctttgaagttaaacaattttccaactacttctctagggtcaggttatttccaatgttttgttataggcattgctgtgaacatttaatatagatacatattctggtcattattaggtgttgtcagaccttttaattttagttatgttctggtttgtgtagtaatagttgattgtggcttaaattacatttccttgataaataatctttggcaatttttcatgtgcttatttgccactcttatatcttcttttatgaatactgttaataattattgtatcctttcctcatatctttttaacagttgctttctgaaaaat

SEQ ID NO: 752430 - DNA, 490 bp, Homo sapiens
gctctgtcacccaggctggagttaagcagcacgatctcggctcactgcaatctctgcctcctaggttcaagcgattctcctgtctcagcctcctaagtagctgggattacaggtgcctgccaccatgcccggctaatttttgtatttttagtagagatagggtttcaccatgtttgccaagctggtctcgaactcctgatctcaggttatctgcccacctctgcctcccaaagtgctgggattacaggcatgagccaccacgcccagctgagtaagttctttggtggtgatttgtgagattctgatgcatccatcatcrgagcagtaaacactgaacccaatttgtggtcttttatccctcatccccatctcaccatttcccctgcaagtcccctaagtccatcgtatccttgttatacctttacatcctcatagcttggctcccacttatgagtgagaacatacaatgtttggttttccattcctgagt

SEQ ID NO: 752431 - DNA, 583 bp, Homo sapiens
aaggtatttcttcattcatattgtccatgtggaagttaagacattgaacctaggccgggtgcggtggctcacgcctgtaatcccagcactttgggaggccgaggcggacggatcacaaggtcagaagatcgagaccatcctggctaacayggtgaaaccccgtctctactaaaaatacaaaaaattagccgggcgtggtggcgggcgcctgtagtcccagctactcgggaggctgaggcaggagaatggcgtgaaccccgggaattggagcttgcagtgagccgagatcgcgccactgcactccagcctgggtggcagagtgagactcgtctcaacagatagatatataataatccatcaggcatatagagacacattgaacctaactaactgtaagttgccaaagttaaagccaaaaattagctcaccctgtgtttctgaaataatgtgtacactcgaatcattgctagtttttgacgtaatgttgctaccaattcttctctttaggaaactgtattccatcattgctgttggcaatgtttattttgacctactccccaactggcttttactaaaggttttc

SEQ ID NO: 752432 - DNA, 542 bp, Homo sapiens
aaagagattgtggttttgaatgatgttaatgttgtgattacaagtaataatagctccatagacagtcttgagatgacggtgtaagggaggtatgcttgagggtgcccccaatcaatccatattgtgttctgtttaaaaagaaatagtgtagtaccttattgatgtctttaattactcacaagttaaagcacatggaatgaaattcctttctttataaataagcatttaagaatttcaccagagaaaacagacatccatatttgcgaccatgttgaaaaattcttggtcyctttatggctttatcgcagaggtgagagcattttggtctttgttgagtaactgaatagcattgtatcatttaggatggctttggctgcagatgatgggaaacggtggctccaattggctcaaacattaggaaatggcttaacatcacccctgagcctggtgtggccggtggcagctcctctgccctgctctaagctctgtcctcccatctcgtccagtactttgccattatccttgagtgcctaaggagattg

SEQ ID NO: 752433 - DNA, 596 bp, Homo sapiens
tcagctactcaggaggctagggcagggagacttgcttgaacctgggaggtggaggttgcagtgagccaagatcacgccactgcactccagcctggcgacagagcgagactccgtctcaaaaaaaaaaaaaaaaaaaaagaattgggaggtaaacagtgagaagacctggacatggagaatgggacagcagcaccgggacctcctcgactcgcctgcggatgttgctttcttgtctagaaaccaagcgtgctcatccctgcatgtggctgtgattgtcgtgggggtgttcagggacagctccttgtcccaatgtctgtccmttgtcctctgtggcaacacagactaggacaggcctcactccccagcctctctgcagcctggtgtggccgtgggactgagttctggaaaaacagatgtgggtgggagatgcgttcaccctgaatgaggagttgttcccttcgtgttttaagtctctgctcctgaaacgtggaggtggctggcaatgctctttcctattctgtcacttttcttttcctctttttagtagggtctttttcagagcaaaagtttatctctttttttttttcttttctttt

SEQ ID NO: 752434 - DNA, 624 bp, Homo sapiens
tccttgcatttcccacccatcccgtctccccacttaatctactgagaatccccttccccaggaacacctgttctgagaccatccggtcgtacactcctgcatagaggggccaccctgggacctctggtccctcattgcagcctcagaccctggacagtcacttcctctgctcctattcagtgccctatttcaagtgctcaaataactcattaagaaatgatgcttggttaaaactgttccaatattggctaagctaaatgatagcactagtggtgagcatcacagtcacccctggagaccatggcaggcggggcttgggggggctgccagtgggcrctgtggtgttccatctctttatgtggacaccagcctgcagagttcgattcactttgcccacttctctgcgtgtatgttgcactagagcaaaaaaaagtttattaaaaacagaaaggatcttgggacccttagaactcaccgcatgtctgaaaatcatacttgtttgatagatgtctagatgtggaacttaggtggaaactttgtcagcactcgaaaaaacatcaccctgctgccttctggaaaaacgtcaccctgccgccttctggaatgctactatgctatgttgct

SEQ ID NO: 752435 - DNA, 623 bp, Homo sapiens
cactctctcccgctgcctcatgaagaaggtgtctgctgccccttctgtcatgattgtaagtttcctgaggcctcctcagtcatgctgaactgtgagtcaattaaacttctttcctttataaattacacagtctagggtatttcttcatagcagtgtaagaatggactaatacagagatggaacatgttttcagcttttatgtgaggctctatttttaacaaggatgaaatacctatcagggaaagaaatacaaaagcctcaatgggacccttttagaggtacactaaaaacacatcctgataaatgcaaaatggccaagttttaagataagcattgagctggagccraatgttgctatcatagatatcctttggaatataacaataagtaggaaattttatttaattgagtaataagcattacccttttattattaaaatatttagtggtcagatttctagtctgcctttatagtgcaggaataatgatgtcttagcacggtctgctgtgagattgcaccttgcatttcactgggtgctgcatatttacaacactcactagacatccatgctcactgagacctgcacacactgccagtacaggcttctcatgatggtgatgtt

SEQ ID NO: 752436 - DNA, 604 bp, Homo sapiens
tgttttatttaccatacctttatattacttttaatgtattacttacattcaataaaattaaccagttttaaattgcataccgtcatgtaactcacaacagtcaagttgtatccttgtgcccttttgcacccaaacccctggataatatggtaaatgtgtgtgtaactttgtaacttccatacaatttttccccttttacatttttaccagtagtgtaagagagagttccaggtgtcccatatccttgtcagcattaggtgttatcagtctttctaacttcagctatttttgtggctttgttgtggcaacttactgtkgtttcaattttcatttctcttaagactagggattttgatcctcttctcctttgctcattggccattcatatagcttgttttatgatgtttctagtcatatcttttctcctttatttatgggttgtttcttctctaactgttgctctataagagttcttcaaaaattctggatataggctctttatagataggatttttgcagttttttaccccagactgtggtttacctttctactttttttaaacctgtctttcaaagagcaaactttatcttcatgaggtctttt

SEQ ID NO: 752437 - DNA, 582 bp, Homo sapiens
cacgccccgctaattttttgtatttttagtagagatggggtttcactgtgttagccaggatggtctggacctcctgacctcgtgatccacctgcctcggcctcccaaagtgctaggattacaggcatgagccatcacgcccggccaagcatcttttcacgtgtttatttgccatctatctatcttctttggtaaagtgtgtgttcaagatttttgcccattttaaattaggtttttagttttattattgagttttgagagttgtatatattctgcrtacaagtcctttatcaaatctttgctttgcagatactttcctccaacctgtggcttttcttttcatccttttcacagtatctttttaaatgcagaggtttttaattttgatgaagtcaggtgtgttaattctttctttcatgggttgtgcttttggtgtcatattttttaaagtctttgcctaactcaaatttacaaatattttctccaatgttttcttctagaggttttatagttttaagtattacatttaggtatatgatccattttgagttaatttttagatataatgacatacatgaattaa

SEQ ID NO: 752438 - DNA, 633 bp, Homo sapiens
ttttttgcttaattccactccttgctgatgtatggccctgagaaacatacataaccttggggaggattaattgagattatccttagtaagtgatcaacgaatgttgcctattaaaattattttaaaatttatttaaggcaacaacaattttaacttacaggacagagtgaattactcagtaataacagttaactaccataacttgtgctcatatagcaggagatttgtttagggcattgaaaatagtttattcccactttggaacctgggagataaatcttgctagatatgattctggataactctgggacacgaaatgactaaggattggggggaaaaacttaaagggaagaaggcaaagataagctctgccratactgcaattttgcctgaagatcctcgtggcttctaagtttaccactcaaaatgaattcttgctgcatttggcatgctcagcttattaatgacaaagttatttacctgggctgggttgaatagtggccttcctgacctctaattcagcccagtttttcagttaatcccaatcctttattcacaaggaaaacaaccagaaattcttttaaaaataggtgcatgagtaaagtatcttttttattagcactagaatatctt

SEQ ID NO: 752439 - DNA, 632 bp, Homo sapiens
gctgagagtggtcggaggggaggagggcacgaccacttcacataggaccttgcaggcagctgtgaaaaatgtccactgcatattgtatgtctattggagagttgccacgagtaatgacatgacctgctttatgttttaaatacagatcactcccatgctgcatgaagggtgggctatagaggttagagtagaacggagggatcagctcatgaattcaggatagttccctgggcgaaggccgctactcaccatataacagggagcaccagcatctcacattccctacttctctgccaaacctgctctggaatctctcccttggattccttgttctgtggcctggtgacttcaccctcctcccattcatcccrccagctgtcggtagtgtgtcaaaaacctgctgtgtgcagacccaggcaaaggcaagcactgggctctcaggccccaaaccctgcccttgtggccacagctggtctccattccacccactgtttgcagatacccagaggataacatgctcctatctctgaaattccaggcagccttggagaatttcagggggaggaagtgtcccacatttgcaaacttcccattatggagcaagaccttcaaggaggccatagggtaagaaa

SEQ ID NO: 752440 - DNA, 630 bp, Homo sapiens
gtgagccaccgcgcccggccaacttgaagtctatcttatctgatacactatacctactcctgctcatgtttggtttccatgtgcatagaatttctttctcaattccttcatttcagtctatgtgtttcttcacgggtgaagtcagtttcttgcaggcagcatatagttgggtcctgctttgtatttttaaaaaattcatttagccagtctatattttttaaatggggaatttaaatgctttacattcaaggttattaataggtgaggacttatccccactacttttaaattgatttccagttattttgtatatcttttgtatctttcttcytgtcttattgtttatctatgcaatttggtgacttttctgtagtgttaacgtttgagtcccttctctttttcatctatatatctgttctattagtatgttttatctgcatgttttcataatgcttagatatcacttttttactgcagatgcagaagtaattaatcatttctcttagggccagtctagtgatgatgaattccctcattttcacttgtctggaaagactatgtctcctttatttctaaagaatagcattgccagttacagtatcctcggctgacagttttttctttcagcat

SEQ ID NO: 752441 - DNA, 610 bp, Homo sapiens
tcagtcctcttagggatgtggcagttttttaaatactgagatcttagacacatcttcaatctgtggggctatgctccctcctctagaatctttgaggatggtaactgcttccaccaataacatatgataggagtgatactgtttgaattctaaggctaggtcataaaataccttgcagcttcttgctggttctcaagtgaaagtgttctctaaggaaagccagctgccatgtaagaaatctgagatcactatattggaaaagtggcaaagagaaagataaagatataagtacaaaggcaattaaaacacaaacagttggccgggcgcagtggctcacgcctgttccagcactttgggaggccaacgcaggcggcttacgaggtcaggagatcaagaccatcctggctaacacggtgaaaccccrtctctactaaaaataccaaaaaattagccaggcgtggctggcgcctgtggtcccagctacttgggaggctaagccaggagaacagcgtgaacctgcgaggtggagcttgcagtgagccggagcttgcagtgagcccagattgcaccactgcactccagcctgagcgacagagagagactccgtctc

SEQ ID NO: 752442 - DNA, 673 bp, Homo sapiens
cagctctcctcttttacccagcacaaatgcaatcctgattataaaactatttgtgtttctaaatacaaccaaaggaaatcttagagaaacataaattagaaacctcttttattaaggggaaacaacaaaaaaaggtgcttttttaaaaaaaaaaaaaaraaaagaaaagaaaaagaaaaaacaagctgtaaaaccatgaagttaaagagctgggtctggagcagatgtgcataataactagttagttgctcccagcaggatcagaaacagctttgggggagcagaggaatatgggttggtgtgtttcagaagaggcaccagttaatactcttccaataaaaatgatgtgtcaacagtgttcagcctcaaccagtgctttctcacagaatctgcttggtaagttcagttcacaatgtgtttacctttcatggcaatgcacgatgcaattattgggtaggtcactgtcaagcaaaaacgagatataattacagagaaggcattaatgcccaaagagtacataaagcagtaagtagcttctgaggctggttcaatgcagaagtaaaactaacaggtttgctaacagctaaagacttttaattgcctcatattttctgcagctctgaccagcatccttcttacacgacaaaaaaaaaaagaaaaaaaaaaagaaaaa

SEQ ID NO: 752443 - DNA, 608 bp, Homo sapiens
ctcccaagtagctggaactataggcgtgcaacaccatgcccagctaatttttgtattttttgtagagacagggatttgccatgttggccaggctggtcttcaactcctggcctcaagtgatccacccgtctcaacctcccaaactgctaggattacaggtgtgagccaccgtgccccatctcatctgctaagtgggtttaaagaaattcagtttcatgtcaatttttaaaatgtatggttatcaaattcgacttctttttaaaaatgcaatcagataactgtatgcttgtttgatgaggggaggaaagttaatatagccaatctactcaatatttttagcagaaattatcagagactaaggaaatgwttaagtttttctcatgttggttttaattacctaatgttttcagttttctctttcattcttgtgtctttttttcattttcagtgtttcaaatacagtttgtatttaaagatttagaagttccaaaactgtaagcacagtggattgtttcctgggatgatgttaaaattatacaacaaaatatatgaaactttgtcaatttggttattggcacatacaaaatatttacaaataaacgtgtgtg

SEQ ID NO: 752444 - DNA, 714 bp, Homo sapiens
tacagagaggacccccctgtcctggactcacgggtccctctgccaccgtcgcccagcaggccatgctctcacagcagggatggggtggactgagcagagctgccctccggggcaggggaggcagaggccgtgcagggctgtggggccgggtgcagggtgggccctagagaaggagcagaacagggcatgactccctcagtcctgcaggcacaggacaccctcggccctgggcctggcttggaccactcacagcacctactccttttggcctccctctttgctaggaagccctcagccaccgtgtttctagcagcccaccccacaggcaygttgcctccacctggtgcaccaggcgcagcacctaagcgtggctcgtatccctggggaggagggcagagaaggagtgaaagcagaaagagggcacactacagagagccggacacatgcgtgccgagagggaatggagaggagaaacaagaaggaaaagacagacgttgcatgggaccaaagggtggaggcctaagaggcacagagatgcagggaccagcaggcccaggtcgggcggcaaagcctcggggggaggagtgtgctggccttggaggcctccaggcgccccctcctcaccggccacccactgaaaacaccacagtcaggggatacacaccacggactggcccagtgggggggatccggtggcggccacctctctcctcc

SEQ ID NO: 752445 - DNA, 632 bp, Homo sapiens
tcagctgctcccgcctcccatttccagtgctgcctggtcccctgaggcgtgtcccaggttgtccctaggactgtgagtccttcagcacctcccacccagcctctgagcctggctgctcagcaggattccgccgggcagcagcagccatggcccagctccccacagcctccgtctctggggcaccaagagcctcctgtcctggactttgcctggctgagaatttcactgtggtctgtggtggcygccacctctgaggtcataagtttgagctgggcatcagcggggggcacctcctgctctcccgagctgtagttttccttccgtgagttcctgcagtcctgagcatggcagggggaccctaggagcaggctgggcactgagccctcccctcctcctgccttgcagagctcaggccccggggcctccagcggcaccagcggagaccacggtgagctcgtcgtccggattgccagtctggaagtggagaaccagagtctgcgtggcggtgaggccccgggccagtgggttggggctgtccctggcccctgccatctaaccgtgctccccttgcccccccagtggtacaggagctgcagcaggccatctccaagctggaggcccggctgaacgtg

SEQ ID NO: 752446 - DNA, 506 bp, Homo sapiens
aacttagccacaaactcagtcacataataaaagattttcttggtgttttaggatcagtctgagcagatttaaaaaggagactatgttgtatttcagaggcccaccatctgtgtgggcagacagaagaagaccacagctcaattcagatggaagaggcaacaatcagaaaggatgtggctgagaggaaggactcacatctgctgtgagtccactggagccatgagtaataacagtgccttytattttagagctggtggtgagaaagctctctcaaagcctgacaagtcatctcctctactgcttatttattcgtgttattaaagatgtttataccttacttactttggtataggtctacaagtgtaacggaagagaaaaatagaaaaaaaaaaaaaaacagaactaggttttccatgatggactgcaacccacgacaggttacatctatcaagaacacagtttctctgttcacacatttaattaggaaacttgaaattgaaaggaaa

SEQ ID NO: 752447 - DNA, 508 bp, Homo sapiens
acatggagtaagggctcgatacacattagactttgtgattattactagcatgccctaaatgggcacctgatatatctggaggctgtgattcctcatttgtggagaataaagacacagaaaacatgtttcccaagaccactatttaaggtttaaatgarataacaaaagaaaactgctgtggcctgggcctggcccagagagaaaggagtgagtggaggtgggcagtgttaatcaagggatgctggctggagccctctgtaggcagggacggagttctgggagaacacaagcaccagacgcttcccctccccagtgctgagtacaagtgctccggcctcttgaagagtgatagtgactcaactctggcataaccacctccctgctcccaaagcaggctctacttttatctccccagacgatcctcctgtgaatggtcaggctttggatccaaattggatgtctgctgttgagaatgaaggattactgagctgatgggatgtgcccaggg

SEQ ID NO: 752448 - DNA, 508 bp, Homo sapiens
acatggagtaagggctcgatacacattagactttgtgattattactagcatgccctaaatgggcacctgatatatctggaggctgtgattcctcatttgtggagaataaagacacagaaaacatgtttcccaagaccactatttaaggtttaaatgagataacaaaagaaaactgctgtggcctgggcctggcccagagagaaaggagtgagtggaggtgggcagtgttaatcmagggatgctggctggagccctctgtaggcagggacggagttctgggagaacacaagcaccagacgcttcccctccccagtgctgagtacaagtgctccggcctcttgaagagtgatagtgactcaactctggcataaccacctccctgctcccaaagcaggctctacttttatctccccagacgatcctcctgtgaatggtcaggctttggatccaaattggatgtctgctgttgagaatgaaggattactgagctgatgggatgtgcccaggg

SEQ ID NO: 752449 - DNA, 599 bp, Homo sapiens
ctcatctcacacaccaggaacctgaggccagtggagaaggggccacagtgcctgtgcccacagagctgggctcatatccaagactgtgtcccctccaagcccagctcatcactctctgccctgccagtgattgacaaaccagtggaccagccagcaggcctcctctgaggtctcccagactgcctgctcctggagcaatacccaaggtgactgatgccccatgcggctggagcactccccacttgggcaggcagctttgcaccagcaccaccccaccatgcctgtcccatggaccccccaaccctgggcccagggcaggktgttcccagatgccgcagccccttgagaggtcacagggcatccctctgcccaggtggtacccccagcccaggctcgggcagcattcgaggccaccgctccaaacaaaactgagagagaggggccctggggacagccccaagctgcaagctctccacaggctcccggaacccaggggctcaggcctagatgtgttccagaagcacccctgggccgctgcatggagaaacagcagggcgcagaagcatgaaatcgttgcacttgccccatgtggccttggc

SEQ ID NO: 752450 - DNA, 599 bp, Homo sapiens
ctcatctcacacaccaggaacctgaggccagtggagaaggggccacagtgcctgtgcccacagagctgggctcatatccaagactgtgtcccctccaagcccagctcatcactctctgccctgccagtgattgacaaaccagtggaccagccagcaggcctcctctgaggtctcccagactgcctgctcctggagcaatacccaaggtgactgatgccccatgcggctggagcactccccacttgggcaggcagctttgcaccagcaccaccccaccatgcctgtcccatggaccccccaaccctgggcccagggcaggttgttcccagatgccgcagccccytgagaggtcacagggcatccctctgcccaggtggtacccccagcccaggctcgggcagcattcgaggccaccgctccaaacaaaactgagagagaggggccctggggacagccccaagctgcaagctctccacaggctcccggaacccaggggctcaggcctagatgtgttccagaagcacccctgggccgctgcatggagaaacagcagggcgcagaagcatgaaatcgttgcacttgccccatgtggccttggc

SEQ ID NO: 752451 - DNA, 447 bp, Homo sapiens
cgtacctgcctgggcatgcatgcacacacgtacatgtttctgcacacccacacacacgtacctgcctgggcatgcatgcacacaggcacacagcacgtacccataagactcaagcatgcacacgcccctgtgtgcctttggtctcagccttgagcttcacttaccaaatgtgcagggggcaaagccacgcacaggctgagggcgccgagctgcaraaggccctcccagggaaggaagtggcagcagctgttgggtgcgtgttatatccatgccaggctcctgctcagggctctctgtagattttcttccataaagagaagattttctcatccccatcatacagatgtgggcatctaggaaggggtatgacctgagaggcaggaggtgtcctgcctgggagtggctcccccagggctggggtggctgtcatcaagcccagctgactac

SEQ ID NO: 752452 - DNA, 600 bp, Homo sapiens
ctggtttctgacccacccaccagctgttgcctttccctgcagaccgggaaacgcggtgtggactctcactgcttctccggcttggaaacggcgttcctgtctttgccttctccctggggctggaatccctcctggacaggcctaaggcatgtcatgggtccccctccctccctgctgtaaccccagagcccccatgggaacccgcagcttccatcatcctcaggggcccagtgtcccaggaggggactrtggagaggtgtttgtactcctgggtgtgtctgggctgccacttgcccagggtctgggaggtgaccttgtgccagatggggctggaagctccctgagggtaggggcggggcttaccctggtgcacctgtgttgcacgtggcctcggatctcgttcctgtcatgtcttggggtcttttctattcccaaggttgtcgtaggaaggcgtttgctgacaaatgagacctggctccctccagattctgattctgtccctctcttcgtgagcctggatgggtcgggccccctgaagcctcatgctttcctccggaaaacgggaggaggaggctggcttgctgatccccaaggtctctc

SEQ ID NO: 752453 - DNA, 600 bp, Homo sapiens
ctggtttctgacccacccaccagctgttgcctttccctgcagaccgggaaacgcggtgtggactctcactgcttctccggcttggaaacggcgttcctgtctttgccttctccctggggctggaatccctcctggacaggcctaaggcatgtcatgggtccccctccctccctgctgtaaccccagagcccccatgggaacccgcagcttccatcatcctcaggggcccagtgtcccaggaggggactgtggagaggtgtttgtactcctgggtgtgtctgggctgccacttgcccagggtctgggaggtgaccttgtgccagatggggctggaagctccctgagggtaggggcggggcttaccctggtgcacctgtgttgcacgtggcctcggatctygttcctgtcatgtcttggggtcttttctattcccaaggttgtcgtaggaaggcgtttgctgacaaatgagacctggctccctccagattctgattctgtccctctcttcgtgagcctggatgggtcgggccccctgaagcctcatgctttcctccggaaaacgggaggaggaggctggcttgctgatccccaaggtctctc

SEQ ID NO: 752454 - DNA, 600 bp, Homo sapiens
ctggtttctgacccacccaccagctgttgcctttccctgcagaccgggaaacgcggtgtggactctcactgcttctccggcttggaaacggcgttcctgtctttgccttctccctggggctggaatccctcctggacaggcctaaggcatgtcatgggtccccctccctccctgctgtaaccccagagcccccatgggaacccgcagcttccatcatcctcaggggcccagtgtcccaggaggggactgtggagaggtgtttgtactcctgggtgtgtctgggctgccacttgcccagggtctgggaggtgaccttgtgccagatggggctggaagctccctgagggtaggggcggggcttaccctggtgcacctgtgttgcacgtggcctcggatctcgttcctgtcatgtcttggggtcttttctattcccaaggttgtcgtaggaaggygtttgctgacaaatgagacctggctccctccagattctgattctgtccctctcttcgtgagcctggatgggtcgggccccctgaagcctcatgctttcctccggaaaacgggaggaggaggctggcttgctgatccccaaggtctctc

SEQ ID NO: 752455 - DNA, 586 bp, Homo sapiens
gtatctcttcctggctttggaggtctggtgacatcagaggcctggggtggggccaggtgggtgtgctgagtttgtgctggtagtgtgagcccccagctttggtgcacgcgtgtgggtgcatggaatgaaggcctttggagcatgggggcatcaaggagcaagcagaagtggcagtgcccaagacagggcaggcagggctgggtggacactggagccaacagctggttccagtcctgggtcagacatggccgagctgagtgacctggggcaatgagctgaagctgcctttgtcggtgggatggggatgccaaggataccctcttgcccagggagtcagtgggatacttgtcaagtgtgtaccttgaccctgcctctrcgtagcaagggcctggcaaaagcaaattctcattctctctagaggcaggagttgctccagtcactctcctgctgaggagtcccaagtctgctctgctctctgatgctatcattagtatcatctgcactcctgtaccaatggtccaggttcaggggcatgagggagccagcagggtcttgtcctcaggggctcctgaggttatgggagtgg

SEQ ID NO: 752456 - DNA, 512 bp, Homo sapiens
gctactagtttattgtttaagttaatatcagatcacataaaataggttagaaaatagacatctatctacggttatggagaagattaataataataaacacataatttattttaacatttaatttcttaaagtagaagcttatatagtctcaatctcaattttgcatatatttgaatcagagaacaacaaataaaattaattacatatggctttaggaatcacttgcttagtaatttaaaatttatgctctataaagatattctataaagaagaaagtttgaaaatgaaaactcaggagttttaaacactattaaaaaaatattttcaagttacaattgtttttataatgcttctcaaatttttytcagcagttgcacaaaccccattattacaactacttatattagacttattttgcaaaatcaggatataaaaattattgtcctgattgttcagaatcaagtattccagccagaatccaaccacaacaaattactctttatggatcaata

SEQ ID NO: 752457 - DNA, 631 bp, Homo sapiens
tatcatatatatgtgaattaggtacagagtgcaagtaatttactggcagaaaatgataacattttcttcagacttctccatagctacactcactgagagaatagattagcacaatttctacatagtaaatacatttagattctcaaatttggataccttgattatttcctacttaaatcagaagaaagtagtcattatgaaaagtaagaactcctacagtgtagaggtcactacctctttaaaaatcatctaatcaaaacacaaaatggacaagcaaataagtaatataatttgtggaaaaacactccagccagccaagaaagaaagtgaaataagtatctcatgatggatgaaaacaaatctataaaagatcctcagtgaactttgaatccactgaaataaataacgacctgttcacaattttaaaacttcagttacaaaactgaaagtacctktaatgtacctttaaatattttgatgttaatagagaaagagggaagatttaaaacttgctagtttcatagtttttgtttgtttgtttgtttattttcccagtgggtgtacaagagattctaatggtgaaaatggacagatagtgtttaagaataaggaatgtctggaagggtgttat

SEQ ID NO: 752458 - DNA, 612 bp, Homo sapiens
gatttgtacattttaaaacacttttttggctcatttttaacggttgttcatcttttcattgttgatttgtagaagtttgttgcacattctcaatacagtccgtttttagacttatattcaatatagtgtgtgtatatagtgtgaatatcttttcctcagtctgggggttgtctgatctttttcttaacagtgtcttttggtgagcagaattaattttgattaagtccaatttatcagttttttctttcattgttagtacattttgaatacagtccaagtaatctttaaggttgcagaagtatttgcctctcttgtcttctagaggctttatgattctgagttttgcatttcagggtgtatgagaccaccaacttcattcttttttcaagagtgagactcaacattggcctttagcacagtasaagaacagtttttaaatatattacattatttattttaagggaaatgaaaattaaaactacgaaaaatacatcagattggcaaaaattcaaaagtttgatactatcatggtgactatgctgaaggagaagaggcactatcaaaccctgcaggtaagaatggagactggcacaaccctagaagggaagtttg

SEQ ID NO: 752459 - DNA, 521 bp, Homo sapiens
actataatgcaattatctgggtaatttttaaaaggtaaactcacttgattgagcgtacctttttcagaccaggtgctttaagctgaagtttcagtagttcatgttactaccctcttaccttcacactggtctttagctgccgacagctggtacccctgtccacaggtgcacctgaaggagccctcggtatttttgcactgcccgtttacacatagattcccttgctgacattcatcaatatctgcaaacacaacaacggcaatttttctgaaaaagagactacccaggagaatgcagtgctccctgcaatgcattctgggattagtgtaacaaaaataatagtacttcttaygtctggcactacacactttagtatttatcactccacccatgctgttgtatcaacctcagtatactgatctatagaatagaaataactaaaaatagacaataaatcaataagctatttataataatcatactcctcaccatcagtgtcttggaatacaacatgaaatatt

SEQ ID NO: 752460 - DNA, 486 bp, Homo sapiens
aaagctctaaaatggcagtgaatccatatgataaaaaccaagtaatctaagggacaaacacaagcctactgggcagtttgaaggtagggcacacgctgaagaggtagataataataatagcacctaatctttatcaagcacttgctacatgtgggcattaaaagctttacatacatcatctcatttaatccgaacaaaatccttatgggccaaccattttatggaggaaggaactgaagcttagagaagttcaataaccagcccaacgccacatagaaaatggtggttctgagatktgaacccaagcctatccttttaacctgactgtaagtttctgtcacaggcaaagttaaatctagtgatagaaacagttaaagaaagagagaatgtatgaattgatgtttgtttttattatttgctaacacagcatttatattgaaaataatcatctaaaatctacttcattaaaaaatattaagtccctac

SEQ ID NO: 752461 - DNA, 594 bp, Homo sapiens
agaaattccagacagcaacaggaaaatgtcatgtttagtatctggttttgtttcaaaaatgttaacaagctcagaaatgtatggattgctctctttaattattcatgcaccagggaaagtgatttataaggctgtagaatataacagcaaaatcaatttctaagaccatactttctctaggtaaagtaaattaacagacactgcagattaccatttaggagatacttataaaacttctatttttctaggctactcatgattaatgatgaagcagaatgccttgaaatatctagggtagcctgatgtgtttattctttctttacttattatagacgtaattgcatggaaccagaattctgtcaagccaatcaccgtagatagaacagtttgaactgaaagtacattgccttaatgagactatgctcctgagaaamtagcaagacagtaaaatatcactaaagaatctctacaaagaaggaaggtctccagagaggaaccacacgtaaaaacacttggtggatgcaaatggtgtaaaattaattcagcattatatcgttggcccagatttctctcctaaactgtagaagcatgcat

SEQ ID NO: 752462 - DNA, 539 bp, Homo sapiens
aaaaggtaaaatcatatgttcacacaaagacttatgattttagaaatatttatagaaaccttattcacaatggcccagatggaaacaacccaaaatgcttatcaaaaggtgaatgagtaaacaaattatggtgcattcatccaatggaattctacccagcaataaagcacagagaactactgatacacacagcaacttgggtgaatctcaaaactattatgccgagaggaagaagccccaaagcacaaaargagtgagagggaatgtattggggatggaaatgcctgttccttgactgggatggtggtcacaaggatgtgtatacatttgtcaaaactcattgagctgactcttaagtagatcaatttattttatgtacattatacttcagtaaagctagaaaaacacattaaagaaaaagttgagaacctgccttagttgagacaaattcacatcacctgtgttttatgttttagggtcagtacccggaagcattttaattctgggtgaacagtcattataataacgtggttttattt

SEQ ID NO: 752463 - DNA, 646 bp, Homo sapiens
aaaataatgtaattatttcaacagatgcagaaaaaccatctgttaaaattcaaaaccaagcatgataaagaacattagcaaactagatatataagggaacttctttatctgataaagaatatctattaagaaaaaaaaaacctatggcaagcatcatattaaatgtctttgctgctgatatcaggaaagagacaagcaagctgtcaccacttctagtcaacattgcagtagaggtcctagacagtacagtaagacatgaaaaggaaataaaagtatgcttaccagaagagaaggaataaaactagcattacttatacaacataattgtatatgtgggagatgcaaagaaatctgcatataaactgctagaattaacargcagatttagcaaggtcatggatacaagttcaatgtacaaaaatcaaatttagctctatatactggtaacaaacaattataagggtaaaaaaattttaataccattcacaaccacatgcaaatcttgaagacctaggaataagtcttaaataagctgtgaaagactttatacaaaaatctccaacaaaacactaagacaaatgaaggaaaccctaataaaggggtgtgttgtattcacagattagatgactaaatactgtaaaatgcc

SEQ ID NO: 752464 - DNA, 600 bp, Homo sapiens
aaggctgcagtgcgctattgtcgtgacactgcactccagcctgggtgtcaaagtgagattctgtctcaaaaaaagtgtggaagggataacagtgctggctcaattgattgcttcctgtgagactggacatttccattaacatgtgcccagcaaagggatttttagataatattatctaattttaactaagttaaccctcatattggaaaaattggctttaaaaatatttctgtaaaaaaataggtgaaagaaagacaacagcagaataaacctaaagaaaatggcagagcaaacccttctgttctaaatataaattctacatcagccacaatatgaggttaaaaraaaagaatggtaggataattagaccagcaggtagtcccttcaaatccaaagttatcaagaagaccatttaaattatgaatttatatccactgccattaatgataaaattcttcctagttggctggcatgttatgtcttaagatgttaactagtaataatataaagttattatgattaacaagatatttgaaagccaaacattcaaaatggaagaaaaatttcagcagctttttgagaaatttcacaaaacctact

SEQ ID NO: 752465 - DNA, 562 bp, Homo sapiens
ggttagcagatcgagaccatcctggctaacatgctgaaaccccgtctctactaaaaatacaaaaattagctgggcgtggtggtgggcgcctgtagtcccagctactcgggaggctgagacaggagaatggcgtgaacctgggaggtggagcttgcagtgagccgagttcacggcattgcactccagcctaggcracagagcgagactccgtctcaaaaaaaaaaaaaaaaaagagaaatcagggaaaagcaagtttaaattatactgagatataccattacacactcactaggatggctaaagttaaaagcagaaaacaccaagtgttgatgagaatatggagcaactgaaatttttctatatcagaggagtggaagcataaattgatctaaccacgttggaaaactgccaggagtagctattaagtctgaacttttgacttagcaatttcattcctaggtacttacttaatagggcatatatgtggtgtactaaaagatatattcatgaatgaccatagcagtatcattcattatagccccaaactggaaacagttcaagt

SEQ ID NO: 752466 - DNA, 629 bp, Homo sapiens
cacacgcacgctgaggctcagtaacactatctcttcctcagcgatgaccctgggtttctacttctgtatctctgctcacttctcaacacagaacaaagggatttttgtgggggcagacacaccccacattcctagtttacagaatttatttttggccagagctgcatttagcaatatatgagcaactctactagtaataaggagaggaagaagagaaggcgtatgtgtggatttatcttcctagggctgtgtggctcaggttaatatttaaaatggtcttgcattctctgagcacacactgactgtctgatgggggaggcgatgaggagagggacaggtggcatggggaaagctgacctaggattaaaaattaattgtgctcaattttcaaatcagatcattgyagacagatggctatgaattttaatgtgatttcatgtttaacttttttttgaggagatttaaactctattattcaccagctaggcaatttatgaactcacatttcagctttaattctaccccatcacaagcagaattatagggctggaaaaactccaccaatcatcctctgtttgaaagaaccacacccaaagccaaccaaggcaacagggatccctaacacatct

SEQ ID NO: 752467 - DNA, 639 bp, Homo sapiens
cagcactgggcattaggaagcacattctcaccctcagtcttgaagctttggccaacactcttgcctgatccccatctccagaggtttggcttcaggtgctctaaggtaggcccaggatcgggcatttttagaagctcttcagagaattcacgtgcattgaaggctaagaatcatcactctagagtgaaggcagccctgtacagattggggaaggaagcaccacatctcaaaggctacatggtcactgggtttgcccctgggcctctaggctgttttcactgatgataactgaggggatcaagrgtggaaggtggctgctactcactcacctaccctggtgaggactagcttagctagatcaagtgtgagggagcagaggaagacagagaagaaacaacgaggctgggatgaatgcacatccttccttatctcagaatcccagcctgcctgcccagcccctccccagaggagatcagttgctctttgagaggtaggaaatcctttgggaggtgatgggatggagaaacaccttctcttcctttgtatttattccagtggtagagggggaggccaacgggaagttgcttttacttctcctggggaatagctcagagatagcagtttagaactcaaggccat

SEQ ID NO: 752468 - DNA, 510 bp, Homo sapiens
cttagctagatcaagtgtgagggagcagaggaagacagagaagaaacaacgaggctgggatgaatgcacatccttccttatctcagaatcccagcctgcctgcccagcccctccccagaggagatcagttgctctttgagaggtaggaaatcctttgggaggtgatgggatggagaaacaccttctcttcctttgtatttattccagtggtagagggggaggccaacgggaagttgcttttacttctcctggggaatagctcagagatagcagtttagaactcaaggccattcagataatttaaakaattttttaagataagaaatgaatccccagccagatgcagtgtactcttagtttgaagaggtcataaaacagaatgagaacaaagtcttattagaaaattagaatcaactgacatttatttgaaaaatgcctacttctctgctctgtggatttctacaatctgtgtatctgctcttttcaaaagtaatccagaagatacatata

SEQ ID NO: 752469 - DNA, 641 bp, Homo sapiens
actcattccagggcacattggctcacacctgtaatcccagcactttgggaggcagaggtgggtggatcaactgaggtcaggagtttgagaccagcctggccaacatggtgaaacctgtctctactaaaaatacaaaaattagycaggtgtggtggcaggtgcctgtaatctcagctacttgggaggctgaggtaggggaatggcttgaatccaggaggtggaggttgcagtgagccgagattgcaccactgcactccagcctgggtgacagagtgggactctgtctcaaaataaaaaaaaaaaaaagaaaaaaaagtctgagttcattccagcattaacccaaaagtccaagtccaaagtctcatctgagacaaggcaagtccatcctgcctatgagcctgtaaaatcaaaatcaaattagttacttcctagatacaatgggggtccaggcattggataaacacacccactccaaatgggagaaattggccaaaacaaaggggatactggccccatgaaagtccaaaatccatagggcaggcattaaaccttaaaggtgcaaaataatctcctttgactccatgtctcacatccaggccgtgctgatgcaacaggtgggctcccacagccttgggcagttc

SEQ ID NO: 752470 - DNA, 641 bp, Homo sapiens
actcattccagggcacattggctcacacctgtaatcccagcactttgggaggcagaggtgggtggatcaactgaggtcaggagtttgagaccagcctggccaacatggtgaaacctgtctctactaaaaatacaaaaattagtcaggtgtggtggcaggtgcctgtaatctcagctacttgggaggctgaggtaggggaatggcttgaatccaggaggtggaggttgcagtgagccgagattgcaccactgcactccagcctgggtgacagagtgggactctgtctcaaaataaaaaaaaaaaaaagaaaaaaaagtctkagttcattccagcattaacccaaaagtccaagtccaaagtctcatctgagacaaggcaagtccatcctgcctatgagcctgtaaaatcaaaatcaaattagttacttcctagatacaatgggggtccaggcattggataaacacacccactccaaatgggagaaattggccaaaacaaaggggatactggccccatgaaagtccaaaatccatagggcaggcattaaaccttaaaggtgcaaaataatctcctttgactccatgtctcacatccaggccgtgctgatgcaacaggtgggctcccacagccttgggcagttc

SEQ ID NO: 752471 - DNA, 641 bp, Homo sapiens
actcattccagggcacattggctcacacctgtaatcccagcactttgggaggcagaggtgggtggatcaactgaggtcaggagtttgagaccagcctggccaacatggtgaaacctgtctctactaaaaatacaaaaattagtcaggtgtggtggcaggtgcctgtaatctcagctacttgggaggctgaggtaggggaatggcttgaatccaggaggtggaggttgcagtgagccgagattgcaccactgcactccagcctgggtgacagagtgggactctgtctcaaaataaaaaaaaaaaaaagaaaaaaaagtctgagttcattccagcattaacccaaaagtccaagtccaaagtctcatctgagacaaggcaagtccatcctgcctatgagcctgtaaaatcaaaatcaaattagttacttcctagatacaatgggggtycaggcattggataaacacacccactccaaatgggagaaattggccaaaacaaaggggatactggccccatgaaagtccaaaatccatagggcaggcattaaaccttaaaggtgcaaaataatctcctttgactccatgtctcacatccaggccgtgctgatgcaacaggtgggctcccacagccttgggcagttc

SEQ ID NO: 752472 - DNA, 710 bp, Homo sapiens
cagggtggtggtgtaactggcatttactgggtagagaccaggaatgcttgtggaacatcttatgtgtatagaacaggtctctacaacaaaaaattatcaggcccaaaagccactaagtgcatagactaagaaaccctacttaagaagcctaatttcaacagcttttcaaaccctctacctgggggagtaagggrggtgcaaaatgaggggcaaaaatgatatatacaaaggaattcaaagcactttccaaaaaagatcaagccactttcgttccttcctggctactgttatgaaaactattggcaagttccagtcatacgtcatataaaacagcattctaactatctggttttttctttttcttttttttttttttttttttttgtttcttcagttgattcacagagaagcaaaaagaatagaaatattgactatattatctggcagaaactctaaaaattatttcaaacttaagctttcacaaatgacaaattaaacattaaatttcttcaattccacctcctgtattaatgttttaaaataatcaacaatgagtaataagttttcaaaatttcacctgatacacaaaaatatcatattccttcatttccattcctccaacttgagtaaaaatttcatctcccatacacattaaagaacgcactaaaaacaataaaaatactggatcaacattattagagataactgta

SEQ ID NO: 752473 - DNA, 653 bp, Homo sapiens
  misc_feature 169: n = A,T,C or G
gggaatgtaatttagtacaaccactgtagaaaccactgggtatctatccaaaggaagagaagtcattatataaaaagacacctgtatatgtatgtttatcgcagcacatttcacaattgcaaagatagggaaccaacctaagtgtcagctgatgagtggataaagcaanatttgatatatatacatcatgaaatactccccagccattaaaaaaagaatgaaataatatcttttgcagcaacgtggaaggaaccagaggctgttattctaagtgaagtaactcyggaatggaaaaccaagtaccaggtcgtctcgcttacaagtaggagctaagctgtgggtactcaaagacattcggagtggtataatggactttggagactcagaaagggggagggctggctgagggtgagggataagaaactacatatttagtacaatgtacatactaggatgactgcactaaaatctcagactttagcattaaacaaaaaacaaaaatggtggtacttatagagagtttatgttgtttcatatgctagctaggacttgttgttaacagactttttatttttgccagtctggagttgtgtattactcatgaacagcagtgttcactgggctatttgcatcagtacacttgcaaaaattta

SEQ ID NO: 752474 - DNA, 629 bp, Homo sapiens
aaaggaaatacccaactccagctccctctagacattctgtaccacctaagggggtgaaaaaacaaactgagaactgtgaagtttacagcctrgggacacaggctcactaaaagactgagataaaatggtagaactataggacacttccccttcccgtgtatcttaccactacattactaaagggctatttactgcaatttctttgactcagtatattatatccgcctttcaatacaaaattacaaggcatattaaaaggcaacatagtttgaatggacagagcaagcagtggaaccaaacccagaggatgacagggatgttgctattatcagaccatgaatttaaaacaactatgattaatattgtttgaaatgcttgttccccggtgctgtaaagaaatagtacttgaacataaatttaatttagtaaggccatttttacttttgcagaaagggtacactggccagcagttttgccatgagagtacaccaaacaaaggagacagggtcatttataacctaatgtatccaccctactgctgtgtccggtttccattgtctggaacgggacctcacattctgtatttgtcctgacttgctagcaacttagaactttttaaaagaggcaga

SEQ ID NO: 752475 - DNA, 647 bp, Homo sapiens
cgagaacacgtagaaatcagatatctcataagttgctgatggaaatcagcacattaaaagcacttttgggcctgggcactttgggaggccttaggcgggtgggccacgtaaggtcaggagttcaagacctgcctgaccaatatggtgaaactccgtctctactaaaaatacaaaaaattaggtgggcatggtggcatgtkactatagccgctactcgggaggctgagacaggagaattgcttgaacccgggagatggaggttgctgtgagccaagaccatgccactgcactccagcctaggtgacagagaaaaaaaaaacagacaagaaaaacacttttgctgaactgcagaagttagacattgaattactatagccccaaactacaactacaaaatatgtaccacaaataattgaaaacacatatgcacacagtaacttgtgcataaatgtttatagcaaccttattcataacagtccaaaagtaaaaacaacacaaatgttaatcaagtatatatgtgtgtgcctatctatctacctaccttaaaaaggaataaagcattaatacatgttacaatgttgatgaaccttgaaaacatggtaagatcaataattcaacgaaaacaaattttcttatcatatgattta

SEQ ID NO: 752476 - DNA, 589 bp, Homo sapiens
gtctagatacatttctagattcttaaagttttcaagtaacagaaatattgaatatttgtataatgtgtgctttctaaaaaaacccacttgctaatatttttaaatcatatcctataatcatacatcaactgtcaacagtaacattaggaagttatttttttcaaccactaaattgggaaaggaaggaacttgcttttcttttaccatgaataaaagagctccctctgtcaggaaaacgaattaggcacccagtgtctgcctgattacttggctcaagcacgactctgcttcctcacagggacctccagagactgagttgttttctcctaacttgtggcttaatctttcattaaagtgttaagaatgagatacacggagtcaaaccacaaaataattcactgcattgttcccamccgtcatttggcaatggacaccgtgtatgtattattaataagtgctttaaaaatctaccctaaagcaatcatcataaattaatctacattttcttcattctattatgttttgatctgtatgtgcttcttggggataaaattttcagtcaaatatttcccatacatttctgtcagac

SEQ ID NO: 752477 - DNA, 589 bp, Homo sapiens
gtctagatacatttctagattcttaaagttttcaagtaacagaaatattgaatatttgtataatgtgtgctttctaaaaaaacccacttgctaatatttttaaatcatatcctataatcatacatcaactgtcaacagtaacattaggaagttatttttttcaaccactaaattgggaaaggaaggaacttgcttttcttttaccatgaataaaagagctccctctgtcaggaaaacgaattaggcacccagtgtctgcctgattacttggctcaagcacgactctgcttcctcacagggacctccagagactgagttgttttctcctaacttgtggcttaatctttcattaaagtgttaagaatgagatacacggagtcaaaccacaaaataattcactgcattgttcccacccgtcatttggcaatggacaccgtgtatgtattrttaataagtgctttaaaaatctaccctaaagcaatcatcataaattaatctacattttcttcattctattatgttttgatctgtatgtgcttcttggggataaaattttcagtcaaatatttcccatacatttctgtcagac

SEQ ID NO: 752478 - DNA, 646 bp, Homo sapiens
gtgggtgcagtgcaccgtgcatgagttgaagcagggcgaggcatcgcctcacctgggaagtgcaaggggtcagggaattccctttcctagtcaaagaaagtggtgacagatggcacctggaagatcgggtcactcccaccctaatactgcacttttccaatgggcttaaaaaacggtacaccaggagattatatcccgcacatggctcggagggtcctaaacacacggagtctttctcattgctagcacagccgtccaagatcaaactgcaaggtggcagcaaggctgggggaggggcatccrccattgcggagttagttgtttgattaggtaaacaaagcggcctggaagctagaactgggtggatcccaccacagctcaaggaggcctgcctgcctctttaggctccacctctgggggcagggcacaggcaaacaaaaagacagcagtaacctctgcagacttaaatatccctccctgacagctttgaagagagaagtggttctcccagcacgcagcttgagatctgagaatgggcagactgccgcctcaagtgggtccctgacctcagagtagcctaactgggaggtaccccccagtaggggtggactgacacctcatacggccaggtactcctctgagacaa

SEQ ID NO: 752479 - DNA, 646 bp, Homo sapiens
ctcaatgaagagaatgacttagttttgttcactcttgtaccccccaatgatgtagtgccattttggcgtatgtattagtttgttttcacattgctataaagatattacctgagacagggttatttataaacaaaagtggtttaattgacttgaagttccacgtagctgtggtggcctcaggaaacttacaatcatgacggaaggtgaaggggaagcaagcacctccttcacaaggtggcaagagagagacagcaggtgaggaactgccaaacacttttaagccaacagatcttgtgagaattcactaactatcatgagaacagcatgggggaaattgcccccagaatycaatcacctcctaccaggtccctccctcgacatgtgaggattgcaatttgagatgagatttgggtgagtacacagaggcaaaccatatcagcatatattaaatgataaataaatacactttggatacatgaatacatagaggctgggtatggtggctcatgcctgtaatcatgcacatctccagatctttgaataaagttaatattttggaatatgctgtaatttggataacttctagaataccactgtgtactcttggtgctgcttacgtaggttgaaacaagaagtagagttctag

SEQ ID NO: 752480 - DNA, 557 bp, Homo sapiens
tgggttgatggatgcagcaaaccaccctggcacatgtataccaatataacaaacctgcacgttctgtacatgtatcccagaacttaaattatactagtaaaaaactgtttcaacttttggactctagtaataacatttagcttaaaacacaaatacattttcctttttttctttttgagacagagtctcactccttcacccaggctagagcacagtagcacaatcacggctcactgcagcctcaacttgctggaggytcaggtgattctcccagcttagcctcctgagtagctgggactaaaggtgtgcaccaccccaccaggctgattttttttgtatttttgtatagatgggattttgtcacgttgcccaggctggtcttgaacttctgggctcaggctatctacccacctcatcctcccgaagttctaggattagaggtgtgagtcactgcacttggcctaagatttttcttcatatccataatctatatgtggttttctatttttgattttattaatttttactttttaaaaaaattttaaactttcttgtta

SEQ ID NO: 752481 - DNA, 559 bp, Homo sapiens
attctcttaattataatctagataaaggcacaaactgcttaaaaattctcctgacagttccaaagttagatgacaaaagttcaacttgtcaaagaaaaaaatcttcttaaaagaacatttattttcagttccaaggttacatatgtcagttgtcttttccataagccataagaacatttttttctctatagcttatctatggaacagaaaataaataaaagcacagtcatacyttttactcagaaacagtaaacttcataaaaacagatgaacttaccacaactaaacagaaagctgagctttgaggaaatggggtggtattaaagagccaaacaacttgctataaataagcttcttgaaatgctaaaaaaaaaaaattttaagtgccggactcccatttagccaatagccacataggcaccaatacacctccagtcagtgtaagctccaccacactgtcctgccattcacctcaaccttaacctcaagattaagctcatttttattgcgcacaaaggtcatctgtattaggtcaaaattcaaagtcccttgtcagaaa

SEQ ID NO: 752482 - DNA, 626 bp, Homo sapiens
tagtgatgcatttgtggctgtctggaaaaccaggagcagactagtgatacagtatttctcaaacacacacagggaaggatgcctgaggctgcgctgtgatcaccatgcaaaccaagtctgagcagatacaggccttggaaacggaacacaattcattcaaagaaatactccaattctaatggcctcatagaaagtataaaatgcagttgaatcttaaatcagttttacatgattcacaacttatagctctatctctaacctgcccccttctccaagaacatgattttaaataacaatttcagtttagattttaatattccttctgttggactttaccctaatgaaatttaaattactaaaagcaaacagacccactgtttttagccctcatccttctggtggtattttgkgttttaggtttatttatttttctgaaatcaatggaatagacccatactatctgattttctctttgccataaaaaagaaaccaatatatgtttctcacacataaattagacgctgatcttgggatatgcaactattagaaaactccacatcaactaaaccaaattattcacaacaaggaaagtgatggagaaaaagtttttttagatatgcctctga

SEQ ID NO: 752483 - DNA, 637 bp, Homo sapiens
tagacttgcattttctttttacccattgcaatgaaatgagaaatggattctgttaaatcagagatagctacatagatagatatagatgtatagaaatagatagatagatacagatgcattacctaataatacgtaaaaatatttaattatattcactttcaaaggaatgccatctaaaaatcacaatattatactcttaactgtcttgactcaaatgtctttagacacttataccataagcatctctttctccattatacatgagggcaaattccttcagggtagataacaaattttttcctacttatgaaaacaaaatcactaaatagatttagttcaagatrttgcaaaaaggaatttctctttgcagtaaaatcagataatcaaacttttaagaaagttatacatgagctaagaacatatttataatataaattacttagcaaatggaaccaagatttgaagtggcatggaaatgcattacttccacaagaggaaaaaaaaaaaagaaagggtgatcatttattcacaggcacagattcgagccagatacccataaaaagttaatgggggaactcacaacctcgtaaaaagctgtagaagagcatcctggcccacatcaaatcaccatacacat

SEQ ID NO: 752484 - DNA, 643 bp, Homo sapiens
ttggagagacacatcaacaaatgtctcacaattaatacatttggcctaatgttttaggacaagacaaatatttaatttgaacaagagatgtaaaagttaggaattactctagtgaaaacagatttggatgatgatggacaatattagtgtggtgcctcaacaaagacttttgcctcttgcatactattatgattgcacggtaatcttacccagctagtgttttcttaatgtcctggggagcctgatcattgtaaattacctgtgacatctcattaatcctctttttcctcacaaacgcataattaatggtaacattgacaataatacacaaattagctaagtgacgctttatggtgttggttttgattaacgtcaggaacccaaaaatgacgttaatgtaatgcagatcccaaaaggcagtctgcactttgaccccagacatacattttgtttgcaccatcaccaagattaatcctcctytggatgaagatgagacaaaactctggccactggcagtgtgtgctaggctgtcggaaaacaaaccgcctcaactgcatttgtttaagaaggaaatcttaatgcacagaaaacaacggcgtagtgtcatttcctattgtctagttaggacaaagataaatgagca

SEQ ID NO: 752485 - DNA, 572 bp, Homo sapiens
tccaagacatgattagaagaacctgtacatgccagatatgtcattaattgctgtgtcaagtcttcaacggaattgtgattgatgctgccagcttgcaggatctgacttcccttagagcattcggtatctttttgtatttattgcaacattctgctttaaaatttgtacagcaatgtttctattattgacttaaatcttacaaattcttgtctttacaacctatgagatgcttctgaaattaaacccccaaaggcttacacagaatatagacacttggaagaaaaaaatatatatattttttaaaaatcagagttgcatctacatgaagactctaactattgagactttaaaaatagctataattaaagctaytgaagcatctgtattataaaatcctattaagacactgagaaaaagcgataagcccatactcattcattcattattaacaagtaggtttgcttgtaagggatcacatttttagaagaagttcagaaaattgttctgaaattcacattttaaaaacttgtgttctctgtagttctttaaactcttttccccttaatattcct

SEQ ID NO: 752486 - DNA, 686 bp, Homo sapiens
gtgaagaaagttcaaaaaatttaaatagatatctgacataccttcatatattatgctaggaaaattttccttaaaaggggtttagcaatttcaggttcattatacttcttcttctgtggatctatttacactatttgattctgtaataawtaacattcacataatcataatattataaagcctattttattaattataaaattttagactcagaaagaaaatatgaagtctcagttacagttaattttaattatataatggaatgtaaatgtcttaaaacctgaaaaggtaaagataataatataaccaaaacatcaacaaaaatcacatatcattagatattgcctaaggttactaaatcataaaacacattctttaatgtcataaagataatattataatacaaattagcagaattcaagcctagagataaaaatgtactgatgagaagtcataaggtgtttctgaagttgatatagctagaaagaaatcaataacatttagtatttacatttacaagagtaactatcagaataattgaaaaataaaaaccgttaaagctgcttatctcagtacagaaaaggggatttgtcctttctgttttaaacctttctacatgggctgaattttcattaactagtccaggtattactttaaaattttaatacatttaacatatttccatg

SEQ ID NO: 752487 - DNA, 522 bp, Homo sapiens
gtatccacctttgtttaggcaaatagaatctagctgagaactagattcatatattcttattatcacttacacataaagcaaacaaaaatacacacccacatacacactcacacgcagttatatacaaacccatccaaataaaagataaagtgtggcaaaagaagtggatgtgaaagaaagctattcttttttcccaagataaatggcacaaaagccaacatstcattaactatccaaagaagatgatatactacacaactacgtctagataatcatacattaataattttcacattacacaactgaaaagatttataaaggcacaatttaagaatctaccttgcttaagtcacttaaaagaagcaaagtgacaagaggaacaagcaattaggtacttctctacaacaccacaatttgaagtgacttcctacatgccccttgctttagtcaaatatcatttcaacatgcaattatccctgtgctttgatgcagctgtcatctgttttgtttttaatgcaaata

SEQ ID NO: 752488 - DNA, 501 bp, Homo sapiens
gaggatccctcagttaatgacagggaattcaaccagaacttatgtccaagtagagttaaacacccctctcaaaacagccagaaaatatattgataatgcctgttaatgtgaacctgcaggtttttgctgtttgagaagcaatgatacctgttaaaaggtgaactgaggcacaataaaatttgaaagagtttatttgcacaaacagcgactgataaattgaacaactccaagctggaagtggttcaggagatccaaccagggaacaccaggggaaggcttttctagggcaaacacagaaggaagtraagaaaagaaaacatttgattggttactgttatacagttgccttatttgatctatcttgctggaaagtccttagttaaataagttatttggcagcttctgataggttagtcttaagtttcattttttctttaatacaggcatttacaagaagtagcacaagtttggtttatgtttgcaaattgagcaaagttaagg

SEQ ID NO: 752489 - DNA, 570 bp, Homo sapiens
tttattttttggtatttcaagtcagaaaggtgggagaaaattggaaatgttagtttggagagtcatagccagatattggaggaaactagaagaattcaggatacagtccagtttacagaaagataacaaaacctcaaagacaatgaacaaggctagaattgaattactatagttttctacagtgcacataatttttctgtctatagtcaccctcatgtttcacaaacataatcatagtaagactaatttgtttgtaaaataagtctagyctcattaaatttggcctgattatttaaataagcaaagcaagaatagtgactggtcatatagacactttttaaatctgctttgctggaacttttaataaggaatctctgattagacttttaaaagcctctccattccagactcaatggtgcatgcctatagtcccagttactcaggaggctgacgcaggaggattgtttgagcccaggagttcaagactcgcctgggaaacatagcaagacctcatctctaaaaaaaatacaataaatatatatacataaatagttaaacatagaattaaaa

SEQ ID NO: 752490 - DNA, 577 bp, Homo sapiens
gtaaaaggaggatcactgttgtctgatgaaaagggtgccatgaatacataggccctcaataaaatggtttgaatgaatgactataaaaggactatcataatggggaaatggaacgtaagacttaagggagacaaggacagtgctttgcctgtcccagaactgaagcctcagttttacgttcgatttgtaggactgagcaagaaggagataggtaagaaagagatagtagtatagataaacaaaaatacaaggtccaacaattggccatttgtagtataatttcttcacttctaatgtgtgcttaatcaattttatgatttatcttaattattttacatctattacctagcaaaaattacttttaaaacttctcaatgtaatgtaccaatataattaattttcccatttattcttttctaaaaaacagaaatgaagagaktacagctgcatagagatgcctgtcaaatgacaagtgcctggagaaagcattttgatgaatgaacaacagaatgatcacaaaacagcctttggggccagcagtgtgatctgggttgagactccactgctcttgtgggat

SEQ ID NO: 752491 - DNA, 627 bp, Homo sapiens
acatgtgcaagtttgttatataggtaattgtactcaatgtttagctcccacttataagtgagaacagaaacattccgaatagtactaggcacgtattaagcattcaggaattgttagctattgtttcctaaggcaccatctattcataatattttgttgtattttcctgacgggcaagccttaaatgcttattctttttcttttattttgtcttcttttttttggaggggggacatttaatttaactatagtgccaggtctctttaaaagatattgattaattccaattagtttggccttaaacatgaaaaaaatttagtctagggacattaccaaaagtattattttcttacacatgttctcagtaagtcttagtaaaacatttcaaatgaagacctaamtctgaagtctggaatatttgttgacattattgtcaacattattgttctgatcacagagtgtctcctggagaataaccagctaaaaatatgtgtttgtgtgtgtgtgtgggtgtgtgggtgtgtgggtgtgtatacatatagaacctgcagggttgaaacagcagtttataggaagttgttagtatgacatgacattcagctaccaactatttagtaatttgttttc

SEQ ID NO: 752492 - DNA, 601 bp, Homo sapiens
gataagtatcactttggccgggtgcggtgactcatgcctgtaatcccagcacttttgcaggccaaggtgggggggatcatctgaggtcaggagttcgagaccagcctgaccaatatagtgaaaccctgtctctgctaaaaatacaaaaattagctgtgtgcggtggcgtgtgactgtagtcccagccacttgggaggctgagacaggagaattgcttgaacccaggaggcagaggttgcagtgagccaagattgcaccactgcrctccagcgtgggtgacagagccagactccttctcaaaagaagagtaaagtatcacttctcacatcatggcactgagagattccgatgcattaggcttctaaaagtggtactgaagaaatttccttagaaccccttttagtgagagtgatagtagttccgtgggggatttaatagctgttatttgaaaaacagttctcatgcttaaattaatggggaaatgcggagctgaacaaaattaaacagatttatttgctgagagttttctcagagcctttgctagctaaggaacattttgaatctctctgtgggagatgtaatgtgccgcattccccaaatt

SEQ ID NO: 752493 - DNA, 604 bp, Homo sapiens
aaaataaagctccaattagcatagctcatcatagaatagaaaatcacaaatcaaatcttatattttaatgttgaaaggaagatatgggtaggagaatagtcaagccaacagtaacatcagcaacagaaatgtataccctggagttctgcataggtattacatgtgaayaaaaaaatagatctaagcttcctaagagtcaaatgaaaatgagaaacatggttaccagatacacaacattataaaataagaacatgctgttctttctagcaagttccagcttttctttattttatactgaaacatgggaaatacttctcccttaggtctttagaataaaacaggagagtaccctgtgtggaaccctaaacaacatccatccttaaacatatacctacaaacaaatttcacttggttgttccctcttacatccctccgtgttggtcaccatgatccctataaacattactccagttatctggcaagattaaaaggtataatttacagtatttggaatgatgggtagactgaatatccttcaggcaatcccgggtttctgataagaattatgcaatagtagcatcaagcttttatctctccttagggt

SEQ ID NO: 752494 - DNA, 604 bp, Homo sapiens
aaaataaagctccaattagcatagctcatcatagaatagaaaatcacaaatcaaatcttatattttaatgttgaaaggaagatatgggtaggagaatagtcaagccaacagtaacatcagcaacagaaatgtataccctggagttctgcataggtattacatgtgaacmaaaaaatagatctaagcttcctaagagtcaaatgaaaatgagaaacatggttaccagatacacaacattataaaataagaacatgctgttctttctagcaagttccagcttttctttattttatactgaaacatgggaaatacttctcccttaggtctttagaataaaacaggagagtaccctgtgtggaaccctaaacaacatccatccttaaacatatacctacaaacaaatttcacttggttgttccctcttacatccctccgtgttggtcaccatgatccctataaacattactccagttatctggcaagattaaaaggtataatttacagtatttggaatgatgggtagactgaatatccttcaggcaatcccgggtttctgataagaattatgcaatagtagcatcaagcttttatctctccttagggt

SEQ ID NO: 752495 - DNA, 643 bp, Homo sapiens
gagattgttttacctcttccattctgatttggatttattttattggcaatgtcaattgaacagaacatttataaaatcatgctctaggatgaaggagaatttatcccttggatacgagaaggcttctacacacacaagtaactaaatgtgacataccacattaacggaatgaagaataaaaatcacatggtcacctcaaatattacatgatcatctgtcaaatggagaaacagcatttgccaaaactcaacaccatgataaaaatgctcaacaaactagatacagaggaaatgtaccaaagcatgataaaggccatatatattrcaaatccaccataaacatcataccaaacagtgaaaaactgaaatattttcctataagatcagaaacaaaagaagaatgccaactctcaacacttctattcaacactcttattcacatctaatacattgatgagaatgttttctgctattcagtaattctattgagatgtttctggtttttaaaatttcagttattatggctatttaattgaaattgctgatacatattttagattgaaattgatagtttttatgttgatctcgtatttttaaagaattacaatattttattgttttatgtatatatttgttagtatgta

SEQ ID NO: 752496 - DNA, 643 bp, Homo sapiens
gagattgttttacctcttccattctgatttggatttattttattggcaatgtcaattgaacagaacatttataaaatcatgctctaggatgaaggagaatttatcccttggatacgagaaggcttctacacacacaagtaactaaatgtgacataccacattaacggaatgaagaataaaaatcacatggtcacctcaaatattacatgatcatctgtcaaatggagaaacagcatttgccaaaactcaacaccatgataaaaatgctcaacaaactagatacagaggaaatgtaccaaagcatgataaaggccatatatattacaaatccaccataaacatcataccaaacagtgaaaaactgaaatattttcctataagatcagaaacaaaagaagaatgccaactctcaacacttctattcaacactcttattcacatctaatacattgatgagaatgttttctgctattcartaattctattgagatgtttctggtttttaaaatttcagttattatggctatttaattgaaattgctgatacatattttagattgaaattgatagtttttatgttgatctcgtatttttaaagaattacaatattttattgttttatgtatatatttgttagtatgta

SEQ ID NO: 752497 - DNA, 546 bp, Homo sapiens
tgggctcccacagccttgggtagctctgcccctgtggctctgcagggtagagcctcattcccggctgctttcatgggctggcattgagtgcctgtggcttttccaggtgcatggtgcaatctatcagtggatctacaattctgggttctggaagatagtgatcctcttctcacagatccactaagcagttcctcagtggtgactttgtgtagtggctctgactccacatttctcctccatattgccctagtagaagctctccatgagggctttgcccctgcagcaggcttctgcctggacatttagatgtttccgtacayccttgaaatgtaggcagaggtccctaaacatcaactcttgccttttgtgtacccacaggccctatgccatgcggaaggtgccaaagcttggggtttgtaccttctgaagcaatggctcaaggtgtgccttggtcccttttagccacagctgaagctggagtggctgggatgcaaggtgccatgttctgaggctgtacggagcattgggatcccgggcctggcccac

SEQ ID NO: 752498 - DNA, 406 bp, Homo sapiens
gtgtgtgtgagagagaaaaaggtagcggcatggaaatcaggcaacattttatgaatttagtccttgaaagagtctctgagctgcaatgtcttcagatagaagaaaacgtgtgtgtgtgcgtgtgtgtataaatatgtccatgtgtgcatgtgtgagtatgtgtgtgtgtgtgtgagagaragagagagaaagaaaatatatattatttatacagtgtgtgtgagagagaggacttagctaaatattcaaaaattggcaaccttctcttcttctagctagagtcacttcactattcattgtttgtgaagaataaactttcctcattaggaatgccagtttgacaaacactgtaatagtgagaaaacacctaagactaaagaatgaaactagggtaggctggccatta

SEQ ID NO: 752499 - DNA, 599 bp, Homo sapiens
tctttacaatgatgtttaaacaccttctatgtcactgtaaataactgttcataatttctaaattaactcttttaggccactttttgtttcagatttaatccatcaaaatacattcttaaaaatgaaaatatataataaattttaattttcttgtttcctgcaakaaatatttttaaaatacctgagtataatttaatacacttttatattagaaagttttgcttatgggtagctgtactaggtgctatttagtttattacttttgaatttttctttttctaaactttcatattcttccacaagaacatagcttgaagttttccattgttagttaactttcatgttactatctttgaaaacttccacttcctttcattatacatgaagactgcaatctacctgctgaattcagacacctttgtttgaactgattagcaaatatttttagctttcatatgtggctgttacccagatcaatttattcctgtcaatatggccttttgtctatcaaatagtaactaagataattattaaccattttaagcactttcttattattttgtaaaatgttataaaacagttacaaagataaatcttgt

SEQ ID NO: 752500 - DNA, 599 bp, Homo sapiens
tctttacaatgatgtttaaacaccttctatgtcactgtaaataactgttcataatttctaaattaactcttttaggccactttttgtttcagatttaatccatcaaaatacattcttaaaaatgaaaatatataataaattttaattttcttgtttcctgcaagaaatatttttaaaatacctgagtataatttaatacacttttatattagaaagttttgcttatgggtagctgtactaggtgctatttagtttattacttttgaatttttctttttctaaactttcatattcttccacaagaacatagcttgaagttttccattgttagttaactttcatgttactatctttgaaaacttccacttccyttcattatacatgaagactgcaatctacctgctgaattcagacacctttgtttgaactgattagcaaatatttttagctttcatatgtggctgttacccagatcaatttattcctgtcaatatggccttttgtctatcaaatagtaactaagataattattaaccattttaagcactttcttattattttgtaaaatgttataaaacagttacaaagataaatcttgt

SEQ ID NO: 752501 - DNA, 599 bp, Homo sapiens
tctttacaatgatgtttaaacaccttctatgtcactgtaaataactgttcataatttctaaattaactcttttaggccactttttgtttcagatttaatccatcaaaatacattcttaaaaatgaaaatatataataaattttaattttcttgtttcctgcaagaaatatttttaaaatacctgagtataatttaatacacttttatattagaaagttttgcttatgggtagctgtactaggtgctatttagtttattacttttgaatttttctttttctaaactttcatattcttccacaagaacatagcttgaagttttccattgttagttaactttcatgttactatctttgaaaacttccacttcctttcattatacatgaagactgcaatctacctgctgaattcagacacctttgtttsaactgattagcaaatatttttagctttcatatgtggctgttacccagatcaatttattcctgtcaatatggccttttgtctatcaaatagtaactaagataattattaaccattttaagcactttcttattattttgtaaaatgttataaaacagttacaaagataaatcttgt

SEQ ID NO: 752502 - DNA, 606 bp, Homo sapiens
agaaacattatcgcctatgactagaccagtgcctgcagttccaaaatcatcctcatactactcctgggttgccatgtaactctagcaaacagggatagaaaaagtgacacactttatctaactaatgagttaaaactatgaaatatgcagttaacttatcttcctcattaattcaagttaatgaagcaagtagaaaggagaattgttctgattcatgcaacatacaaagactattttcccaagcatttcaaattttttgctgtttctattcactctggctagctctatatacagagaaagtttcaatagacctatttcccatgtatttagactatatatgtatcctaatatggtygtaagtacaaggtatttttatagatttagagaaggaactaggagggaaaaatgagaagagtaaagagaaggcacaaaaaaacagtttttgttattgctattgttgtttcagagccattcacctatagctaaagcatgtttaagatgctttacgttgtggaatgtctccagaatctttcctgggccatattctctgatgtatttactatgtctctgaagcaatctcatccctttcattgtttaaatgtcatt

SEQ ID NO: 752503 - DNA, 506 bp, Homo sapiens
ttttattctcttgtttttttctctagaaatcaggtgggttttcttcttgtttatatttattttgaggaattttaccctaccaacaaaagcagagctcagaattttgtacttactgcaaacaaaaataatttatcctaaattttcttttcaataacaatggcctctttagtcttattttaaagacatatgtacttctgaaaattaattaaaggcttatacttttgctaayacaaaaagggatgtgaataatacattttgtattaaggtgacaatttaataacaatatacatactgaattttaaaagttttaaagttgtttatacattatcaagacctgttatcaaagtcagactggagtcatgcattaaaaagttaaagaaggaaaagtgaaagtgttgatttttactcaagataaatattatttctaggtctgttcatttaatgatacctagcaacaccacatgctatttctgtgtgcagatatcactgaagactgtcagtaggct

SEQ ID NO: 752504 - DNA, 512 bp, Homo sapiens
taatgattatacatagataactaataaaaaagaaatattatggtttgacttcaaagtaaagcaagtttgatatgtttttaagtttatctggaatgaagtcatttctgatagaagttgtttgtctctcttggatttgttgattgagagaaatcttgtcatctggtttttacttaaatacagtttcagactgaattgtatctttcctacagacatttattaaaatagacacatttttaaaacctattttataatttggtatrtggccagctctctgtcatatttggtgccttaaaaacacctttcatgaaagcttgtgagaattttccatggccagattcagctatctgtcatagtcgggtggaaaaagaatcctccaaaccagtgtcacactgcaatggcagggtgatgcaagccatttgggggtcaagggtaatgggtgatagcctttttagatttttatcccattgtcatgtaaaggtatatgtacaccttatatatttcagttttactaa

SEQ ID NO: 752505 - DNA, 512 bp, Homo sapiens
taatgattatacatagataactaataaaaaagaaatattatggtttgacttcaaagtaaagcaagtttgatatgtttttaagtttatctggaatgaagtcatttctgatagaagttgtttgtctctcttggatttgttgattgagagaaatcttgtcatctggtttttacttaaatacagtttcagactgaattgtatctttcctacagacatttattaaaatagacacatttttaaaacctattttataatttggtatatggccagctctctgtcatatttggtgccttaaaaacacctttcatgaaagcttgtgagaattttccatggccagattcagctatctgtcatagtcrggtggaaaaagaatcctccaaaccagtgtcacactgcaatggcagggtgatgcaagccatttgggggtcaagggtaatgggtgatagcctttttagatttttatcccattgtcatgtaaaggtatatgtacaccttatatatttcagttttactaa

SEQ ID NO: 752506 - DNA, 584 bp, Homo sapiens
atttaaatctaaaatgtttataaagttattctattttttaaattttctataaactttcaagttacattacctctcaggatactgcaatactggtattgaaataggggcggtcttctatacttatgtataaaatctggtccccaaactgagaaatcaaggacaggaggcttccagaaagtagggggatgttatttcattcctattcatttttactctaaaatgttgatgtttgcagcttaaagtacacttatttttaaggtgatatctagtraataaataacacagatctggttttctttgaaaacataatttggttcatctatttcataaataaattttatagtgccattttcatagcagctaaagtaaaataaatatcttaatatgcattttatgaaaacatgatgaattagtattatcctctgattatttttagaaaacataattggcacaatttgtacaaaatgaaacattgcaactatttgtttatcaaattatatttctgggaaaaaaatggtcatattattgggataccagtataaaaaattaaatgaacagaaaattttgatacaaaactcagcatt

SEQ ID NO: 752507 - DNA, 584 bp, Homo sapiens
atttaaatctaaaatgtttataaagttattctattttttaaattttctataaactttcaagttacattacctctcaggatactgcaatactggtattgaaataggggcggtcttctatacttatgtataaaatctggtccccaaactgagaaatcaaggacaggaggcttccagaaagtagggggatgttatttcattcctattcatttttactctaaaatgttgatgtttgcagcttaaagtacacttatttttaaggtgatatctagtgaataaataacacagatctggttttctttgaaaacataatttggttcatctatttcataaataaawtttatagtgccattttcatagcagctaaagtaaaataaatatcttaatatgcattttatgaaaacatgatgaattagtattatcctctgattatttttagaaaacataattggcacaatttgtacaaaatgaaacattgcaactatttgtttatcaaattatatttctgggaaaaaaatggtcatattattgggataccagtataaaaaattaaatgaacagaaaattttgatacaaaactcagcatt

SEQ ID NO: 752508 - DNA, 403 bp, Homo sapiens
ttagagctacatattttatacaaatttaccttttttttttgaggcggtatctttgtgatgtcactcaggctgcaatgcagtggcaggatcatggcttactgcaacatcaagctcctgggctaaagaaattcttccacctctgccataaaggatagctgggccaccatacctggctaatttgtttgtgagtgtgtgtctgtgtgtgtgtgtgtrtgtgtgtgtgtaggcagagtcactatgttgcccaggctggtctcaaatccctggtctcaagcaatcctcctgatttggtctcccaaagtgaaatttaaattttgcatgtcgatttgaactaaaaatcttgacatttctgttcatttttccattaaattcaaatattatcattgaaaagactgacatctta

SEQ ID NO: 752509 - DNA, 403 bp, Homo sapiens
ttagagctacatattttatacaaatttaccttttttttttgaggcggtatctttgtgatgtcactcaggctgcaatgcagtggcaggatcatggcttactgcaacatcaagctcctgggctaaagaaattcttccacctctgccataaaggatagctgggccaccatacctggctaatttgtttgtgagtgtgtgtctgtgtgtgtgtgtgtgtgtgtgtgtgtaggcagagtcactatgttgcccaggctsgtctcaaatccctggtctcaagcaatcctcctgatttggtctcccaaagtgaaatttaaattttgcatgtcgatttgaactaaaaatcttgacatttctgttcatttttccattaaattcaaatattatcattgaaaagactgacatctta

SEQ ID NO: 752510 - DNA, 644 bp, Homo sapiens
aaaaaccacagtgtttctcagactttattgtgtataggaattacctagggatcttacatcctttttttttttcttttttttttttttttttgagacggagtctcgctctgtcacccaggctggagtgcagtggcgtggtctcggctcactgcaagctccgcctctcgggttcacgccattctcctgcctcagcctcccgagtagctgggactacaggtgcccgccaccacgccagtctaattttttctatttttagtagagacagggtttgaccatgttagccaggatggtcttgatctcctgacctcgtkatccacccgcctcggcctcccaaagtgctgggattacaggcatgagccaccgcgcctggcctcttacatacattctaatttagtaggtcttaagtctggaaattttacatttttaataaactcttgggtaatgccaatgctactagttcatactttggatcataccttgagtagcttacctctaaagcagtcattcattaatttattcaatagacatttgttgagcccccagtgtgaactaggccttttaagttcatagagcatttcctgctcttaaggagctcacatcctagcaaagtcaggctcatacacagataactaatgaaaatgaga

SEQ ID NO: 752511 - DNA, 444 bp, Homo sapiens
gggttttctaaatataggttcactttttttgcaaacaagatggtttgacttcctctctttctacttgaataccttttatttctttctcttgcctgatttccctggcagaacttctaataccatgttgaatagaagtgctgagagagggcatccttgtcttgtgcctgttttcaataggaatgcttccagcttttgctcaytcagtatgatattggttgtgggtttgtcacatatggctcttattattttgaggtatgttccttcaatacccagtttattgagagtttttaacatgtagggatgttgaattttatcaaacacttttccacctctattgagataatcatgtggtttttgtcttttgttctgtttatgtgatgaatcacatttattggtttgtgtatgttgaaccaatcttttaccccagggatgaagcctatttga

SEQ ID NO: 752512 - DNA, 594 bp, Homo sapiens
aaactaaatatatattgttgcctattccacgcacatgcaaacaatttctgatcctctttttctaattggaatagaaagaaagacatttgccattcacatgacctcatccatgttactgaggttggttaacccactctagcaaagatactacatctggcacagcaactgcagttgaggctaccaattaattgaatttgcaataatctactctcatttcccaggatctctgtgttctgcaagagcaagtcactgcattaagacaacttaagtggggatatgatagcaacyaccacccttatatcttttaggttcctaaaggtactaataatttccactattccccatgcgatacaacttgtattttatttactaccttgatttgggtgggggatatgaacagtttcagaaacatccacttggctctccccacttctatagcctctgtcccactcactaaaggttcagtgttgggattgcatgtattccaaacatgagaacttcaattacgtacttggaaccagggaaaatgaccactgtgtgggtcctcagacctagtggacttactgcaagccagatctctgccaggagtctgtt

SEQ ID NO: 752513 - DNA, 594 bp, Homo sapiens
aaactaaatatatattgttgcctattccacgcacatgcaaacaatttctgatcctctttttctaattggaatagaaagaaagacatttgccattcacatgacctcatccatgttactgaggttggttaacccactctagcaaagatactacatctggcacagcaactgcagttgaggctaccaattaattgaatttgcaataatctactctcatttcccaggatctctgtgttctgcaagagcaagtcactgcattaagacaacttaagtggggatatgatagcaaccaccacccttatatcttttaggttcctaaaggtactaataatttccactattccccrtgcgatacaacttgtattttatttactaccttgatttgggtgggggatatgaacagtttcagaaacatccacttggctctccccacttctatagcctctgtcccactcactaaaggttcagtgttgggattgcatgtattccaaacatgagaacttcaattacgtacttggaaccagggaaaatgaccactgtgtgggtcctcagacctagtggacttactgcaagccagatctctgccaggagtctgtt

SEQ ID NO: 752514 - DNA, 621 bp, Homo sapiens
gtatggtatcaagtttcaaattcagcctatgggtggagagtggtagcaaagatcaatttccttgatatctaaaagcttaaacataacagcagttgcaattatttaaacaatattctgttaaaaaaatgcttttcttcttattaaaataactttaatacaactaattccatcacaataataattctaatattaaatttggcattgtattaataacagatagatggaaaatrtagaaaaagccaaagtagaaaattagaatgacctattttgtaattctaagagattttataattttgattgcatttttcctattattttatgttcatgtatatttaaaacactgagatcacagtgtgcatattgttttatactagcacacaatcccttaaattttttatatttctccctagtctttttctatacctattaggtgtcatcgtatttgtttgtatttctggccaattttttcactaattattattttgtaaacattcttattgtttttacaaaatcataatgactgattttaatcgctatctgatatcctactatatataggaaatatgtatatatcctactatatataaatatctgttaaatgtatttgggtgatttaaagct

SEQ ID NO: 752515 - DNA, 600 bp, Homo sapiens
cagccttaatgagagaagactgtctgcttggaagcctggaagagatactggactttgtgtaattttactttttgtaaacagacagataaaattttatttatttatcctgtacaacatatcattttgaaacatatacacatgatggaatgaccaactcatttcacgcacttaacatttttgtgatacgaacactttacactcagcatttttcaagaatatattattgttaacaatagtcaacatgttatacaatagatttcttgaacttattccycctatctaactgaaattttatattctttgatcaacatctccccaaggccactcacccaccctccccaacttctggtaaccaccattttactctctatttctatgagattaacttttttagattctacatatgagtgagctcatgcagtatttgtccttctgtgcctggcttttttcacttaatgtaatgtctttcaggttcaaccatgctgttgtaaatgacaggatttctttttttttttaatgactgaagagtatttcattgtgtatatatacattttccttattcattcattcattgatatacagttgagtccataacctagc

SEQ ID NO: 752516 - DNA, 588 bp, Homo sapiens
ctatataatatatcataaacacttatatatgagtacatattaaacagactgagtatcccctatctgaaatagttgagaccagaggtgttgcagatttcagggttttttgtttttttttttttttttcagattttggaatattcacattacataatgagatatctgawggatgggacccaagtctaaagacaaaatttatttatgatttatgtgcacctcatgtacacagcctgaatgtaatttcatttttgctttggggacccagaataaaccgtgttctgcacctgcgttttcactgtgacccatcaagtgagactgtgtgtaaaatttaccgtttgtggcatcatgttggcgctcaaaaagtttcagaatttgaagcattttggattttcatattaggcattctcgccctatgtatcatgtatatatgccatacatataatatacatgatatatatacagcgtgtgtgtatgcgtctatttaatcatctttcacacaataatgtaagcgccaccaaggcaaggacttggtttttttccccactgtaaccccagagcctaagagcatgcttggtacagagaaaggtg

SEQ ID NO: 752517 - DNA, 569 bp, Homo sapiens
aatttttttccctgccttgcttcttcctttccccctctctcgtcccctcctcctctctccttccactggcccctgccccctcctctccactcttaaggagatgctactaactcgctagcggggattcaacccggaggcgcccgagggcttttccgattctaggcggggctggggagrtgccaggatccccagggctcccgaggctaggctgagaattggcggggtgtcggagctttgccttagggcaaagggaaatgcaaattttaatgacaggttaaaaaaaagccccccaaaataaacctaacaggttttgacattcgaagccagggggaccacgggcctgcggatgcaagcgagtcctacggactcctgcgcgcgagctcgcgggcgccgctgcgggccttcccgctggcaccttttcctaggtttccaaccttcctccccattcccgttcctacgggagattaacacacacacaagccttcgtcgtccagtgcatggtcacttgcacgtcttgttaactatttccctctgctgtaagggcgctgggctgggatgtagcggaatct

SEQ ID NO: 752518 - DNA, 493 bp, Homo sapiens
gcaaaactttctgattcattcattcaggacaacatgttgatccaaattgtgtgctaggagctgcaccagcttgccctctggaataggtcctgcagggtcgtggcatccctttaaatgtgaggaagaaggagagagatctacaaggaggctggatcccccagccagggagtaagggagcargattagcacccagcaccctgcctatgctttctacccacttctctctgtcaaagtggctgatctgccctcctggagggagtggtgtccagatctcaaacagggctgggtgctcaggtgctgggcagggagttttggtgggagggcatatgaagtaaaggaaaccaggatctgagcctctggagggagcaagttggagttggagcaagaggcaactgggatctgagtgtctggtccaccaaagaggcagaagaaggaaaaagttccagagagagaattaataaaatcaagggagggtcaagaggtcaagaagtgg

SEQ ID NO: 752519 - DNA, 634 bp, Homo sapiens
accttcagtacaatgttgaataaaaatggcaggagtggatatccttgtctttttcctggttttaggggaaaagctttcagtctttcactattaagtatgatgttaactgtgggtttttctttcttaagagacagggtctcactctgtcacccaggctggagtgccagtgatgcaatcataacttactgcagcctcaacctcccaggctcaagtgatcctcccacctcagcctcctgagtaggcaggactacaagtgtacaccaccaagcccagctaatttttttttcattattgttattattttggtagagatagsgtttcactatgttgctcaggctggtctcgaattcctggcttcaagtgattctccctcctagagtctctcgaagggattaaaggtgtgagccactctgactgaccactgtgggtttttcatagatgtcctttttcaggttgagaaagttctcttctattcccagtttattgcattttttttttatcgtgacagaattttgggttttgtcaaattcctttttcatatttattgagatgatcttatttttcatcctttagtctgttaacaaggtatattatactgatttttgcatgcaaaccaacttttgcatttcagggg

SEQ ID NO: 752520 - DNA, 627 bp, Homo sapiens
gagtgtgggtggaagctataaatatgataagctatcattccttcgattacattatgttataaggcaaaagggagattacactgggtgggcctggtctaatcacatgaaccccgtaaaagccatatttctctggctggttgcaggaaagaaaatcagagagatgcattctagctggccgagaagaaagcaaatgttcgtgttgcaaactgcctatggggggccacatgaaaagaaactgtaggcagcctctgggagctgagactcatcctcagctggccgccagcaggaaaatggggacctcrgcaccacaggtgcaactaaacaaattgtgcgaacagggagccagcaggaggccctctaagccctaggtgataactacagcctcaactgacacttcgatttcagctcagtgacacctggagtagacagcctggacttctgacttacaaaaacggagacaataagtttccactattttaagcagttaaatttgtagtaattttttaatgcaaaaacaaagttaaaacagtaagcacaagtcctggtttgtccaagataatcacagtttatgcatgttgtccctgcataattaatagtgtctcctttcacactcaagtgggtctggtt

SEQ ID NO: 752521 - DNA, 618 bp, Homo sapiens
gatagggggaaaagctagggtatggtctcagagatcagtttctgggtgacctcacaggactatctggagcataaatttcatcatagatttagtctcatcttaaagcgaggaggcctgtcttattaaccctattgtcagtcatcaaaaggytgagatgtagcaaaagaaaagtacattgctagccagaaaagggaagtctcttttcatattatgggctgcttctctcttcatacaaagagaatgacaagatgttctgccaatgcttagtgggagaataattttaatttcttctcactactacctttctgggttatctctgaatatggttgttaggcaatcaggtcttccatttttatattgtgtttacatacaaagcagatatgtgtcttaactaaacacagattttttttcctctggtagctaatcctagtgaatcctccatgaggccattgttctgaatggaagaagagagatatatgcaataggaaaaggtgacgtggaatctatgagagtcccatgtttatgtagcatattgtgcctactgtatctattcaggtgaatctcaaattttctacttctattttagaacagattgctgctgaatcttggtgcatataa

SEQ ID NO: 752522 - DNA, 582 bp, Homo sapiens
agcctttaaaaataacacatttccacttcccaactaccctcatagacaggttttattgtttttatcatcctcactttccagatggagtaacttagctatagggaatttaagttgcttatctaagtcacaaaaatggtaagaaatggaaatgagattygaacctgggtagtctagctgtacatctcaagtatttaaccccactggtatactaacagtttatgtattttagaatccagactatctcatctgaatgctagaatattacaacctggatttatttcaatatatctctattgttcatctttcagtgtatccagctgtactgctcctggtaaaaggtagtttagtgaaaactatttatcttaatttgctagtctcatgaggaaggagacagggcaaggcaaacaggagttgtgaaaagatggtttctgtgctcccacaaatcttaagactattttgttcctctctcctccaagaacaaaagcacatattctgccggggtcaggcttgagaaagaagcacttaacgggaacctgccctaacaaaggtgtaataatcttttatttggtgtaaacggcacta

SEQ ID NO: 752523 - DNA, 467 bp, Homo sapiens
tccccatcccccacaaaaagctgatgagatttagctctttctcacagagagcttgcaatgcagatggaggaatatgtggaaacaaatgtaaagcagcccgggaacccacagcactagaaagacacaaaatgcgggcggaggaagaactctcagagggcagagtcagcaaagagtgtgaacgatgggcctgggcttaagctgaaacttcaagggtcagtcagatgcagctagccaagcagagcgggagagccagctggcacacragggatggcacagcacgctctcaggtaagtaaggagctgccctgtcagagcagagctgagcgggaaagatgagcaaagaagatgcagggagggtttagaggacctttcacagcagttaggagtttaaatttgatgcagcagaaatggggtttgaacagaggagtaaaatggtgaaagtgtatttcacagagatccgtggatggt

SEQ ID NO: 752524 - DNA, 616 bp, Homo sapiens
gacagaaaagataactgagaaagcaggaaaagatggggagatacgtttcctccactgtaaaaggagaaacgaagaaagtaaatgttgagcttccctgggggagtttcctaattcctcatttggtgtatttatacatttttctagtaaactcaattacttggtttccggattcatcaacaacagagtagaaatagtcgatcaaaaagcaaagaagagctactacaggcaagttggcagtaagaagtaaaaattatcacttaatagtcattaaatatcagagaggaaaaaaacctttagcaatttggcaatatctattaaaatataaactgtacatattgtctgaccaaacaattcaatttctgtgagtatatcttacagaaataactataaaaattcaccaatatattgtttttaattaccaaaaaaaaagaagaaaagggaacacaaygttttgcaacacaagactagttaaatgaattaaaagtacatctataggctatatagtgaggtaatatgcaaccattaagattgaactaaatgctggggcatgaaaagatattcaaaatatcactttaaatgacagataattgcaaaacagttttatagtatattttta

SEQ ID NO: 752525 - DNA, 525 bp, Homo sapiens
atggaaaaaagaacatttaatcagcctcttattggacacaggtgttttttctactttacttttcaatattgtatcaatgctgaaataagcatctttgaagctgaatctcatatccagcaattggatttmtttttattttattttattttattttattttttttttttattgatcattcttgggtgtttctcgcagagggggatttggcagggtcataggacaatagtggagggaaggtcagcagataaacaagtgaacaaaggtctctggttttcctaggcagaggaccctgcggcctcccgcagtgtttgtgtccctgggtacttaagattagggagtggtgatgactcttaacgagcatgctgccttcaagcatctgtttaacaaagcacatcttgcaccgcccttaatccatttaaccctgagtggacgcagcacatgtttcagagagcacagggttggggataaggtcacagatcaacaggatcccaaggcagaagaatttttcttagtacagaacaaaat

SEQ ID NO: 752526 - DNA, 530 bp, Homo sapiens
gccttagcaaatggcagagttgagactatgtttcagtgctctttcccctttcctcccctaactgcttcttccaacaaaatccaaccctgagctggctacttctaagactcaacctctcatacttttcttcctctgaaagttgcagctgacagtcttaacattccgaagacttcctcacsgctggatgtgaattaactctagcactgggctcctgggaggcagaaggcttggctgacagccttgtatgcaaaatgacatttaggccttaggacttagtcagttacagagtcctgctccttaagagtaaaagttttcagacgctagagtgtaatatcaaaaaagccaaaccgaattaggaacggacctatcactttattagcctcccaacatgcacacatagacagagctatgcaagcctgctgcactgtgacttcacacgctcccccaccccactttccgaactcagaagaaactcgttgcgcatttctacaagactgcagattggtgctggacagaaactatttccaact

SEQ ID NO: 752527 - DNA, 639 bp, Homo sapiens
tgaaccaggaagcacgaacatcagcagggaaatgcttccccaccattagcctacttctctgatctccatcaagtaaattgcaaacatggattgggtctgttagcatcctgctttctacattccttctgaagaatctatactcctaccccttagcacaaagtaatggcattttctattcctttaaaaaatgcttcaccagagcacaagatggtggaactggcatgttggagttcaactgttaatatggttttttttttwaagtagtgaataggggctgggcacagtggctcacgcctgtaatcccagcactttgggaggccaaggcaggcagatcacgaggtcaagagatcaagaccattctggctaacacagtgaaaccccatctctactaaaaatacaaaaaattagctgggcatggtagcgggcgcctgtagtcccagctaccctgggaggctgaggcaggagaatggcgtgaacctgggaggtggagcttgcagtgagccgagatcgcgccactgcactccagcctggacgacagagtaagaccccatctcaaaaaaaaaaaaaagtagtgaataggaagaggcagcaatagaatatgccaaaatactaaaactggcaattgccttttgctgtggg

SEQ ID NO: 752528 - DNA, 639 bp, Homo sapiens
tgaaccaggaagcacgaacatcagcagggaaatgcttccccaccattagcctacttctctgatctccatcaagtaaattgcaaacatggattgggtctgttagcatcctgctttctacattccttctgaagaatctatactcctaccccttagcacaaagtaatggcattttctattcctttaaaaaatgcttcaccagagcacaagatggtggaactggcatgttggagttcaactgttaatatggtttttttttttaagtagtgaataggggctgggcacagtggctcacgcctgtaatcccagcactttgggaggccaaggcaggcagatcacgaggtcaagagatcaagaccattctggctaacacagtgaaaccccatctctactaaaaatacaaaaaattagctgggcatggtagcgggcgcctgtagtcccagctaccctgggaggctgaggcaggagaatggcgtgaaccygggaggtggagcttgcagtgagccgagatcgcgccactgcactccagcctggacgacagagtaagaccccatctcaaaaaaaaaaaaaagtagtgaataggaagaggcagcaatagaatatgccaaaatactaaaactggcaattgccttttgctgtggg

SEQ ID NO: 752529 - DNA, 640 bp, Homo sapiens
tggaattgcaggtgcccaccaccacacttgactaatttttgtatttttagtagagatggggtttcaccatgttggccaggctggtctcgaactcctgacctcaagtgatccacctgccacagcctcccaaagtgtggggattacaggcatgagccactgagcctgacctcctcctttctcccaaaaaaaaaaaatgtttttcaatgagaaaagcgaggcaggtggagagtagggtagggaaaagcttttctattcacatatgtaaaaaaaaagttactgttcaagagaagcagtccttgtaacagaagcagacatactgaagtacaagcacagagttcaaatttagatctgggacccttaaaaaacaatgtcaagcctggaactatgcggctagtagaagtcagaaccatttcttaycctaagtgggaatcaaacatattaactaccaaggctgcaactagcttagctgtgtgctctagggcataccactctaatatttcctcatataaaaaatggagataatactaccaccagcctttcctagaagttgtgagatgaaaatgggataataatattcataaattattttgctttgcatttagacatttagagttctgagtacgataaattcatttcagtc

SEQ ID NO: 752530 - DNA, 497 bp, Homo sapiens
aggaagggggggtctccgtttataaaggcagctgctgtcccagctgaacaagaatgcacagctgtttgggggctgtctccagactagcatgccttttgtttccatcttcttctggggcagggctggggatggggtggggtgaaagtctatcataatgtttaccttgggggatgctttgccacatctccgcccagatctcattttatggtgtgtggagttttatggaccaatttaacgtgggagaggagacgagaaggctgatgtgcgaactgaagttgaagagtcataaattcaaaggaaaattattccagaattataagccctacttaccaktgtccaagggtaatagccactgttcaggcaggggttggacttccaaagttatttcaggggccatttgtaggacaagcaccctttcatttcatttggatggataaatatttttaaatggggtctcctaaattgttaggatccagccaaagtccccaaattctgat

SEQ ID NO: 752531 - DNA, 537 bp, Homo sapiens
gccccactaagttttgtattttcagtagagacggggtttcgctatgctggccaggctggtctccagtgcctgacctcaggtgattcccctgcctcggcctcccatgatgctgggattacaggctgagccactgcgcacrgccaaagatacatagtaactctttgtatgcaaccatgtaagtcctccaattttcttcttcttcaaggttgtttgaattttattggttctttgtatttacatataaattttagaagcagttgttcaatgagcccacatcccaaaaaaccctttatggtttttattgggattgcattgaatctattgaatgtatgaatcagtgtggaaaacaaatcttaaaattatgagggttgttttggatatataagcatgatacatctctataattaagtgtctttaatttcagcaattttgtagttatcagtgtggaggtcttacacaccttttgttaagtgtattccttagtatttgacgattgtgatgctattacatatggtaatgttttaaatttttattttt

SEQ ID NO: 752532 - DNA, 537 bp, Homo sapiens
gccccactaagttttgtattttcagtagagacggggtttcgctatgctggccaggctggtctccagtgcctgacctcaggtgattcccctgcctcggcctcccatgatgctgggattacaggctgagccactgcgcacggccaaagatacatagtaactctttgtatgcaaccatgtaagtcctccaattttcttcttcttcaaggttgtttgrattttattggttctttgtatttacatataaattttagaagcagttgttcaatgagcccacatcccaaaaaaccctttatggtttttattgggattgcattgaatctattgaatgtatgaatcagtgtggaaaacaaatcttaaaattatgagggttgttttggatatataagcatgatacatctctataattaagtgtctttaatttcagcaattttgtagttatcagtgtggaggtcttacacaccttttgttaagtgtattccttagtatttgacgattgtgatgctattacatatggtaatgttttaaatttttattttt

SEQ ID NO: 752533 - DNA, 591 bp, Homo sapiens
cagaattggaagattgcattggagaacaggcagaagtgctgcacaacaattcctatggaatcattattgattggtcccctaagggaatgtttagcttgaatttcacctctcagtctgcatgccacggccacactatgttcagctggtctaaacaaaatggtcagatggtagaaatggtaagaaatacagcaagagttcctattatctggaaacatggtggtacagtgccacctcaacttcaaatgatatggcctgctgtaggagctaaacacaaagatttgtggacactattaatggctcttaaataagatcaaaatttgggaaagaataaaaaagtatctagaaggacactcgacaaacttgtctttggatgttgcaaaattaaaagaacaaatatttaaagcatcccaggcacacctgatcttaaygccaggaacaagagtgcatgaaggagccgcagacagattagcagctattagcccattaaaatggatcaagacacttgggggctctgtgatttcaatgatgattgtgctttttagtctgtgttgtttgtccttttgtagtctgcagatgtggatcctgactcct

SEQ ID NO: 752534 - DNA, 654 bp, Homo sapiens
ggatgcaataagaacatgttagcacatttgtggtatcgctgccaaagatacataactgaatcccgtcatgaaggaacaacacacaaacccaaagtgaggcacatgctgcaaaatagctggtctataatcttcaaaagcatcaaggtartgttaccaaaacactgggcatttggtctaggtcctgctcctcgtggcacagaaaggcaatcactgagacactaagtattgccaaggaagaaggctttatcgggtgctgcagcagaggagatgggagctcagcctcaaatctatctccctgattgactaaaactaggggtttatacagcagggaagaaatgtaacaatgtataagaaaacaagaactaggaagggccaaggaggtatctggtggtgatcaggtgagtttcagttctttgatccttttcttgagaggcctaaaggtcctttcctgaggaaggaagttggataaaacagatacaaatttcaagctttaacagcagaagggtcaatttctatatttatccaaaaacaactgtctatgggcctactgggcaagtttcagtaatatgagttttgtcaagactgaggaactggttcagactggagtagactgaggttggtcctgaagtggatccttctactataaagaatatt

SEQ ID NO: 752535 - DNA, 654 bp, Homo sapiens
ggatgcaataagaacatgttagcacatttgtggtatcgctgccaaagatacataactgaatcccgtcatgaaggaacaacacacaaacccaaagtgaggcacatgctgcaaaatagctggtctataatcttcaaaagcatcaaggtagtgttaccaaaacactgggcatttggtctaggtcctgctcctcgtggcacagaaaggcaatcactgagacactaagtattgccaaggaagaaggctttatcgggtgctgcagcagaggagatgggagctcagcctcaaatctatctccctgattgactaaaactaggggtttrtacagcagggaagaaatgtaacaatgtataagaaaacaagaactaggaagggccaaggaggtatctggtggtgatcaggtgagtttcagttctttgatccttttcttgagaggcctaaaggtcctttcctgaggaaggaagttggataaaacagatacaaatttcaagctttaacagcagaagggtcaatttctatatttatccaaaaacaactgtctatgggcctactgggcaagtttcagtaatatgagttttgtcaagactgaggaactggttcagactggagtagactgaggttggtcctgaagtggatccttctactataaagaatatt

SEQ ID NO: 752536 - DNA, 509 bp, Homo sapiens; identical to SEQ ID NO: 735469

SEQ ID NO: 752537 - DNA, 648 bp, Homo sapiens
ggaatccccacactgtcttccacaatggttgaactagtttacagtcccaccaacagtgtaaaagttcctatttctccacatcctctccagcacctgtttcctgactttttaatgattgccattctaactggtgtgagatggtatctcattgtggttttgatttgcatttctctgatggccagtgatgatgagcattttttcatgtgtctattggctgcataaatgtcttcttttgagaagtgtctgttcatatcctttgcccactttttgatggggttgtttgattttttcttgtaaatttgtttttgttctttgtagattctggatattagccctttgtcagatgggtagattggaaaaattttctcccattccattcattcctgttcactctgatggtagtttcttttgctgtgcagaagctctttagtttaattagatcccatgtgtcaattttggcttttgtggccattgcttttggtgttttagtcctgaagtccttgcmcatgcctatgtcctgaatggtattgcctaggttttcttctagggtttttatggctttaggtctaacatttaagtctttaatccatcttgaattaatttttgtgtaaggtgtaaagaaggggatccagtttcagctttctacat

SEQ ID NO: 752538 - DNA, 605 bp, Homo sapiens
atgaggaaatgagtgacttgggagcttggcaagtggcaggaggcctgaaatctctggtgtcttggaaaatgtcgcccccattgccaacctcatttacagagctattgtgtacagggccccgcagcaagcccttcgtgtgctatctcatttattgatcacagccaccctcttatttygcccattttgcagatgagaaaactgagtcacacataggtccagcaacttgcctaaaattgcacggctagtaagtagcagatccagcgcttaaagccagctgtctgacttgagaggcccctctcttggccatgatggtattaattcctcttctttcaattcattccttctcccttaacaaatgaaagggcagctttgagctcctctaccacagtctcgaagcactgcaggaaaggtccactgcagtgtccctgacagtggtcagcaacctcggttatactctcccagtgacgaggggctcactgtctcttaaggctatgctgcctctaatcttggacagtttgcaaggttggccagtctttcttctattaagccaaaagttgggtccctgcaagcttgaggcgtcccccagcagtgctgcttctgccctc

SEQ ID NO: 752539 - DNA, 605 bp, Homo sapiens
atgaggaaatgagtgacttgggagcttggcaagtggcaggaggcctgaaatctctggtgtcttggaaaatgtcgcccccattgccaacctcatttacagagctattgtgtacagggccccgcagcaagcccttcgtgtgctatctcatttattgatcacagccaccctcttattttrcccattttgcagatgagaaaactgagtcacacataggtccagcaacttgcctaaaattgcacggctagtaagtagcagatccagcgcttaaagccagctgtctgacttgagaggcccctctcttggccatgatggtattaattcctcttctttcaattcattccttctcccttaacaaatgaaagggcagctttgagctcctctaccacagtctcgaagcactgcaggaaaggtccactgcagtgtccctgacagtggtcagcaacctcggttatactctcccagtgacgaggggctcactgtctcttaaggctatgctgcctctaatcttggacagtttgcaaggttggccagtctttcttctattaagccaaaagttgggtccctgcaagcttgaggcgtcccccagcagtgctgcttctgccctc

SEQ ID NO: 752540 - DNA, 656 bp, Homo sapiens
  misc_feature 613: n = A,T,C or G
ctggccttctgtgtgcaggccatttttctcactctagcacatgtgattcctccagtcccagaggtcaaggtcagaagagcaacttaatacatctctgtaatcaggggagatgagctccttggacattggaaacattgtgctaatccactccaaaatattctagctcaaggccaagtgcagggggcttatgtcagtggaagccccactccttcaatgtcagtacaagcaccaaaaggaaaagaaaataccccaagatattctaagtggctcagccttgggagagaccttaccctggaatttccctgaaatgtcatcaggawgcagggtttgaagcatgttcctttccaaccggccctcccagtcccctctacatggctgtacccttagacccatcagctcactgcctcctcactgtcctggggactcctgcacctggggactcacatttcttatggtttttcctttcccccagcagtgattcagcaaatgcctgtgcactctaggctacagagatgaagcatggtctctaccctcccagagctcacaggctgccaggagacagacaaatgataaccagaatatagtaggagaacgacctttctgggctgggggnagcatagtagagaagctcagagaagctttcacaagggtggaga

SEQ ID NO: 752541 - DNA, 615 bp, Homo sapiens
ccaacacccttacagagaagggccaagttgcataagagctgtgtggctgcggctgtgctttgtacagaactgagagggctgcgtgcccatgggagagggatgactcagcattgctgttgctaagggaggccaagatggcgagccaaggggccagggcaggggcagcgtgtgcagatgcctctgggagcaccccagtgtggagcagagagtgcccacaattccctcttcaggccagtggcctgctcgtgtacgcattgagtcttctcccacatcatgttgcccctgccccagctgataagctctcttcacagttctgcatgctcaccagctccaagcagcagccttgggtttgcacacatttgaagtctttggggcatggaggggtktttcaggcagaaggtaaatctcaggcaaagcaaggatccaggatagtgtgccaatgagtagtcccattggagtgggagatggtatccccacaggagaaagtcccataaaagacctctagaaaggacaagtcattacctaatcacgcaaggccttcagcgactggcttgcccacacttgagtctgaaaatcaggggccattgaaggttttggagtaggtgagtgctggtg

SEQ ID NO: 752542 - DNA, 581 bp, Homo sapiens
gagggagaaggatggaagaaaaggagagcattggacagttgatcgtgatggaaaggaaagatattttcttttggtaaaaggtgaaatgggagcccttataaaccctgatcagcccaaagttggaaagaataatgttatgatcatgaaagtgttacggatatggttcttttcccccagatttggcctgatcagggattctatatgctggaatttcatgtatcacctattaatgcaataatgttattaataattataaattaaagagcagccgacttagtaggttcttatttgcagacaccatgccaaaccctttattatccattatttcatttaattacctcaagaaccctatgggtaattactattgccttttgaaagtaagggaaacagaagckgagaaatgaaataactcgtctgaactccactgagaggcagcgcagggaggccaatggtgggggctctggactcagaccctggatttaccctaagaataccacttcctgggtgccaggtactcctgcctgggacagagaagcagggagtttgaatgcttttgttgtaatgataatgagaatggtgat

SEQ ID NO: 752543 - DNA, 632 bp, Homo sapiens
aagatgtgggactcaggatcctcatctgctaactgggcatgactttcccaaggtcacacaactaaaaggaggcagagctaagatttgaactctgatcctcctgcctcttccatgagcccatacttccaacatgacagggctgattcagttccctggtctcatgacccacacccccaggaccttcaggaagtccacggcaccggaatcaaagctgggcgaasgacataaacacggggccgattcctctccccaacccctcccttgctcttaacacagaagaggctggggctgcccctctgccatcgtgtgctgaagaatataacatgaaccagaagaaaatatcaagaaagcactcacctggcccggagctgcgggtcacctggttccatcacagcacagaggccttgtctgaactatccagaggcagcttgggggctgctgtagaggccttggctgatgttattagggtggacctgagcaggtggtgctgggggagacaggagagagaaaagagggactcactgtacaggtctccactgccgaaagaacaaagcaaaatattttcattcatgagttcatccagcctaaacacgcacctaatccctaggaactgacagtgcaaaacagctccc

SEQ ID NO: 752544 - DNA, 632 bp, Homo sapiens
aagatgtgggactcaggatcctcatctgctaactgggcatgactttcccaaggtcacacaactaaaaggaggcagagctaagatttgaactctgatcctcctgcctcttccatgagcccatacttccaacatgacagggctgattcagttccctggtctcatgacccacacccccaggaccttcaggaagtccacggcaccggaatcaaagctgggcgaacsacataaacacggggccgattcctctccccaacccctcccttgctcttaacacagaagaggctggggctgcccctctgccatcgtgtgctgaagaatataacatgaaccagaagaaaatatcaagaaagcactcacctggcccggagctgcgggtcacctggttccatcacagcacagaggccttgtctgaactatccagaggcagcttgggggctgctgtagaggccttggctgatgttattagggtggacctgagcaggtggtgctgggggagacaggagagagaaaagagggactcactgtacaggtctccactgccgaaagaacaaagcaaaatattttcattcatgagttcatccagcctaaacacgcacctaatccctaggaactgacagtgcaaaacagctccc

SEQ ID NO: 752545 - DNA, 625 bp, Homo sapiens
gaaattgtggaaaatcagacacaagctcatgtcatgtgagtggctgacctccaatgaaaggtgcatgctcagtctcagcaggtgtctacttttaaaatgagggcattgattgggaaagaacgggacgcagtggataactggaatagacatacttagcatctggcagaatccccatgttggcttcctgaccagtagggtgagagctgttccggtgggaaaggccaaatggaagccatcagagctggctctacctagaaaaatagtaaatcagaaacaatatcgcactcctggagggattgcagacattggtgccaccatcaagaacttgaaagatgcaaaggtggtgattcccaccatgttcccattcaactctcatatttggccggtgcagaagayggatgaatattggaggatgtcagtggattatcgtaagcttaaccaagtggtgactccgattgtagctgctgtaccagatgtggtttcattgcttgagcaaattaacacatctcctgatacttggtatgcagccattgatttggcaaatgcccttttctccattcctgtccataaggcccaccagaagcaatttgccttcagctgacaaggccagcaatataccctcact

SEQ ID NO: 752546 - DNA, 626 bp, Homo sapiens
caagtcagtagcaaagtgctatgcttatatagaaacatcctccaactcggcagacattgacaagatgacaaatggagaaacctcatcctactggcagtcagatggcagtgcctgttcacactggattcggtgggtggtatataatacttttttgttttttaaaattttggattgttttcttcttaactgcctactctttgtattttaagtggctatgaagatgctttaagaatcaagtaaaatgaatcatgtaaaatcatgtaacctggcttatatattcctaacagrtaatttccctgatattttaaaggaggaaataacatttgattaattttagattagtactgatttcatatcttttttcactagtttctcaggaaaattaataccacaaagaataagtacttacatgtgactgtattttgaaatatcctttctctacttttttttttctttttaagacaggatcttatttttgtctcccaggctggagtgcagtggtgcagccatagctcactgtaacctcagactcctgggttcaagcagtcctcctgcctcagtctcagtcgctgggatttaggcaggcaccaccatacctggctaatttctttatacttttttgtaga

SEQ ID NO: 752547 - DNA, 551 bp, Homo sapiens
cattaatctatatgtccttacttcagtactacactttttttactattgtaaatttatttatttatttatttatttatttatttatttatttatttatttttgagaccaagtctcactctgttgcccaggctggagtgcrgtgacacgatctcagctcactgcaacctccgcctcctgggttccagcgattcttctgcctcagccttccaagtagttgggattacaggcacgtaccaccacacttggctaattttttgtatttttagtagagatgagattttaccctattggccaggctggtctcaaactcctgacctcaggtgatctgcctgccttggcctcccaaagtgctgggattacatgcatgagccactgcgcccagcctaacgtttgtatttttagtagagatggggtttcaccatgctggccaggctggtctcaaactcccgacctcaagtgatccacctgtctcggcctcccaaagtgctgggattacaggcatgagcaaccacatctggccagactattttaaatttgtataaaattttgaa

SEQ ID NO: 752548 - DNA, 614 bp, Homo sapiens
agtctgtccaacatagtgaaaccccgtctctactaaaaatacagaaaattaggtgggtatggtggtgtgcgcctgtaatcgcagctactcgggagactaaggcaggagaattgcgtgaaccccggaggtggaggttgcagtgagctgagactgcaccactgcactccagcccaggcgacaatgcgaggctctgtctcaaaaaaaaaatatatagaaaaaacatatatattacacatataagcatacacaatatataaatatgtataaacatatataaaaacatattttatatatatgtttatatatatatatatatttataatcccaacgttttgggaggccaaggtaggagcataaaggccaggagtttgagatcaacctgggcaacacagtgaggccccatttctacaaaaaagtgtaaagaaattagccaggcatcgcggtgcatgtctacattcmagctactgagactgaggcaggaagactgcttgaacccaggagtctgaggttacagtgagctatgactgtaccactgcactccagcctgggtgacaaaaagagatcctgtctaaatatatatatatatatatatatatatatatatatatatatat

SEQ ID NO: 752549 - DNA, 585 bp, Homo sapiens
cccaaaaattacttctttaaagaaaaaaaaaaaatcaaaacttttcttgaatattctaaaacaagtcttgatctatcctaaatattatttgttcgtttttaacatgaacttcaagcctctgactagactgggtacctacggcttaaaaagagaaagcgacaggaaggtaacaacgggcttacctcctgtgcgagagcgactgatccttaatgaagtccatgacgtccttcagcacagggtatttctctttcactgtgggcaccagtctggcctcctccatggatcgaaaggagagcagccggagtcgccctcgggtgaagggaggccggcgggtgggtgtggaaggtgacaagggctcttcagctgtggcaggggacacrtctgcagcaggaaggccactgctggatggcagctttggctgggtgcccaggccaggactctggtctcctgtggcagggggtgcggcttcagtgggagatactgaggcttggaaatgctcttccaccacagagcttgtcctctgacgcttgttgagtggctggagatgactggtttcatcagcagtctccaacttttcgcagcttt

SEQ ID NO: 752550 - DNA, 682 bp, Homo sapiens
gggggatattttccgtctgccccagctcaagagttttttgggtgttcctgacttgcattgtgtctccagtgttgtgaaggttctttccctgaggaaagcccaggcccagagcatcctggaagtcctgaagataactcagcactgtgcagaatcccttgggcagccccactgcttccatccacctttcatacttttcctgttggaacttctgacctgccagaaagattttaccaagtaagtacaaaggacaggtccagaaggaaaacagcaaagatcattgtaaataaatcctgattatcttctctgattaatagcagcatcatttctatgtaggatacaaatgtacgtttttggttaattcattctctcattccaaggaaagatgggttatatccttttaatatgtaactgccgggaacatatttattcctcctggtgagttgatgagctttactttccagatggtgagaatygcattcctcatatactcatgcatcatttggctcctggaagctgtgagctaaatataaggcttacagaaaagatattaatctgagtacctcaaaaggtggttcttaggattaactcaataaataccttttgagcgtctagtgtgctagaatgtcttctgggtgttatgcagcagtagacaaggcagattttatattatattgaggagaga

SEQ ID NO: 752551 - DNA, 533 bp, Homo sapiens; identical to SEQ ID NO: 729464

SEQ ID NO: 752552 - DNA, 605 bp, Homo sapiens
ctatacacaatagcaaagttatggaatcaacctaaatgtccatcaatgacagactagataaagaaaatgtggtacatatacaccatggaatactatgcagccattaagaacaagattatgtcctgtgccaagatatggatggaactgggggacattaatcttagaaaactaacacagaaaaagaaaaccaaatactgcatgttctcataagtgggagctaaatcatgagaacacatggacacatagaggggagtaacacacaytaggtccttttggagggtggaagttaggagcagggagagggtcaggaaaaataactaatgggtactagcttaatacctcagtgattaaataatctgtacaacaaaaccccgtgacacgagttaacctatgtaacaaacctgcatttgtacccctaaacttaaaataaaagttaaaaaaggtgctttctttattaaatatttttcttcttgcaagtaaattatgtcttttacagtgacaatgtttgtaagctagcatcgttaaatatattcttccaatttttaattgttcattttgttccttatgcccagagatgcacaaagccagaaaattttgtagaaatt

SEQ ID NO: 752553 - DNA, 657 bp, Homo sapiens
atctgggaattgaatttagaaatgttaagactcttgaaaatcttactttatggagcaagtaatactcatcagacttgtattctgcattaattttagtcaaggtcaatgttgttcttagaaattacctgtcttcaatggaaatgaaagttaatgatctattattttcattatgctacccctaatgcctggacttgatcaaaaaaaaattagtaattaaatataagaataaaagtatgaccggacttcaacatatcgcttgaggtctggagccagcaagtaactaacagtatttaatagggtgagagctttactgtggcttagaagagaatcaataatgtaatatcaaaatgtaatgkaatcaaaaatgtctttcattgctgtttatatattgtgttagttcatatgcattactgtaaaggaatacctgagactgagtaatttctaaagaaaaaaggtttattttagctcatggttccgtagacttgtacaagcatggcaccaacatctgctcagcctctggtgagggcctaggaatcttccagtcaccacagaaggtgaagggggaagcaggtgcatcacatggagagagagggaacaaacaagaggtgggtatgaaaagggcagcaagccattcaggagggatccgcccccatgacc

SEQ ID NO: 752554 - DNA, 590 bp, Homo sapiens
ctcaaaaaaaaaaaaaaaaaaaaaaaaagaaagaaagaaaatagtacaaaattgtgttataaataaccataaatttcttagtgattcttactactttattagttactcctattctaccataaaattaatttgcaaatttgttccagaaaaacatgatggccatcaytatatctcaaaatttattttactaatattacattttacggtgttagaaaacccattgcaataccatatgagaagtttctattccaaatgatttagcttttaagagttatcagatttgttattggctaataatgagaaaattattttcttctaaatctttatattaagcaaaatctaaagcaatttctccttatttaaaggctatagaacttatataaaataacaaaagttggtaaatcttcatttgctattgaactagcctaatgattatatttctaataactttaaaattttttttgctttttttaatattggaaaaataatcaagatcaaggttaaaatatttaagccttactttctgtgtctctagcttctttaattttttttctcaattatatgaagtaccctactatagctttatagcc

SEQ ID NO: 752555 - DNA, 565 bp, Homo sapiens
tttgatattctacaaaaataaagtcagcataatttagaaataaattggatgtaggatgtgagtgaaaagaaaatcaaagatgagaccaaagtttttgttttgaataactgtaaaggcattgctattaatagatctggggaatgatttggacaaaataggacttacaggaattttgtagatattcagtgttggaagctaatttgaaattcaagaaatcattaggctacatgagtctgaagtggcaggcaaaggcargggctgagatgcaaatttgagggttatcaatatatattaatagatgtgtgttgagactagttgatgtgagcagatattttaaaatgagaagtacaagaacagagctctgaggctctgcatgatgaagaaattaaagaaatatttttaataaagaagtgatttattgcatctcatattccttcaaaggttaaacataatgataattgaataaaaatgacccttggatttagcaacatggggtcattggtgacttcagtaagagtagattactttcattatatttgtgagggcagggatccagtttgtaatg

SEQ ID NO: 752556 - DNA, 633 bp, Homo sapiens
gaaagcaagaaaaagcccttgcacaagatgagacactgtcagattgcacctgtgaggttgagggacatcttaaagaaacagggaaccacatcaatggttgtagtatgaggttcagtcaagataatttggagtggtacacaagagctcctcatagattggtttaaattttaaactaaaccagaattaaaatactaggaatagaaatggaaagaaaagggagaaggagaagttactggactactttctaaatacaacttaattattttgccaccaaatattcagttttttctttcacacasagtagacgtgtcccatgtggccttgaagaacatttatatatcactcgtaaacattcagtgtaggcaaagtttatatcttactaaaattttctccaaaaaggagttaaatcattataaaaatatgtaattattaaagagcattattaaggaaagaagccttctgaataatttagttttcaggctaattgaaagctgaaacataaatgatgtgaaatacctggggggtggtaattttttctcctgatgtaatagaaagagcattgaacttggatttagaatctgtaggtctgaatgttaatcctgtccccttgttattgtacaaccttggacaata

SEQ ID NO: 752557 - DNA, 617 bp, Homo sapiens
attcttaattttaatgaaagcattactaatatttttgttagtactgtttatgtcctatattataatctttcattaaaaattatgttattacctttaagaagccttattatttatcatttatatttagacacagaattaacctggaattgaaatttatctagggtgtcaagtactgattgatgattttcctctgtttttgtatgtacattagacccagcattattcactgagaaaaaccactcttgtcttactatttgcagctacatctttattataaattaacagtcattgtacatgtgtacacctattcctgtagtctattagactatttgtctgtcattagattatttgtctgtcattgtgccaattatcatttagtwaaaataaatgttggtattcaaatttgtcctattttaaggtgatcctatttttagcttttaaatttttaatataaatttagtcatataaatttacataaacataactgataggatgttggttgatattacacacaacctttatgttttctaccaaatcagtctgtagcagagaacactaaacacttaatttattgaaaaggggcccaaaattaagggagaatatattgtcattctcat

SEQ ID NO: 752558 - DNA, 580 bp, Homo sapiens
tctccctacaccctcccggccaccccttggcctcccccaggaagcaggatcacgttgatttctatctggttacaggagagcttgccctgactttccccagttacttaagccggcgtctcattgcgtgtccttagagaccaggsgttcgctcaggcagagagcgtctagacagtattcatgacccatctgtctggcacggcccagcggatggcaaactctattagaactgaaaccatttttccctcccccttctcccatccctctttccctttgcgaagcaggaatctgacactgaaaattactatcattgttgcaattctcaaaatagcaccgccagactttcattaacatccacgctagactactaaatatttaaagaagtggataaatttcatctgaagtgggacagccccgcacacatgaaagcagtaacagaatcaaaatgtaaatctaagaggttgtttttatccaagtaaatttagtgtcacagcaggaggaaatgatgcctaaggtttattaaaacttaccctcccatttgttctccgcctttgtttatttgaaaaggcagaattaccattta

SEQ ID NO: 752559 - DNA, 580 bp, Homo sapiens
tctccctacaccctcccggccaccccttggcctcccccaggaagcaggatcacgttgatttctatctggttacaggagagcttgccctgactttccccagttacttaagccggcgtctcattgcgtgtccttagagaccaggcsttcgctcaggcagagagcgtctagacagtattcatgacccatctgtctggcacggcccagcggatggcaaactctattagaactgaaaccatttttccctcccccttctcccatccctctttccctttgcgaagcaggaatctgacactgaaaattactatcattgttgcaattctcaaaatagcaccgccagactttcattaacatccacgctagactactaaatatttaaagaagtggataaatttcatctgaagtgggacagccccgcacacatgaaagcagtaacagaatcaaaatgtaaatctaagaggttgtttttatccaagtaaatttagtgtcacagcaggaggaaatgatgcctaaggtttattaaaacttaccctcccatttgttctccgcctttgtttatttgaaaaggcagaattaccattta

SEQ ID NO: 752560 - DNA, 539 bp, Homo sapiens
aaactacttatttctgacaacctatgccaggccagaattccaagctctgcaaagacaaaatattttttgactgaacatgcccatttcagacctttcataaagaacttctttatagtactaagtgccagttaaggatttcctaaattcctttgtctatctccccagtaaccaaaaagagaatatttctagtaracttgggagacttcaaaataacgtggtcaacaaacaggagcaggggcttaaaacccattatcctcaatggaacactggctgataaaatcccctaccttccaaaattaacaacaaatctgtctttctgttcagttcttccccgagggcatgtcctgttgagagccggtttcacctgtgcagtgtggcctgatggcccagcacccaggagctctgcgcaccctgccgccatgggccatccgtccccagacctcttcccacagggtcactgtggtccaccgtcctgccctcggggaatctcagcctccctctcacaggtatgaatcaccctcacccctcaccccagcctc

SEQ ID NO: 752561 - DNA, 522 bp, Homo sapiens
tgcatttctgaggctgaacagacacctctcatgatcagagatggggtgtgggaaggaaggaagggtggtgaactgggagccggcagcgcgtcccagcgctgaacccgtggcacctggctgcttggctgtgagggctgatcttccagtgcccgagtccccgctgtgagcgccctgaggagcatgtgtgtctccgcactatgccctcagcggccgctggagtggggctcgtgtgtgccctgcagctgaaggggaaggaggccgaactggccggggtgtccgtggttgsgggggtacaggtgttgggagtgggaagcatttccagccagtgagtttagggatgctgcctactcggtcctatcttggagagcctcagtgtacctttagcgtgctggagacgccagtggtccttctgtacagaaaacctcagtgttatttaacccagaatgtcctagatgtatgcgaacccagaacactctttccccacaactccagtcagcgcagagtaacctgtgctggaccaga

SEQ ID NO: 752562 - DNA, 655 bp, Homo sapiens
aaggcattagctagataagcaccaggttctcctagtaagagggctaaggagatcctagctgctccataagatgtgatgaaaagaaggaatgagcttcagttgtacaaaggcccacgagtcatctgcaaactatggcctgaagtgttggtagacagtgcagttgtcaccaggaagtcatttctggaatttttcaggcaaagcaagcacctggaaggatttgagtagagtcctgcaccgccaggggtggatccagggtcctggggtctggtccccccgggagsgagccctgctgctgcagtcctggactccagtgcacaggctcccaggccaggacctgggcggcttcccggcttccacactcagggctcatcttggtggatgttgcacaggagttggaccttagatattcctagaggtctccacctctcagcatctctggctgaaaggtggttcctctgtagaatgttgtgactgtatggtgtgggcagcgtggggaaggggaggaggaggagttagtttttcaaagaagatttcctgagctcacagttggttggtactcacatgttgaagagtgcagagatgggagatggccctcttggtgctagtgtcaggtctgtatctctgtgttgggcctggcttggtcagaatggtctcg

SEQ ID NO: 752563 - DNA, 655 bp, Homo sapiens
aaggcattagctagataagcaccaggttctcctagtaagagggctaaggagatcctagctgctccataagatgtgatgaaaagaaggaatgagcttcagttgtacaaaggcccacgagtcatctgcaaactatggcctgaagtgttggtagacagtgcagttgtcaccaggaagtcatttctggaatttttcaggcaaagcaagcacctggaaggatttgagtagagtcctgcaccgccaggggtggatccagggtcctggggtctggtccccccgggagcsagccctgctgctgcagtcctggactccagtgcacaggctcccaggccaggacctgggcggcttcccggcttccacactcagggctcatcttggtggatgttgcacaggagttggaccttagatattcctagaggtctccacctctcagcatctctggctgaaaggtggttcctctgtagaatgttgtgactgtatggtgtgggcagcgtggggaaggggaggaggaggagttagtttttcaaagaagatttcctgagctcacagttggttggtactcacatgttgaagagtgcagagatgggagatggccctcttggtgctagtgtcaggtctgtatctctgtgttgggcctggcttggtcagaatggtctcg

SEQ ID NO: 752564 - DNA, 608 bp, Homo sapiens
atataacattcacttagacgacaaacccaggcatcatgatcacctaaaatcaggcttgacacagtaggtgctcagaaaagaaagcacctactaagtactaggagccattccgagagccagtgagaccaagactgaccctcacacctctgtgtccccctgactctgcttccagccccaccccaggcacacagtaggtgctcaggtggcataggcgtctaggagaaggacctccatgaggggaagagacaattgtggggaaagcccaagatggaaggggcagtgctgtggcagggcccgggggtgacccaaggcggggttgcttacggggacacccggctccttcctgccctttggagacgacgccacgtgggcgaggtactggatgaccttcttggtgttttccgtcttcccagctccagactctccactgtggggatgacaaggggaagcaaaggggttggcaatgacctcrggcaagctccccacctgccctgcccattccaaacacagccacgccccacccagacctctcctcctccaggaagtccttccagattactcacgtgcagagaatggactggtcctcacgatctgtaggggacagagtg

SEQ ID NO: 752565 - DNA, 586 bp, Homo sapiens
taggacaacaagttaagacaatctttttgttctatagttattatgaaggcctaggaattccaaaaggaacatgtttgtataataacactcagtacaaagtctgtgatccaggaagtgaccagcccgatgtgtgctatgacccctctgaacctcccatttccacagtttttgaaataagattaaggactgaacactggcagggactcataaatgatacaagtaaagtattagcagaacagaagaaaaggggtgcccaaatgcataatcttaagatttgacgctgtgctgtcattaatagcaataagttaggagcaggatgtggctcttttaattaggaaaaaactacatgaccgaaaataagtacatctgtcatgaatcaggattgtgtggaaaagaatgtgggtactggtcttgtgtcatttaggctacytgggaaaaaaaaaatgaaaaagatcctgtttggctccaaaaagggaaaggaagcctgtcctgcatgagtggaagctgcaaccctttaaaattagtaatcacaagcccctcagacccaaaatagaaaaaaggaaaatacttatctctaggcattgat

SEQ ID NO: 752566 - DNA, 623 bp, Homo sapiens
caccaacaaaattaagacgcaacaaatctgtcacccttgaaaattcccttgtgcctctttgcagtcaactcctttctttttttttttttgagatggagcctggctctgtcccccaggccggacttgcagtgacgctatctgggctcactgcaagctccgcctcccaggtttactccattctcctgcctcagcctcccgagtagctgggactacaggtgcccgccacyacgcctggctaatttttttgtatttttagtagagacggggtttcaccatgttggccaggatggtctcaaactcctgacctcgtgatccacccgcctcggcctccgaaagtgctaggattacaggcttgagccaccacacccggcccagtcaactcctttcttgctcctgacaatcactgctctgtttttggtccctgtggtgtgtcttttgcaggatgttatataaatagaatcacagagtgtatagcctctgagtctggcatcttccatttagcatgatgcatgtgagattcacccatgttgtggcatgtatcagtagtgtatgctttttcattgctgagtagtactctattgtacaaatataccacagtttgtctatacattcactagtcagag

SEQ ID NO: 752567 - DNA, 522 bp, Homo sapiens
aaacgtcgccgaggatccacacaggtactggaggcgaagcgatgtccaaggcccggaagccggacaagcagaggcggacgtcaccctgagcaaactgcaaggcgacaaggcggcaactgggtgtccaggccgcaggaaccaccatttccctgggagtccgtgctctctccgcccccaacccyggggacaagaaatgtttctgtggccccttccggccctagtgatgtccaactaccagctccaccctctcaactccagtcatattacatcactgtggcgtcattatgacggacacctacctggatgacgtaatcctgggccgtgagattaaaccagacccccccaatgaggagtgagactgcggggagctttgggatttctgagcaccggatgatgtactggtggaggagaggaacaagtgaagatgggagattcctgctctgctcaaatcccgtccgtggctccccagtgccatggagtaatgttcatattgagcacctgggtattcagcaccgtgtgtgg

SEQ ID NO: 752568 - DNA, 570 bp, Homo sapiens
agtcttgtgtggtttgagtgccagcttggccacagtggactagaacaccaagtaaatttccaagatttttgacatcaatctctggctcccagacagcatctctggacccacccaggaccaggggaaagtcactgccctgaggggagggacaaaaatctggctagctttgccacttgctgattgtataaccctagggacttgagtgaacttaggtggcagccaggtagtggttacagcaggccttagsgaagtgccagtgatgtgctggcttcaggtctgacccagtacagccccagtggtggtggccactggggtgctttgtcttgccacccctagttgtaggaggctcagcatagagaggaagactctatttgttttggagaaagtaagggaaaagaacaagagtctgagcctggtaattcagagaattcttccagatcttatccaggatcaccaagcggtcactctgtgaatcttcaagaaccacagcattattgaatttggggccccaatcttttcaaatacctggaaagccttcccaggaagggcaggtacaaacaagcccagact

SEQ ID NO: 752569 - DNA, 570 bp, Homo sapiens
agtcttgtgtggtttgagtgccagcttggccacagtggactagaacaccaagtaaatttccaagatttttgacatcaatctctggctcccagacagcatctctggacccacccaggaccaggggaaagtcactgccctgaggggagggacaaaaatctggctagctttgccacttgctgattgtataaccctagggacttgagtgaacttaggtggcagccaggtagtggttacagcaggccttagcsaagtgccagtgatgtgctggcttcaggtctgacccagtacagccccagtggtggtggccactggggtgctttgtcttgccacccctagttgtaggaggctcagcatagagaggaagactctatttgttttggagaaagtaagggaaaagaacaagagtctgagcctggtaattcagagaattcttccagatcttatccaggatcaccaagcggtcactctgtgaatcttcaagaaccacagcattattgaatttggggccccaatcttttcaaatacctggaaagccttcccaggaagggcaggtacaaacaagcccagact

SEQ ID NO: 752570 - DNA, 639 bp, Homo sapiens
ttggacaaaagaaagtacttgaggtaaattaaaaaagaaattcaatatcgttaaatgcattatgctctagaaagagtaaggctttacttgttctagccaaaattagtttaaacagtaacacagcagttcattctcatctggttatactgaatatcaaatagcctaaactttccatttctctttaatattcttgttactagaaattgttgactataaagacctatatatatgtgtgtgtatatatgtacatatatgtatatgygtgtatatatctacatatatgtatatgcgtgtatatatgcacatatatgtatatgcgtgtatatatgtacatatatgtatatgcgtgtatatatgcacatatatgtatatgcgtgtatatatccacatataagtatatgcgcgtatacatgtacatatatgtgtatgtgtatatatgtacatatatgtgtatatacgtgtatatatgtacatatatgtgtatatacatgtgtatatgtacatatctgtatatatgtatatgtgtatatacgtggtatgtacacgtatatacacatatatacatatgcgcatatacgtacatatatgcacatggcgcatatacgtacatatatgtacatatgcgcatatacgtgtata

SEQ ID NO: 752571 - DNA, 639 bp, Homo sapiens
ttggacaaaagaaagtacttgaggtaaattaaaaaagaaattcaatatcgttaaatgcattatgctctagaaagagtaaggctttacttgttctagccaaaattagtttaaacagtaacacagcagttcattctcatctggttatactgaatatcaaatagcctaaactttccatttctctttaatattcttgttactagaaattgttgactataaagacctatatatatgtgtgtgtatatatgtacatatatgtatatgtgtgtatatatctacatatatgtatatgcgtgtatatatgcacatatatgtatatgcgtgtatatatgtacatatatgtatatgcgtgtatatatgcacatatatgtatatgcgtgtatatatcmacatataagtatatgcgcgtatacatgtacatatatgtgtatgtgtatatatgtacatatatgtgtatatacgtgtatatatgtacatatatgtgtatatacatgtgtatatgtacatatctgtatatatgtatatgtgtatatacgtggtatgtacacgtatatacacatatatacatatgcgcatatacgtacatatatgcacatggcgcatatacgtacatatatgtacatatgcgcatatacgtgtata

SEQ ID NO: 752572 - DNA, 621 bp, Homo sapiens
ccagctacttctttatggttcaaggcaaaactaaggagtcttagcctttcagggcatttttttttcaagccagaccctgtgctaggcactgagaattctgagacaaatgaaacaagatgagttcatgatttacttttgagaagactgataaaaaaaagaaagggcatgtttagggctgtaacagagtttctaccaagtgctcctaggagatgagaagaagctgctaagaagactcctgcatgatgttcttcyaggactgaccaccaagcccattagagaatatccttaggacacactctgcacttctcccagcactcagtcctgagctccatgaagacggaaccacactccatttctgtgtcctcaatccccaccccaggttggcatgagagagatttcagggtcgatttatggaataaataattcataaggccttaacatagtgagttaatctctctggccttctacgtgtccatgtgtaaaatgagaaatatgaactaaataaaatactgttaaaacttttcagggacataatctcttcaaggatctgatggcagccacattttctatctctagaaaaatagtacctgtggtattgcacaaaattgcaggggcttcctt

SEQ ID NO: 752573 - DNA, 621 bp, Homo sapiens
ccagctacttctttatggttcaaggcaaaactaaggagtcttagcctttcagggcatttttttttcaagccagaccctgtgctaggcactgagaattctgagacaaatgaaacaagatgagttcatgatttacttttgagaagactgataaaaaaaagaaagggcatgtttagggctgtaacagagtttctaccaagtgctcctaggagatgagaagaagctgctaagaagactcctgcatgatgttcttccaggactgaccaccaagcccattagagaatatccttaggacacactctgcacttctcccagcactcagtcctgagctccatgaagacggaaccacactccatttctgtgtcctcaatccccaccccaggttggcatgagagagatttcagggtcgatttatggaataaataattcataaggccttaacatagtgagttaatctctctggccttcyacgtgtccatgtgtaaaatgagaaatatgaactaaataaaatactgttaaaacttttcagggacataatctcttcaaggatctgatggcagccacattttctatctctagaaaaatagtacctgtggtattgcacaaaattgcaggggcttcctt

SEQ ID NO: 752574 - DNA, 605 bp, Homo sapiens
agtatagaatgctcaaaatcaagatatatctttcttaaagaattttaagaataaataagaatcttacatgtattcagggagaaaaaaagcaagttaaatgcaaggggagaaaatgacaggttggcctcagacttatctactgtaacatataataacagggtatgtctgcaataatgtaagtaaaaaaaagtattatccagtgatatcattctgagcaaagctattgtacaaatataaaggaactagtaaaaatcctagagaacagagtacccatgagtctttccttgaataactatgtgaaaatgaaatctagcaaaaataaagaacaggagatactcatgagcaccaagtacaattaaatgtagaaataataagaaactactgtggggattatggttataggtcrtaatattactttggatacctgaatcatgtaaaaataatgacaaataaaattggagacttgtaaggttctatctttcataacaaggagtcaattgatacagacttaaaacatagttttaaaaaattgattacaacttctgaatagtttctacacctatattttttcattttagaagagccttctaggcagtaatatgtct

SEQ ID NO: 752575 - DNA, 539 bp, Homo sapiens
atataatgataaaatgttacagtcctaaatatatatgcacctaacactggagcttccaaatttataaaacaattactgctagacctaagaaatgagatatacagtaacacaaaaatagtggggtcttcaacactccaccgacagcactagacaggttgttaagacaaagtcaataaagaaacaatggatttawactataccctacaataaatgaacttaacagatatttatagaacattctactcaacaactgcagaatacacattctattcatcagcacatggaactttctccaagatagaccacataataggccacagaaaagtcacaataaatttaagaaaattgacattatatctagtactgtttcagatgacaatcaatcaagatggaaatttaaaaattctttgaactgaacaatatagtggcacaatctatcaaaacctctgggacacagccgagacagtgctaagaggaaatttcatagccttaagtgtctacatcaaaaagtctgaaagagcacaaatagacaacctaat

SEQ ID NO: 752576 - DNA, 651 bp, Homo sapiens
aatcagggatttcttcttggtttggatccattgctggtgaactagtgtgatttttggggggtgctgaagagccttgttttgttatattatcagggttggttttctggttccttctcatttgggtaggctctgtcagagggaaggtctagggctgaaggctgatgctcagattcttttgtcccacaggtgttcccttgatgtagtactctccgccttttcctatgggtgtggcttcctgtgagctgaaatgaagtgattgttgactctcttctgggtctagctacccagcaagtctacccggctctgggctgatactgtaggttgtctgcacagagtcctgtgacatgaaccatctatgggtctctcagccatggataccattgcctrtcccagcagaggtggcagagggtgcagtggactccaggagggctcttagctttggtggtttaatgctctatttttatgctggctggcctcatgccaggaggtgacactttccagaaagcaccaactacagtagtgtggagagggacaagtggtgggcagggccctagaactcccaagattatatgacctttgtctttcactaccaggttggataggaatggaccatccaatcagggcaaggctaggcatgtctgagctcagact

SEQ ID NO: 752577 - DNA, 651 bp, Homo sapiens
aatcagggatttcttcttggtttggatccattgctggtgaactagtgtgatttttggggggtgctgaagagccttgttttgttatattatcagggttggttttctggttccttctcatttgggtaggctctgtcagagggaaggtctagggctgaaggctgatgctcagattcttttgtcccacaggtgttcccttgatgtagtactctccgccttttcctatgggtgtggcttcctgtgagctgaaatgaagtgattgttgactctcttctgggtctagctacccagcaagtctacccggctctgggctgatactgtaggttgtctgcacagagtcctgtgacatgaaccatctatgggtctctcagccatggataccattgcctatcccagcagaggtggcagagggtgcagtggactccaggagggctcttagctttggtggtttaatgctctatttttrtgctggctggcctcatgccaggaggtgacactttccagaaagcaccaactacagtagtgtggagagggacaagtggtgggcagggccctagaactcccaagattatatgacctttgtctttcactaccaggttggataggaatggaccatccaatcagggcaaggctaggcatgtctgagctcagact

SEQ ID NO: 752578 - DNA, 537 bp, Homo sapiens
gcgcgatctcagctcactgcaacctctgcctcccaggctcatgcaatcctcccgcgtcagcctcctgagtagctgggactactcgcacgcgttaccatgcctggctaatttttgtatttttagtagagatggggttttgccatgttgcccaggcttgtctggaactcctgagctcaagcaatctgcctgccttggcctcccaggtgctggattacaggtgtgaaccaccgtgcctggtcatgcatttatttattatatcagtatrgacccatggcttctattttattcaaatcataaggagttatagtccattactattatttattttgatgttcacactgtcctcgatttggccagtgagcccctgcaagttgtcttctgtgccatttcgacatatttccatcattcttcaagcactttcttgttttctggcacaagatattctaaggctcaccttgttccttccttgcttccaaaaatggaataggcatttctccaaggagccctgattcctcaaagtgcataatagtattaaaa

SEQ ID NO: 752579 - DNA, 469 bp, Homo sapiens
gaaaaacctaaagactccaccaaaaaagctattaagagttgataaacaaattcagtaaaactgcaggatacaaaatcaacatacaaaaaaatcagtagcatctctgtatgccaacagtgaacaatctgaaaatgaaatcaagaaagaagtctccccctccccctccctctctgcgcggtctccctctgatgccgagcccaggctggactgtactgccgccatctcggctcactgcaacctccctgcctgattctcctgcctcagcctgccgagtgcctgggaytgcaggcgcgcaccaccacgcctgaccagtttttgtattttttggtggagacggggtttcgccgtgttggctgggctggtctccagctcctgaccgcgagtgatctgccagccttggcctcccgaggtgccgggattgcagacggagtctcgctcactcagtgctcaatgttgcccaggctggagt

SEQ ID NO: 752580 - DNA, 515 bp, Homo sapiens
agctctgagctctgggaaccagggcaaccatgtgagaattccaggtttcaacttgtaaccaacttgaccacctctctaaataagtctgattctcattaaccactaagagctaagagtagagactctcttcctcatgaacatcatctatctgtctgtgcatctgtttgttcatccatctgtctacatatctactttatctactatctaatcttttgatgggctctagtgtcagaaatctctgtatttttatctgtgcctcttrttagctctgggactttgggcaaattcaacttctctgagttcctctttttacaccttaaaaatgggcataataatgttactacctgcctaccaatcatagaatgaggattaaatgagtcaagtatttttaaatgtgaggatgaaaggcacagtggcctatgttaagcgttccatgaatggtggccactattatgcagagatctcctctctgcaggactaatagctttctaacagctaatgggaagaacagaaaa

SEQ ID NO: 752581 - DNA, 555 bp, Homo sapiens
cactgactctaccacctctataatgctctcccagaaaaccctcaatgctttcttaaatcttcctgtagcttggacctaggaatctgactgtggttggaagaaagtacacaatcatgactgctttaaaaaatatatgaattgtgactaatcttaagtcaactcgatattgccaggaaaaatattacatttccttaattctctgttcccttattatgttaggccgttagtccataacttatctttccaaaacttccccaattagtctctactgatgaccttgctccctatttttctgaggaatttgaagcaatcagaagagatcttycacatgttctcaccaccacatctgccaatctatctctatcagcaccttatcatcttctttcttattaccatgattgaactgtctgtcggcttggccaactccacccttcttatgcattgtgtcccatctctatcatctgctctagaatcgctttctttaaatttctccctatcattcctgcattaacattttttgctatacaacaacattagaattgcttccatcttaaa

SEQ ID NO: 752582 - DNA, 555 bp, Homo sapiens
cactgactctaccacctctataatgctctcccagaaaaccctcaatgctttcttaaatcttcctgtagcttggacctaggaatctgactgtggttggaagaaagtacacaatcatgactgctttaaaaaatatatgaattgtgactaatcttaagtcaactcgatattgccaggaaaaatattacatttccttaattctctgttcccttattatgttaggccgttagtccataacttatctttccaaaacttccccaattagtctctactgatgaccttgctccctatttttctgaggaatttgaagcaatcagaagagatctttcacatgttctcaccaccacatctgccaatctatctctatcagcaccttatcatcttctttcttattaccatgattgaactgtctgtcgkcttggccaactccacccttcttatgcattgtgtcccatctctatcatctgctctagaatcgctttctttaaatttctccctatcattcctgcattaacattttttgctatacaacaacattagaattgcttccatcttaaa

SEQ ID NO: 752583 - DNA, 649 bp, Homo sapiens
gattaatatgattataataattccatgtaaaagaatgtcagatccatattttaatgttaaaattcaatgagttttttttttttttggcaaatatatgtgttactaagtgctaccctctgtgttgtttcaggataaagggagaaaaagacatacttgkttcctgttctaatggatcttttattctagtaaaagtcagattaaaatgaagatcctagaaaagtaaacccaataattacgattagcaataagaatgcattctaccaacaaagggccctgatattggggtaggattaggaaagaatcactgaggatttgatatgttctagctaggagttacaggatgagagtcagtttgagaaggaggaaaggcatggagaaggcatccttagaagatggagcatttcattgaaccgatttctggagcttattaagattattccatcagtaataagcttaatatctgtgattccccaaattatgtagaattttagagctatgccatgagaaaacaaatcaaccaaataccaaatgtatcaatcatattttctttgctacagtcatgtatgaaaataggcagaaacatggatccagttctgggtaacacaggttgtaaaccttagttataaggaatgacccctttaactccatt

SEQ ID NO: 752584 - DNA, 649 bp, Homo sapiens
gattaatatgattataataattccatgtaaaagaatgtcagatccatattttaatgttaaaattcaatgagttttttttttttttggcaaatatatgtgttactaagtgctaccctctgtgttgtttcaggataaagggagaaaaagacatacttggttcctgttctaatggatcttttattctagtaaaagtcagattaaaatgaagatcctagaaaagtaaacccaataattacgattagcaataagaatgcattctaccaacaaagggccctgatattggggtaggattaggaaagaatcactgaggatttgayatgttctagctaggagttacaggatgagagtcagtttgagaaggaggaaaggcatggagaaggcatccttagaagatggagcatttcattgaaccgatttctggagcttattaagattattccatcagtaataagcttaatatctgtgattccccaaattatgtagaattttagagctatgccatgagaaaacaaatcaaccaaataccaaatgtatcaatcatattttctttgctacagtcatgtatgaaaataggcagaaacatggatccagttctgggtaacacaggttgtaaaccttagttataaggaatgacccctttaactccatt

SEQ ID NO: 752585 - DNA, 630 bp, Homo sapiens
gtgcatactcagacagtaacttgttttctcatgtcctgaagtaccaaaaccttacttcttttaggctcccattcatatttaccattatttctattttatattattttcatataatttcaactacagactagggtaatttattttattgtagaatatttagaaatctgggaagcaccaactaaagcgagtgtttcttgcatgagtagaccctttttaaaaaaaaattacatttgtgaagaaatattgctgcatttaaacctcctagcagttaaaaaatgtttaatttctagttttaagagtcatgacaactttttctttttaacacaatttctcttagaatcattaaagtcaattgctaataattgcattggcattgtgataacttgagrtgtaaccaaggaaaagcatgttcaatatgggttactaattacactaataacaatttatgcaaattagtgactaattttacattagcatagtggtaatcactttaagatcgtttagtaagaatgatggcccaatcaagactaggaagtattttttttaaatgagatagagaaatgaaagatatagggtttattgcaaatagtttttaactgaaatccaaatattagtaatgaactattttga

SEQ ID NO: 752586 - DNA, 637 bp, Homo sapiens
gcagggagggccacaggggagggccacgtacatgactgtgggatgaattcagccttgactcagttcctacttccaccaaagtaaggagtgtacagcatcattgtgccatctggatatttttgtttcacggaaactccctagatgttaaccacatcctgttttccttcaaagcatcacttaaacatacagtgtttagcatacagagtggggatactaagtcttctttctctacatctccagcattccttgatcccaacttaattctctccacttaattttgacgaaaaatttaactttctaccttcttcttggctccatagctacctttgcatcactgaagrctcacaaatggtttctgcctcacaatgagctatccactctatgtcctaacctttggaggtatagaagggggaggatttgaaagttgagtctttccattttcctttcccacaggtttcagatagtagctgaacatggcatagaaatttaggaatttctcttcctcaacaaccccacctgacacaagcatcagccacggtgagcttggcgatgatctcccttcccctttgctacgtaagtgtgttctttgatatgactcaattaaccaaaaattagccatcatgtatctttaaatggc

SEQ ID NO: 752587 - DNA, 590 bp, Homo sapiens
ggttcttcttcaatattatgtcaaatatttttaagttcttgttgctccatttaattttagattcagtttattgataactacaacataaattggactttaatggggattacattcaacaaacacctcaagttgtaaaaaagtgaagtttaaataatgctgagccttctaacatatgagtatggagcatctctcttataatttaggtatttgatttcttccatcagttttccacagatatgtcatttacattgtacttcattatgttttattctagctttccacagatatgtcatttacattgtacttcattatgttttattctagctttccacagatatgtcatttacattgtayttcattgttttttattctagcatatgtgatttattactattttgaattctagttgttcattgaattgtttatgatgttaaggaaaaatctatctgccctctgaaaatatttatggaatcatacatttcctcatggacacactacatttggcaagcatgtattgtcaaaaacccagacttctgaaatatgtccatgtaacaaatctgcacttgtaccccctaaatttattttaaaaa

SEQ ID NO: 752588 - DNA, 623 bp, Homo sapiens
  misc_feature 218: n = A,T,C or G
atccaactatgctgtagtgattagataaatttagctacatggggaaaagtttggggctttttaatttgtgaaagaattatctgctctagcttttctacatgcatgtgaggtgatcaagtaaaaatagaactaaattcacattcctttttaaagtcatattagaattaattctttytttcttccttgattatgccagtcaagtgtgctatttttattcnaacaagagaaagagtaagaaccttgagaatatgagaaggtatgggatccaattaataagtagagttatgggccattgatagaggagagagacagacttcacttagaggagacgaaaatttgagtcaaaaatagaaacattagtatatttggtggttaggaacttcttacctgatctttttttttcccgctgaaattgtatcttagtatcatgacatcacaaaatcatatatctaaagaaaatttatttttgatttgttacatttgcttactcattctgcaaatatttattaagttttactagtatatgccaggtgccatggaaattgctggagttaggggaatgtaaaataggaacttacagcctaatagggtatactgacattaaataaaccatcaaacaaata

SEQ ID NO: 752589 - DNA, 588 bp, Homo sapiens
gtcttcagatgatttcagtgagtcctcaatattaaaataataaagcaaaacttctttaaatctttcaagccactagagagcttgctgtttttttttttagctgtttagtcttatctcaatactgtcgctataactaattttctatcaacattacactrtccatacaattcctgacaaataaagaacacaggaagacaagcaggttcctccccgcaacacccgactttctttgatttctaagataggacaagaaagtctgattcataccaaacaagaaacttctgaaaacatgatgctgagcttcacaagtctcaaggctgagctgagttgtttactcatctaatagggactgcaaggccctcttgagctgggcattcgaaacttcagtgcatatttaactacgcacatatttagcaccagtacagtctttttaaactaacttggaaaaatctttcactaaccaaaccttgtaactgatttgcatcctgggtcactagccatgtgtgttgtactgcattgctacatatctgtgaaagtgtggcttaaaatgaacacattttaataaattaaaaatcacacccctagttc

SEQ ID NO: 752590 - DNA, 588 bp, Homo sapiens
gtcttcagatgatttcagtgagtcctcaatattaaaataataaagcaaaacttctttaaatctttcaagccactagagagcttgctgtttttttttttagctgtttagtcttatctcaatactgtcgctataactaattttctatcaacattacactgtccatacaattcctgacaaataaagaacacaggaagacaagcaggttcctcccygcaacacccgactttctttgatttctaagataggacaagaaagtctgattcataccaaacaagaaacttctgaaaacatgatgctgagcttcacaagtctcaaggctgagctgagttgtttactcatctaatagggactgcaaggccctcttgagctgggcattcgaaacttcagtgcatatttaactacgcacatatttagcaccagtacagtctttttaaactaacttggaaaaatctttcactaaccaaaccttgtaactgatttgcatcctgggtcactagccatgtgtgttgtactgcattgctacatatctgtgaaagtgtggcttaaaatgaacacattttaataaattaaaaatcacacccctagttc

SEQ ID NO: 752591 - DNA, 602 bp, Homo sapiens
ggaagacaagcaggttcctccccgcaacacccgactttctttgatttctaagataggacaagaaagtctgattcataccaaacaagaaacttctgaaaacatgatgctgagcttcacaagtctcaaggctgagctgagttgtttactcatctaatagggactgcaaggccctcttgagctgggcattcgaaacttcagtgcatatttamctacgcacatatttagcaccagtacagtctttttaaactaacttggaaaaatctttcactaaccaaaccttgtaactgatttgcatcctgggtcactagccatgtgtgttgtactgcattgctacatatctgtgaaagtgtggcttaaaatgaacacattttaataaattaaaaatcacacccctagttcagttcccccaataatataataataaacaaagttttgagtagcttctggataaggttgaagaacagagatcagatttaccttcctacttgatacaaaaaagaaaaaaaaaactggacaaaactaaggaaacaatggtttcaagccatcaggcaacaaaagatggcaacatctgagacaggaaatagatgatgagaaaagaagca

SEQ ID NO: 752592 - DNA, 657 bp, Homo sapiens
ttttgaggccaatttttttacaattatttaccacaacaagcaattccacttgtgtttcttattaacaatgtcacctttccttatcttacctggaaacacttggcattattctctttcataggactaaagtttcctggttcatatcatgtagakgagacaccttttcttttttttttctctcgggaaagaagacaaacttttgaaaacgtaaattttgacagttaatctttttttctcatgagttacaaaggagatattactgtttgtctgaaaagttaatttcagaacttctggttccaaaatggcaaagtccctcttggatcttccctcccagagagaaatattgtaaactttggggaaaaataaaagaatgcaagtaaatctggaaggaaacaagcatttataagaagggaaaggcacaaggtgagtttctagaactaatagcttaagacttagaagtgaccaaatttagtgccacactgcgtggttagaatttgaaagaaaacacacagtctttctaccatgaagaaatataagtgtttcaggcaaccaacaccacttaaaagtgaaagggaatctagtaaaggagaaatccagagcagaaagcaccacatgctgcgtatgtagattctctgccaacacctctgactggctcct

SEQ ID NO: 752593 - DNA, 657 bp, Homo sapiens
ttttgaggccaatttttttacaattatttaccacaacaagcaattccacttgtgtttcttattaacaatgtcacctttccttatcttacctggaaacacttggcattattctctttcataggactaaagtttcctggttcatatcatgtagaggagacaccttttcttttttttttctctcgggaaagaagacaaacttttgaaaacgtaaattttgacagttaatctttttttctcatgagttacaaaggagatattactgtttgtctgaaaagttaatttcagaacttctggttccaaaatggcaaagtccctcttggatcttccctcccagagagaaatattgtaaactttggggaaaaataawagaatgcaagtaaatctggaaggaaacaagcatttataagaagggaaaggcacaaggtgagtttctagaactaatagcttaagacttagaagtgaccaaatttagtgccacactgcgtggttagaatttgaaagaaaacacacagtctttctaccatgaagaaatataagtgtttcaggcaaccaacaccacttaaaagtgaaagggaatctagtaaaggagaaatccagagcagaaagcaccacatgctgcgtatgtagattctctgccaacacctctgactggctcct

SEQ ID NO: 752594 - DNA, 682 bp, Homo sapiens
gttttctctgcctagccaatttaatatgaaatatgattgaaaccagtaggtccgcactggtatttatttatttcccagtgctttcctaaacgagttttatagtattcagagcatagtgttaaattgattcacctttctccatatgagaattgtaagcaatttgattagcttttctctattttcatcttctgacatatactgttataactaagaaaaattataacccttttttcttactgaaaataatttatattcagtagtgtttttgtgcctgcacagaatataatctctagaggcttaaatatcaacatttgtaactgtatgggtatgatggtattaagaacaattccaaagacaaattacacttttaaatgttcatgatactgaatttatccctcagaccttataattgaactttgcaaaccagacacattcctgtgtgttttatttagtgaaggaaggaaagaatgttaraaaaaaaataaaattagggttttttatatgactgctaaacatgataaattaagggagtcttgttaccctgagagatgtaactttattgatctctcagttaaaagctgctaaatgagtgaatgaaaagatagaagctgggggagggggactgctatctttgctcttcaagaaatggtttatgctaaaatttaatgaccacctactaaga

SEQ ID NO: 752595 - DNA, 546 bp, Homo sapiens
tttttttgttatctgtaactatctcaagtctgactgctcgccagtcagaggccaaaaacatgagaagtgagatatggtgaaaggaaagcaactttattgattgaatgctagcagatgggagatggccaggcttctgcctcaaataagccatcttagttttttgggccggatgaaggagtttgagagggaaaaggtgtgggagtatgctagagtggtgcaggaggttgcaagtctatgttttattccgatggctatcaagtaatcgcccgttggaagatccggtttgcatcaccttgactttggctcagtagtggtggactatctgtatctgtaattcctcctaagcagkaggattctgcctctgggtctctctctgcctgatttgtttaaaaattggcccctggaattttaaggcaagcacataattacataagcgagcactgttcactgaaatgcctggtgggaaaggaggaaacagagtttcaaagtatgtttcaaggctgaaagcaagaaaggaaaaaagttttaaaatgcattttgaggctg

SEQ ID NO: 752596 - DNA, 620 bp, Homo sapiens
ctgtcacagttatgaagccttgctttcccaagtaacatgctcactatgcgtaaaccagaagcagctgggcagagtaccaggagcacagtgacaagctcctgtctgtgacagatcattgactaaagatcatgtgattaaaaggtgacatggaatagaggcatcgcatctcagaatcaatgagctggattttgagaattgatgagcagattttgcccgtaaacgtgcagtatgagggcatgcaagcagttgataccttacctacagaaaggatgttattttatctttttaaatttttttcttttttaaaagaattccctgcaagtaagcgcaggacttaggagtttagtaaggaaatgccacgctccagtttagtacattttgaaacatgctgaaatgactattctgcaagcagtacaaattggtgacgttgactcaaggtagaaaacctgaaaaggyctctggtccagggaccaaagtgagaggttgtcagggagccacccttgtgactccaaagagcttgcagctcagagactccacaaaggaagccaccccatctgctccccagaacccacgtggcccaggtgtgggaatgagctgcaaggggcaccagccactgtgcc

SEQ ID NO: 752597 - DNA, 585 bp, Homo sapiens
ccttccacatctatttaaaacccagtcacttctcatcatctccaccgttgtcagctaggatcaaatgagcatcatctcttgtctggacagttggagcctcctaccctgtctgcctggagccttctaacctggtcctgcagkctgttctcaacagaacactggagccttccacattcaatcatgtcactcctctgtcctgaaccatctggtggttcttctcgcaacccccaccagatatcagcatggcatggtgtccaagcctcctgcacatttttgacgcactcttgccatatcagagtggccttccctgaccacaccctccttggtggtcactctcctcctccccacccagccagcactcttttctcccttcccctgcttacctgccctcaccctctggtaactccatgtttacttgtcaccctctcgtggaatgtgagctcccagcaggcagggccctagttctttccatcagctgtgtcccaagtgcctgaaagggtgctgggcaggcacatgcccagcaaataggggtggaatggtaacccttttcctgtaagtctgaactatccttgggctaggaatcga

SEQ ID NO: 752598 - DNA, 564 bp, Homo sapiens
aatatgagatttaatgtcttaggctcccttttttggtgtctgggtagtccttttttgaagataaccctatttatttctaaagtatcatttgatcttaaacacataaatacattttgttaattttacctataagagaaattccaacttttacaaatatagaaatctcagaagaaagagaagctgattaattatggtttaaaaagacagaatattttttcttttttaaattgataaataaaaattgtatatatttatcatatacgacattataaaatatgtatacattgtgaaatgactaactcaagctaattaacatatgtataacctcacatatttatcatttttgtggtgaaaatacttaaaatctactctrggcaattttcaggattataatacattgttattaactatagtcactatgttgtacaatagatctcttgaacttattcttcacatctaactgaaattttgtatcttttgaccaacatctcttcagtctgtactcctgaccccttacccctagccaccatcgtactctctgcttctgtgagttcagctcctaga

SEQ ID NO: 752599 - DNA, 436 bp, Homo sapiens
acaacattcatataattgtcataccttttttctcctaattagaatatgtacattttaactgaaatgacatattcttagctttggatgtcacactacagtttaaatatgggatctctggttttcattctatagccatgagactatgggaactcaaagatagaattaaaatgwcacatacctttaaaaaaagtttattcatttattcaaaacccatttatcacctgcatattgtgtcaagagctatgctaagacaaagtttctacaatctatggataatgtttacaatctagtggataagttggacattaaactcagatgatacagtgtaattaagtgtttgggcaattaagacggcctgagaatgcaggctcctccacttactgtctatgtgatttggggcaagttactcaatattttatcatctctaaaatggaaa

SEQ ID NO: 752600 - DNA, 624 bp, Homo sapiens
tgaggataactaagaccataaacattggtatgcaaaataaaatcaggtaatgctgaatggaactcaaaatcaatgagttattgagctgttagacctctcatttttctatgtctggaatgattattttgcttttttcaattcgatactggatgtttgctgtttttgcaaagtaagaaatatattaaaatagccatctgacctaatttttaaactatagaagtttcttttttttaccaccacgttcctgaatttgattattgatttctttgggtatcattgagctctttttttttttttttttttttttttttacggagtctcgctctttcgcccaggccggactgcagtggtgctgtctcggctcactgcaacctccgcctcctgggttcacgccattctcctgcctcagccttctgagcagctgrgactacaggtgcccgccaccgtgcccggctaattttttgtatttttagtagagacggggtttcgctgtgttagccaggatggtctcgatctcctgacctcgtgatcctcccgcgtaggcctccaaagtgctgggattacaggcgtgagccaccgcccctggccatcactgaactcttttattcactagatgtaactttg

SEQ ID NO: 752601 - DNA, 419 bp, Homo sapiens
cgaaaaatacaaaacttagccaggcatggtggcaggtgctcgtaattctggctactcaggagactgaggcaggagaatcacttgaacccaggaggcggaggttgcagtgagctgagaatgtgccagtgcactttagcctgggcaacagagtgagactctgtctcaaaaaagaaaaaaaaaaaaccatgatctaatttctttgtaggttatatggcaggtctataaagaacaataaagtacagtgaggggacagaaagaaatggggtttkgtagggttgtggatagttctattttagatgaaattgtcagggaatttctctgaaaagacaacattctttgcagacacctcaatgagtaagggagcaagtaggcaaagatttccaggaataaaatcccaggaggagggaacagtgagtaca

SEQ ID NO: 752602 - DNA, 560 bp, Homo sapiens
gcactggggcttactagatattccactactgggggttaagacttcaacatgtgaattttgggggggacacaattcagcccataacaataactaaactttaaactttttcgtagtcataggtattctcccttctcagagctttgacttagtgactgccaaccatgttaaagatggggagtttattggccggtttaattgtttttgtcttrttcttgtgctgatttacactcttgctacccataaactttggcccttccaggaccaaaacaggtagaagggacgagcaaaaaatatacatatatgttttatttgaccaactggcatcctgctttttagatctgatagtgtttattgctaactttttcgcagggtctcctgggaactagtttcatcattttaaataccacctatgagctctttggagaacctatgtattgttaggtatctcttacttgtatttaaaagtgaatagtacattctccgtggttagcccctaaacatgttctgctttgtccatgcttcttggagggtcaccttgatagagagtctctatttagaga

SEQ ID NO: 752603 - DNA, 541 bp, Homo sapiens
atttaactaccttaattcagaaaaatggtatatatatttgtttgtaataagtgtctactacttttaaattttgtattgagatatgatttgcataaaagtacaatgtttaaaagtaaatttttagtgaatttgaaaaggtataacccatacttgaaactcatacttgaaaaataatagagamtatttccagcacatccactgtactcttttctggtcaattttgtccccagacttctaaagtgaattggaagttctgattttaaatcacaatacattatctttgcctgttcttaagctttaaataaaaaaaaatcctttcctttattctaccaacttgtattttcttttctttggttctaaggtagaagcttcgttttttgctttttgtaacaacagacatttaaagttataaatttctctctaagggcaccttacttgcatcccacaaattttgatagtgttttcattatcactaatttggaaatatattatttctctgagttctttgatcaatcggttatttagaagattgtggtcacct

SEQ ID NO: 752604 - DNA, 599 bp, Homo sapiens
gagataaatgggattaaatgtaaggagctgtcaaaagaaaaagctacaatgaatataaagaatatagcagtattcaggagactaaaactcaagagtgtttgatacataaaaaataaattgttgtacccagtgcattttatatgctcaattcactcacaatcatataatggcttccctttgattaaaaaaaggaatgcttgaattcgtttttattccttggaattaatttcctccaacatggcattgtatacaacgaaggaactaccatttacttgaaggcactaacaggcaggtactagatccacaattcttgactttcagtcccgtgacttttcactataataggtacccaaataactgaaatgactttgaaaaacctcaatattcactaaataaaacctattccatagaacaggtaaattgcaatgcacaagaatgacaaagtatacasccaagaaatatacattgtaattgtctaacatttgggatataaaaataaagatctccatttattttaaatattatatacatagagctcatcacaacgtaacagaacacaagcaaagattaggttcacatttcgattttggaatgttatt

SEQ ID NO: 752605 - DNA, 605 bp, Homo sapiens
cctttctctccaatcaacacagcctctgggaaccattatgaagcgtattcttcagaaagatttttaaatgtgtatattctgctaattcagattgatctatttttaaaatacatttttttttttttttttttttttggaratggagtcttgctctgtcacccaggctggagtacagtggtgcaatcttggctcactgcaacttctgcctcccgggttcaagtggttctcctgcctcagctcccaaggagttgggattacaggtgcctgccaccatgcccagctaatttttttgtatttttttttttttagtagagatggggtttcaccatgttaaccaggctgttctcaaactcccaaccttaggttatccgcctgctttggccttccaaagtgctgggattacaggtgtgggccactatgcccagtctctatatacatttttcttatgtgaccctcaaaacttaagaaaaatattttatgactcatcccaaaacacacttagggcttgctaaatttagggcccttattattttaatagaaagctttgtaagtgtattaaagaaataccgaatcctagtcaatgaggaaaatggaaaattatttcc

SEQ ID NO: 752606 - DNA, 605 bp, Homo sapiens
cctttctctccaatcaacacagcctctgggaaccattatgaagcgtattcttcagaaagatttttaaatgtgtatattctgctaattcagattgatctatttttaaaatacatttttttttttttttttttttttggagatggagtcttgctctgtcacccaggctggagtacagtggtgcaatcttggctcactgcaacttctgcctcccgggttcaagtggttctcctgcctcagctcccaaggagttgggattacaggtgcctgccaccatgcccarctaatttttttgtatttttttttttttagtagagatggggtttcaccatgttaaccaggctgttctcaaactcccaaccttaggttatccgcctgctttggccttccaaagtgctgggattacaggtgtgggccactatgcccagtctctatatacatttttcttatgtgaccctcaaaacttaagaaaaatattttatgactcatcccaaaacacacttagggcttgctaaatttagggcccttattattttaatagaaagctttgtaagtgtattaaagaaataccgaatcctagtcaatgaggaaaatggaaaattatttcc

SEQ ID NO: 752607 - DNA, 621 bp, Homo sapiens
cttaagaaaaatattttatgactcatcccaaaacacacttagggcttgctaaatttagggcccttattattttaatagaaagctttgtaagtgtattaaagaaataccgaatcctagtcaatgaggaaaatggaaaattatttcccgataaaagaatgtaagacaccatttgctatggtccaaatgtttgtgcccctcccaaattcatgctgaaacctaaactccactgtggtggtattaagaggtgttaacatcactcttccattctcatgtaaagtcctgctaccattctgtccaactttatggtttacattagggacacacaaaataccccagcctcttaattctataaagacctcatcttggrgaccttcacccctggtctagccatatcctgctttgtaactatgttacttatgaaatcttacattcaaacaactctttctctgatctcaatctgctctatttctctctttcagatgtcctaatattatcagttctctgaccttactgagaactctagtacccttttctctccatgtttttccattatatgtgccctctcctacctggtatcagaatgcatgctcaaaaagctagactttctggttaaaagtcttg

SEQ ID NO: 752608 - DNA, 618 bp, Homo sapiens
gacattcgaaaagatgttttagaaagtattcaagaaagtatgattaagttttttttgtaaagttcactgtttttcaaagaaacccatgtatataattcttcactaatatagctccatttccagctgctcttcaatttacactttatgctaatgcaatctgaactattcgcagtttgctaaaacacggcatgcagtttcgctcacactgttccccatgcctgtcattcattctctcaagtttttttatctgcctatttggcttttttttttttttcaacttgttttctttgtccttttcttcttctaagctatttgaatttcaaaacccagattacaccccatttaggaagactttcttgtttcttatctctaaggcagaattaatctcattcatttaactgatttgttgaatctattaaatactagaccctctgttaggtattggatatacagatatgaatcaaatataatccctgcttgyatggtccttatactcttactgggttaatccctatactatatatcacatttctgttattgggtttatcatgttgacttataattacatgttcccttgtctgtttccttttttggatagtgatgttccaactgggcagg

SEQ ID NO: 752609 - DNA, 560 bp, Homo sapiens
ttttttttttttgagacagagtcttgctctgtcacacccaggaggagtgcagtggcatgatcttgactcactgccacctctgcctcccgggttcaaactattctcctgcctcagccccctgagtagctggacgacaggtgcacaccactatgcccagctaacttttgtatttttagtagagatggggtttcaccatgttggcaagtctcgacgtcttgaccttctgatctgcccacctcgacctcccaaagtgctgggattacaggcgtgagccaccacgcccagcccctcttatctttttttttttttttttaagaaagggagatttcttttyttcatcttctacccttttaattttttctatcttttaagcaatgtttaaaagtttctcctttttaaaaattagcctctctttttaaaaatagcatcctgcaattgttaaatgactggaatatgtttcttatatttctttgagaatatgaattgtaagattaaaaatttttattcttttgtatcctgcattgtctctgtttcttcagggtcccccctccttataaaaa

SEQ ID NO: 752610 - DNA, 616 bp, Homo sapiens
gttcttagtaaactacagtagtaaacaacttctagtgttattgcaatgaggcacatttgtgtactctatagcaaagtactggcaatccaaatgacttggtaccacttacactttcacttccaccaagacataagagggtcagagtccgacataaaggtgttgagtctttctgattacaatgccattgccaagtatataagcagttctgttcagagataattttcacactcaacaaatatattctggtaggtcttcactaaattaagattatttaacacaatatctaatctatttgttaagaaatgagagggaatgacaagcacagaagcccagagacacgagattgtttagaggagcaaacagcaaggagaccagtgtgactacagcagagtcagcagagccagcagasctggagatgagatcagagagatagtaggaggccagatcacttaacgactttgacttttgaatgtgatggagtggcaatcatggaaagccaaatggaaggcctttccagtctctttaaaaggatacattgctacttttactggaaggaaccaaaagttcattgctatagtttcagattccatgttgcaattaacctaaaagaaactac

SEQ ID NO: 752611 - DNA, 670 bp, Homo sapiens
gcccagagacacgagattgtttagaggagcaaacagcaaggagaccagtgtgactacagcagagtcagcagagccagcagagctggagatgagatcagagagatagtaggaggccagatcacttaacgactttgacttttgaatgtgatggagtggcaatcatggaaagccaaatggaaggcctttccagtctctttaaaaggatacattgctacttttactggaaggaaccaaaagttcattgctatagtttcagattccatgttgcaattaacctaaaagaaactaccacttgtggggtttgacattaaagaaaaatacagtattgataatatctgaaaaagctgttacataccttaactctcttcaaatattgaatgtaggaggctgagtttttcttcatatatttcaactaaaacagcatatcacaaaccggttgaatgtagaaacagaaaatgagaatccagatcgtactattaagagatytgcaaaaaatactaaacaatgccactctctgctaattttttttttgtttgttttggaaaacagttttctctttttcttttttctttcttggaaaacagttatcttaatattaaaaatgttactgttgttaaaatgtaatgggttcattatttttaaataaatcagtaattattgaaattttttc

SEQ ID NO: 752612 - DNA, 642 bp, Homo sapiens
caattctatataataaaataaaaatgtgtaagttaaatgttagctttgtttcagtgtaagccacaacctgtactgcatgttctccaataaacatacctactaaccaaatcacaaatcccttttctctttggggaggctgaagaaagatgagaggagaagagcagaccartagttcttaaaaacaaatggtaacttgatctgttaccattgtagtgaggccttaaaagtccatttcagttttacaagttcacagatggtctattaaaaaccattctatgttgccagtaataacttcagtaacagaccttacagaatagcccaaataagctaacagttaacactaatgtgtgtgtactgtaaaccacaactcacgaaagctgcttgtagactccagtttcaccagtaatatatttatgacataaattaaaatattcagttaagcttcaaaagaagacagaaaagaaaaatatcaaaaaacttagccacaacactggccttttatttctcaaaaaattattggaaggaattttttaaaaacattttttttaagtaaaataatctcatcaacttaaattttcaatacacttaactttggcaaagttctataaatcttgaaatttaagtgttttatattcattataa

SEQ ID NO: 752613 - DNA, 642 bp, Homo sapiens
caattctatataataaaataaaaatgtgtaagttaaatgttagctttgtttcagtgtaagccacaacctgtactgcatgttctccaataaacatacctactaaccaaatcacaaatcccttttctctttggggaggctgaagaaagatgagaggagaagagcagaccagtagttcttaaaaacaaatggtaacttgatctgttaccattgtagtgaggccttaaaagtccatttcagttttacaagttcacagatggtctattaaaaaccattctatgttgcyagtaataacttcagtaacagaccttacagaatagcccaaataagctaacagttaacactaatgtgtgtgtactgtaaaccacaactcacgaaagctgcttgtagactccagtttcaccagtaatatatttatgacataaattaaaatattcagttaagcttcaaaagaagacagaaaagaaaaatatcaaaaaacttagccacaacactggccttttatttctcaaaaaattattggaaggaattttttaaaaacattttttttaagtaaaataatctcatcaacttaaattttcaatacacttaactttggcaaagttctataaatcttgaaatttaagtgttttatattcattataa

SEQ ID NO: 752614 - DNA, 575 bp, Homo sapiens
gttgtgccaggcatggctacatgggcaactctggcgtctcaggtggctgctcttggcatgactgtcctgaggacggctgcgtgggggactccggcatctcaggtggctgctctcggtgtggctgtcctgaggacagctgtgtgggggactccggcgtctcaggtggccgctctgggtgtggctgtcccaggcatggctgcgtgggggactctggcatctcaggtggctgctctcagtgtggctgtcccaggcatggctgctcagaggactcttgttcctcaggtgtttattcttcttgtcttagtgatgatttttcttgtgattgtcccatcggtggttctctgtgggcttctatttctactggggtttctagtagtacaggtgtattttcttcctctagaatgtcatatgattcttyttcttgttttcagtaaataaaataaaacaaaatcaccaataaatctagtagccacctaagtcaactgaaataaatcataaaaagacaaacattgctgctatatcattgacttagtagtgacagtgataatactaacaaaaatacttttcacataggg

SEQ ID NO: 752615 - DNA, 607 bp, Homo sapiens
tttccttctcctcctgttgcaaactcagagaccatgtgttgaggacagcagcatgacaaaatcaaggatccctgagtcaccgtgtggaggagagccacccaggaaagcctccaatccacagtaggctgctgtgatcaagaaataaggatttattgtgtaaagccactgagatttggaattgattttttttttttttttttactgcaaattagccttgcttcttctcactgatggaccttaaaagctgaaccttgtctgtatctccatcttcctcacatactattccttcctcaggcacattcactttttgctccaactgccccaaactagttgcactcscccaatgcaccctcactcttccatgcacttgactaagctgacccctctgcccaccacccccttcctcaccctgtcaagttggcaaattcctacaagcccttcccaattcattttcgcagtcctctcctttataacacgttctataaattgctgcagcctccctcccaggcccagacagtcaatcgttgtctctgtggtatatttccagggtatccagtacacacctctattttaacacttatctctcttacgagactttcttgtccat

SEQ ID NO: 752616 - DNA, 541 bp, Homo sapiens
cttgacactgaggattgcacagccttgctgggagatggatcccctaagggaaacagatacactgcaatcagaggcagtgctggggctgagccagtgagacagaggaggaccttgagccctgggggagttctcagagcagaaggcgttgagaggagttgaagaagaaggcttcatagaggtggcggatctgtcctgggttctaaagaaatgggtagtggaagtaagggaggtgttctggggtggggggaytgtgtggacaatggcctggccctgggagcgaggaggtgtgagagggccctgagggaagcagggcctggctgtagtgaaactttctggaaaatgctgggagataggtgtggatacccagggctgcagcggttacagatggccctggtggctacatgcagagttttacgatgttctaagagctaatgatgaatgccagggcgggacacacatgcacgcagcacacagcacacacatgtgtgttcccgtggcccacacctgtgaactggccccggcccctctgaggcaggagctt

SEQ ID NO: 752617 - DNA, 642 bp, Homo sapiens
ttttgaggtcagaagttcgagaccagcctgacgaacatggtgaaaccctgtctctgctaaaaatagaaaaaattagccgggtgtggtggcgcatgcctgtaatctcagctactcaggaggctgaggcacaaaaatcacttgaacccaggaggcaggggttgcagtgagccgagatcgagccactgcactccagcctgggaacagaccaagactccgtctcaaaaagcaaaaaaaaagtgtgctacagaaaaatctgttattaatatgcagmtactccaaatttaaagacttgcctgtatgcaaattctaccaaaaaaatctttgttttaaatatttttttaaactatccagaaatgatccaccttgctttgtaaattgagattatacttgcgtggatagtagaggaagataaccaggttacagagtactctttctcgttactggaaagaaacttcaacaaggtcccaattaaattagaatcaagttattagcttctatggttacggtgccttgaacatccaagtataatctagtaacagaggaagatattaaactaacaggtcatggttgagtcaagtaattaaaaccctaggcagagtaggaggaaacttcagaagggctgttacatcccagaataacagt

SEQ ID NO: 752618 - DNA, 613 bp, Homo sapiens
aaaaaaaagtgtgctacagaaaaatctgttattaatatgcagatactccaaatttaaagacttgcctgtatgcaaattctaccaaaaaaatctttgttttaaatatttttttaaactatccagaaatgatccaccttgctttgkaaattgagattatacttgcgtggatagtagaggaagataaccaggttacagagtactctttctcgttactggaaagaaacttcaacaaggtcccaattaaattagaatcaagttattagcttctatggttacggtgccttgaacatccaagtataatctagtaacagaggaagatattaaactaacaggtcatggttgagtcaagtaattaaaaccctaggcagagtaggaggaaacttcagaagggctgttacatcccagaataacagttctgaagtaccctggagacctttctaataacatagcaactaacagttcatctagcaatgaggtacctgataaccgcagggtgaacatctttataattagctttcttggcataccctatcctctttaatcacttacaatatatcctaagatgagattttaataacagaaataggcacttactcaacaatacatcactatg

SEQ ID NO: 752619 - DNA, 592 bp, Homo sapiens
tggtgatatcccccttatcatttctgactgtgtctatttaattcttttaagttttcttctttattagtgcagatgcggtctattttgttaacttttattcaaaaaaaaaaaatacagctcctgaatcccttgagttttttgaaggattttgtgtgtctctatctcattcagttctgctctgatcttggttatttcttgtcttctgctagctttgggaagttttcctcttggtcctctagttcttttacttgtgatgttaggtcattgacttgagatatttgtagctttttgatatggggcatttagtgctctaacttttcctcttaccactgcttaagctgcatcygagagattctggtatgttgtctcgttgttctcattagtttcagagaacttcctaatttctgccctaattttattatttacccaggagtcattcaggagcatgttgtacaagttccacatagtcttgtgattttgattgagtttcttaatgttgagttataatttatttgcattgtggtctgggagactgtttgttatgatttcagttcttttgcatttgatgaggagtgttttatttccaataatg

SEQ ID NO: 752620 - DNA, 592 bp, Homo sapiens
tggtgatatcccccttatcatttctgactgtgtctatttaattcttttaagttttcttctttattagtgcagatgcggtctattttgttaacttttattcaaaaaaaaaaaatacagctcctgaatcccttgagttttttgaaggattttgtgtgtctctatctcattcagttctgctctgatcttggttatttcttgtcttctgctagctttgggaagttttcctcttggtcctctagttcttttacttgtgatgttaggtcattgacttgagatatttgtagctttttgatatggggcatttagtgctctaacttttcctcttaccactgcttaagctgcatctgagagattctggtatgttgtctcrttgttctcattagtttcagagaacttcctaatttctgccctaattttattatttacccaggagtcattcaggagcatgttgtacaagttccacatagtcttgtgattttgattgagtttcttaatgttgagttataatttatttgcattgtggtctgggagactgtttgttatgatttcagttcttttgcatttgatgaggagtgttttatttccaataatg

SEQ ID NO: 752621 - DNA, 592 bp, Homo sapiens
tggtgatatcccccttatcatttctgactgtgtctatttaattcttttaagttttcttctttattagtgcagatgcggtctattttgttaacttttattcaaaaaaaaaaaatacagctcctgaatcccttgagttttttgaaggattttgtgtgtctctatctcattcagttctgctctgatcttggttatttcttgtcttctgctagctttgggaagttttcctcttggtcctctagttcttttacttgtgatgttaggtcattgacttgagatatttgtagctttttgatatggggcatttagtgctctaacttttcctcttaccactgcttaagctgcatctgagagattctggtatgttgtctcgttgttctcattagtttcagagaacttcctaatttctgccstaattttattatttacccaggagtcattcaggagcatgttgtacaagttccacatagtcttgtgattttgattgagtttcttaatgttgagttataatttatttgcattgtggtctgggagactgtttgttatgatttcagttcttttgcatttgatgaggagtgttttatttccaataatg

SEQ ID NO: 752622 - DNA, 430 bp, Homo sapiens
attgattttcttttctctttttttttgcacatttttttcattcagaatgtgctttttcattttgtccacctggcaatatcaattcattttttgagtctgaagtcacacacgcccccacctcttcatgtagccttcacttacctccagaagaattaggtgcttctttctctgaaatcygaaagcaattctaatggagtttgatgtgtataataatctgttatttagtagacactgcccctttcagagcattctattgtgcatttctcattttagtcttatgaataattttgctaaaatttatccaatcctaggtcatccaaaaactaaatcttttatgactcatggtgaaaccagtggcatctatgaggcaatctaccatgggatccctatggtgggcattcctttgtttgcagatcaacctgataacatt

SEQ ID NO: 752623 - DNA, 634 bp, Homo sapiens
tatgaagaactgctaaactgtttttcaaagtacttgcaccgtttttcgttacttctagctgtacaggagggttccaatttcttcatgctcttccctacacttgttatctcctatctttttgttacagggatcccagtggatataaaatgatctttcattgtggatttaatttgcattttccttgtggctaaagacataaccatcttttcatgcacttactggcaagtmattcgtcttcttttgagaaaattttattcctatcttttgaacatttctaacatttttatcttattattcattcataagaattatttttatattattggtggaatgccttgtcagtctatgatttttaaatattttctcccactctttataggttgattctttttttttactttattgaagatgtcccttgaagcacaaagttttaatattgagaaaataaatctgtaataatttttctgtgctccaaaagaaataatgtagaaaatgctgtgactattgattactattatcaatatatatatggaggtaccaccttagaaaatatactgaaaataccttaccaggaagataataagacagtgaatgattaaaaatagtttaaaagcaaacaggaaagaattagaaa

SEQ ID NO: 752624 - DNA, 634 bp, Homo sapiens
tatgaagaactgctaaactgtttttcaaagtacttgcaccgtttttcgttacttctagctgtacaggagggttccaatttcttcatgctcttccctacacttgttatctcctatctttttgttacagggatcccagtggatataaaatgatctttcattgtggatttaatttgcattttccttgtggctaaagacataaccatcttttcatgcacttactggcaagtcattcgtcttcttttgagaaaattttattcctatcttttgaacatttctaacatttttatcttattattsattcataagaattatttttatattattggtggaatgccttgtcagtctatgatttttaaatattttctcccactctttataggttgattctttttttttactttattgaagatgtcccttgaagcacaaagttttaatattgagaaaataaatctgtaataatttttctgtgctccaaaagaaataatgtagaaaatgctgtgactattgattactattatcaatatatatatggaggtaccaccttagaaaatatactgaaaataccttaccaggaagataataagacagtgaatgattaaaaatagtttaaaagcaaacaggaaagaattagaaa

SEQ ID NO: 752625 - DNA, 645 bp, Homo sapiens
gaatggctacgtgcctctgggcagtttcatgggtacctttgctggtaccagaggctactgagttaaccatggggaataacctaaccatttataccccacataatgtagcaggtcttctgtcttctaaggggtctctgggtaacaggcaaccacctccttaaatatcaagctctggcattagaggtatytgcattccagttaagaacctgtcactccctaaacccagccaccttccttccagaggaagctggggagcttgaaaatgactgcaaacagatagtagtgcaaacctatgcaaccagagaggacctcatagaaacccccttagagaacccagactggattatctttatggactgaagttcctttgtagagcaagagatccatgaggcaggctatgcaagagtcaccctgaatgatgttgagagcgtgcatctctcctcagatacaagtgctcaactagcaaagctgcacttaagcaatgggaaaacagttcacatttgcactgattctaagtatgctttcctagctctccatgcccatgccactattgggaaagagaggatctcctcgcagacagtgggtctcccattaaataccatcaggaaatcaacagactataatcctcagtcttccttccatgga

SEQ ID NO: 752626 - DNA, 581 bp, Homo sapiens
tcacttgaatcagaaaaattaaaatgatctctccaagctagtgtggtttctagcagacaaaataaatacactagctgacagttatcagaaagttattgtgttattatatgtttttaagtgttagggtattaaatattaggatatttaatgcataatgcaaacattaatgtagcattttctgttcaactaattatggtgattgatagcaatatagatacacaagaaagaattcctgacttgmaagaggccattgtgtaaagaagggaaatacatattattataaattacaatctggcaaaaataaagacaggatgatatgaaagcccctagaatgagtatttgaaccagatttttatgtgtgaatatgcgtatggatatcagagaatgtttcacaaaggaggtgagagaaagtagaataccaaagatgagtagcaattagccaagttgaggtagactgtaggtggaaaggaaattgctaaaagaaataccgttgcagctctgattcaaggcaccaatacctatcacctagcttattgcagtagcctgttaagtggtcctcctgcctttaccttttttcccta

SEQ ID NO: 752627 - DNA, 522 bp, Homo sapiens
tctgcacattcttcctgctactttggctgtgctgtagcacttaagatttgttatttcttttttttttttttttgagacggagtctggctctgtcgctcaggctggagtgctgtggcagaatctaggctcactgcaagctccgcctcccgggttgatgccattctcctgcctcagcctccggagtagctgggactacaggcgcccatctccacgcccggctaaatctttttgtatttttagtagagacggggtttcactctgtcagccaggatggtctcgatctcctgacctcgtgatcgcccgccttgcctcccaaagtgctgggattacaggygtgagccaccacgcctagccaagatttgttatttctattcgcttattctctgcattgaatcatagctgtccggagttccagccttcagaggcgaagcttttctgtgttccaaataaacaagactaatttgatataccgctattattttaaaaaggaagaaaagctatcactccataaggaaacaaatg

SEQ ID NO: 752628 - DNA, 440 bp, Homo sapiens
aggttgttctttatagccatgtgagaacaaacaaacacagaaaattgttaccagagaagtggggcattgctataaagatacctgaaaatgtcgaagcaactttggaactgggtaacaggcagggattggaacagtwtggagggctcagaagaagacagaaaggcgagggaaatttaggaacttcctagagacttcttgaatagttttgaccaaaatgctgatagcgatgcaaactgtgaagtccatactgaggtggtctcagatagagatgaggaacttattgggaactggagtaatggtcactcttgctatgctttatcagagactggcagcattgtgcccctgctctagggatttatggaactttcaacttcagagagatgatttagggtatctggcagaagaaatgtctaagtagcaaagtgttcaagatgtggcct

SEQ ID NO: 752629 - DNA, 628 bp, Homo sapiens
cattttctctatatacactcccatgtattctgcctagattgattttatatcttggctattgtgaatatttctgcaaagaacatggaagatatctctcggacatactgatttcatttcctttgggtatatacccagtggtgagattgctggatgatgtagtagttctacttttagctttttttagaaacctccgtattgttttccataatggctgcactaattcacattcccaccaacagtgtgcaagggttcacttatctccacatcctcatcaacattgttatcttttgtctttttaataatagccatcctaaggmgtatgagatgatatcccgtggtggttttaatttgaatttatctgattactagtgatgttgagcactttttcatatacctcttggccatttgtatgtcttcttttgagaaatgtctatccagatcctttgcccatttttaaatcaggttatttgttttcttactattgagttgtttgagttcctcaaatattttagatattaaccccttatcagatgtatagtttgcaaatactttctcccattctgcaggttgtctcttcattcttttgtttcctttgctgtgcagaagcttttcagtttgatgcaatttc

SEQ ID NO: 752630 - DNA, 649 bp, Homo sapiens
ttctctctcttttttttttttttttggcccattcacaggtcctatttatagacaactggcgtgtcctacatggcagggaatgcttcactggctaccgccaactgtgtggctgctatttaacaagagatgatgtattaaacactgctcgcctcttggggcttcaggcttaaaattgacagcatctggattatgaatacacctggcaccctggctaccagaatttcatatgggcagaataatattgtgtcaaactctacttcagattgtctccttatcccatcccacaaaacagaatctgtccgtttctctagtaagggagacttgttggagaggcgggactctgagttatctaatgtcagacatctagtggggcagctctcttcctcatgttataacatggatccacttgtttkatttaaaccttttaatataattttggtcagtctccttcagaaatataatctccatattgataggaaagcaataattgccatgaggtaacgatttttttcccaagtagatcagttagaaagaaatgcattctagaaataacaaaaatcctgataaagcaacaatttgcaaaatgtttggtcttaggacaccttaacactcttaaaagttattgaaggccccaaggagttcttgggtg

SEQ ID NO: 752631 - DNA, 622 bp, Homo sapiens
caagaaataacaaaaatcagagctgaactgaaggagacagagacatgaaaaacccttcaaaaaatgaaagaatccagaagctgttttttttttctttgaaaaaaagtaataaaatagaccgctagctagacgaataaagaaggaaagagagaagatttgaataaacacaatcagaaatgataaggggaatatttatcactgaccccacagaaatacaaacaaccaccagagaatattgtgaacacctctgggcacataaactaggaagtctagaagaaatggacaaattcctggacacacacacctccccaaggctgaaccaggaagaaactgaatccctgaacagaccagtaatgagtttggaaattgaggcagtaataaatagcctaccaaccaaaaaaatcccaggaccagatggattcacagctgaattctaccagatgtacaaagaggaactggtagcattcctactgawactatttcaaaaaattgagaaggagggactcctccctaactcattctatgaggccagcatcatcctgaaaccaaaacctggcagagatacaacaacaaaagaaaacttcaggccagtatccttcatgaacatcaatgcaaaaatcct

SEQ ID NO: 752632 - DNA, 546 bp, Homo sapiens
tgacaagagagtttgtttcttcatgggttctggtgggagaaaataaaatgcttcccctggtcatttgtaactctaaggctattgtcatgtaggtctagggttggaattaatacctcttatttaggtcttgaaaaccccaagcttacacattaacatcaaaaagataacagccagagatacacccccagtcaaacctcattgaagtcacacagatgaagccgtttgaacaaatccctaaactcacaaacaaaattataaaacacctgaggaaaaaaaaaamccgcctgtgattgagtatcagcaaacacaatgatgagcaggattacactaccaaaaactttagataatagagccaaccgagagtataaaataagtttgtataagatacttagaaacaataaggaatccaaacatatgagaaagatcaagattctacggaaaaagaagaggccggtttctttctttaaggaaccaaatagaacttccgaaaatgaaagacattatttccagtgacagcaaaagatcagaggatgggtttaaaagcag

SEQ ID NO: 752633 - DNA, 647 bp, Homo sapiens
caaaaactttagataatagagccaaccgagagtataaaataagtttgtataagatacttagaaacaataaggaatccaaacatatgagaaagatcaagattctacggaaaaagaagaggccggtttctttctttaaggaaccaaatagaacttccgaaaatgaaagacattatttccagtgacagcaaaagatcagaggatgggtttaaaagcagattcatctgctttagtgaactggaagatagaagtaaggaaattattcagaaggcagcaaggagagatagcaaatgtataaacggttaagagatacagaaaaatgatgcaaaggtccaaaaaaactctaataggaatgacagaatcagagaataaagagagcaggggtaaaccaataatcaaaaggatactggctggaaattttcagatttgaaaacagacatagttcctcgtattctaaaagcatgagccacagcaagaatcaataaaactgaatcacaggggaaccggygcaggtcaacaaagaaaaggggaaagatcttaaaatcaaccagaaagaaaagacacagtgctatcaaagggataataaactgacagcagacttctcaccaactgcaataaaaatggaatcatatcactaaggcattcgggga

SEQ ID NO: 752634 - DNA, 585 bp, Homo sapiens
caaggtagtctgtgaacgtgaactttaaagctaacatttttgtcactagttcctttttgctatgtcagaaaagaaaacaattcacagccattttatttttccagtttttctcaaggttagagactgtctcaacctcatmggctcagaagaatgcctttattttcccatgaaaagataatcctgaagtaatatttgcagcaagaggccattaggcaagtgttgaccctttatggctagtccaatttcctctctatgtgagatattagtaattaaattcagatttctgtgtatttattttctttcctcaactctgttcatggatgccatttttaggtatctcttgccacttgagcaatcaataagcaaaagagagatttgtaagaggccttaaaaggagagaaagaggatttttctcttaggcccagttatagaatcagttgttattttttggtctgcaataaatttttcccatatctgtatgggcattccacccgcgagtttcagttctcttattgcttttctaaatgtcttgagaggtcactagaaaattattacagttcattattatccagaaactccaacttc

SEQ ID NO: 752635 - DNA, 585 bp, Homo sapiens
caaggtagtctgtgaacgtgaactttaaagctaacatttttgtcactagttcctttttgctatgtcagaaaagaaaacaattcacagccattttatttttccagtttttctcaaggttagagactgtctcaacctcataggctcagaagaatgcctttattttcccatgaaaagataatcctgaagtaatatttgcagcaagaggccattaggsaagtgttgaccctttatggctagtccaatttcctctctatgtgagatattagtaattaaattcagatttctgtgtatttattttctttcctcaactctgttcatggatgccatttttaggtatctcttgccacttgagcaatcaataagcaaaagagagatttgtaagaggccttaaaaggagagaaagaggatttttctcttaggcccagttatagaatcagttgttattttttggtctgcaataaatttttcccatatctgtatgggcattccacccgcgagtttcagttctcttattgcttttctaaatgtcttgagaggtcactagaaaattattacagttcattattatccagaaactccaacttc

SEQ ID NO: 752636 - DNA, 585 bp, Homo sapiens
caaggtagtctgtgaacgtgaactttaaagctaacatttttgtcactagttcctttttgctatgtcagaaaagaaaacaattcacagccattttatttttccagtttttctcaaggttagagactgtctcaacctcataggctcagaagaatgcctttattttcccatgaaaagataatcctgaagtaatatttgcagcaagaggccattaggcaagtgttgaccctttatggmtagtccaatttcctctctatgtgagatattagtaattaaattcagatttctgtgtatttattttctttcctcaactctgttcatggatgccatttttaggtatctcttgccacttgagcaatcaataagcaaaagagagatttgtaagaggccttaaaaggagagaaagaggatttttctcttaggcccagttatagaatcagttgttattttttggtctgcaataaatttttcccatatctgtatgggcattccacccgcgagtttcagttctcttattgcttttctaaatgtcttgagaggtcactagaaaattattacagttcattattatccagaaactccaacttc

SEQ ID NO: 752637 - DNA, 611 bp, Homo sapiens
tgtaagtcccaaggtagtctgtgaacgtgaactttaaagctaacatttttgtcactagttcctttttgctatgtcagaaaagaaaacaattcacagccattttatttttccagtttttctcaaggttagagactgtctcaacctcataggctcagaagaatgcctttattttcccatgaaaagataatcctgaagtaatatttgcagcaagaggccattaggcaagtgttgaccctttatggctagtccaatttcctctctatgtgagatattagtaattaaattcagatttctgtgtatttattttctttcctcaactctgttcatggatgccatttttaggtatctcttgccacttgagcaatcaataagcaaaagagagatttgtaagaggccttaaaaggagagaaagaggatttttctcttaggcccagttatasaatcagttgttattttttggtctgcaataaatttttcccatatctgtatgggcattccacccgcgagtttcagttctcttattgcttttctaaatgtcttgagaggtcactagaaaattattacagttcattattatccagaaactccaacttctgacataaagtagcaat

SEQ ID NO: 752638 - DNA, 594 bp, Homo sapiens
tatcttcacggctgcaggactagaaataacaatacgtccagcttaagaactcatgcagctgtatggatttaaggcatccttactaatgacagcctagtagagaggaggagaacattatggggaaagtaactcccaatcttatgttctcctcaktgtttggtcccgacttcaggctgactctgaataatttctttaatgggtagaaaacgaagcagaaatagaaactgaattcacaattccaggattcctttacccactctgtactaaactccacctaatgcccagagattctagattattgcaggttttatactagattatcttcaggttggaaggcttataaaaatccaagtcctgtagattgctaagttttatactgtaggtgaaagaaaatgcaaagtatggaagggttacagtcaatataagactctagaattatgtaatgagataaatattatatacataattctatatacatataattgtgtatatacacacaaatacatggatatggtgtgtatgtgtgtgtatctgagtgtcatacacatatatcatgacactcagatcttataagcattcatccacagaaatgaa

SEQ ID NO: 752639 - DNA, 594 bp, Homo sapiens
tatcttcacggctgcaggactagaaataacaatacgtccagcttaagaactcatgcagctgtatggatttaaggcatccttactaatgacagcctagtagagaggaggagaacattatggggaaagtaactcccaatcttatgttctcctcagtgtttggtcccgacttcaggctgactctgaataatttctttaatgggtagaaaamgaagcagaaatagaaactgaattcacaattccaggattcctttacccactctgtactaaactccacctaatgcccagagattctagattattgcaggttttatactagattatcttcaggttggaaggcttataaaaatccaagtcctgtagattgctaagttttatactgtaggtgaaagaaaatgcaaagtatggaagggttacagtcaatataagactctagaattatgtaatgagataaatattatatacataattctatatacatataattgtgtatatacacacaaatacatggatatggtgtgtatgtgtgtgtatctgagtgtcatacacatatatcatgacactcagatcttataagcattcatccacagaaatgaa

SEQ ID NO: 752640 - DNA, 594 bp, Homo sapiens
tatcttcacggctgcaggactagaaataacaatacgtccagcttaagaactcatgcagctgtatggatttaaggcatccttactaatgacagcctagtagagaggaggagaacattatggggaaagtaactcccaatcttatgttctcctcagtgtttggtcccgacttcaggctgactctgaataatttctttaatgggtagaaaacgaagcagaaatagaaactgaattcacaattccaggattcctttacccactctgtactaaactccacctaatgcccagagattctagattattgcaggttttatactagattatcttcaggttggaaggcttataaaaatccaagtcctgtagattgctaagttttatactgtaggtgaaagaaaatgcaaagtatggaagggttacagtcaatmtaagactctagaattatgtaatgagataaatattatatacataattctatatacatataattgtgtatatacacacaaatacatggatatggtgtgtatgtgtgtgtatctgagtgtcatacacatatatcatgacactcagatcttataagcattcatccacagaaatgaa

SEQ ID NO: 752641 - DNA, 641 bp, Homo sapiens
caaagtagatatttctatgggatttcctgtcacttcacctgatttgtgtgctttggaagctacatgtttagtgagttttgattgtaaggtcagcaatacgagtctgggcaggataattttgtttctttttttcttttttctccctctcttcctctcttctagtttctcttttcttgattatcaatgacacttgctcaataccattcattaatgacagcagttgtattagtctgttttcatgctgctgataaagacatacccgagactgggtgatttacaaaagaaagatgtttaattggactcacagtkctacatggctggggaggcctcacaattatggtggaaggcaaggagaagcaagtcacatcttacgaggatggcagcagacaaagagagagcttgtgcagggaaactcccatttttaaaaccctcagatctcgtgagacccattcactatcacaagaactgcatgggaaagacccaccccatgattcagtcatctccgacctggtccttcccacaacacatgggcattatgggagctacaagatgagatttgggtagggacactgagccaaaccatatcagtagttattaaaggctttttatggtttgccatttttatatttagaatagaagct

SEQ ID NO: 752642 - DNA, 546 bp, Homo sapiens
cttcccatgttcattaattaattcatattgccccgcgcctagtcccattttcacttcctttgacgctcctagtagttttgttaagtcttaccctgtaatttttgcttttaattttgatacctctttatgacttaacaataaaaakgatgtatggtttttatcaactgtctccaaaataatctcttgttatgcagggagtacagttcttttcattcatacataagttcagtagttgcttccctaactgcaaaggcaatctcatttagttgagtagctcttgaaagcagctttgagttagaagtatgtgtgttacacccccacattagtgtgctgtgtggggcagttcaacacaaatgtaacaatgtatttttgtgaatgagagttggcatgtcaaatgcatcctctagaaaaataattagtgttatagtcttaagatttgttttctaaagttgatactgtgggttatttttgtgaacagcctgatgtttgggaccttttttcctcaaaataaacaagtccttattaaaccaggggaaaaaataaata

SEQ ID NO: 752643 - DNA, 580 bp, Homo sapiens
agtcttggtcaattcctttactgcctgtgatgatggtcccagccagtcacaccttcaacattttggtggcctatatggagagtacttagggaatgcttgaagagtaaagggagtgctgggggacctgtctcttactctcttcttttcctctcctccaactccaatctctcatggacgcatctgagcctagagacaattgaaggtccccagccagggccactgcctggcagaccagaaggtcctagtagaaagacttctgaccaccatcgcccaactgagtgacattttggagtattgctttcccttccagtcttccagaagacaaaactgtactgtccctctggcaattgatggctactggccagggccactctctggtgtagcctaaaggccaggggtgaacacgtttggctgycttgcccagaagagaggaaggctcccctttctggtcaaaagcccccaatcctttgtctagtgcaattagccatggaagctcaaccaggatgaacctacacatgttttgggaaactcagacccctctttctcactctaaactctcccatgaagacaaccaggcaac

SEQ ID NO: 752644 - DNA, 607 bp, Homo sapiens
aaaggccaggggtgaacacgtttggctgccttgcccagaagagaggaaggctcccctttctggtcaaaagcccccaatcctttgtctagtgcaattagccatggaagctcaaccaggatgaacctacacatgttttgggaaactcagacccctctttctcactctaaactctcccatgwagacaaccaggcaacctgctcccaatgtcttaacccaggtgattccaaacagcactgggacaatgagtcttcccttaactttttcccctcacacttggatggaggactctgcataattcatacctgggctgaggtggggttgctcacccagtgttcatccagtggaaggtcctagcgctcaaagatcggggcactaggtgggacacccctttggaaagtgcatcttggagtccctcagtggatgtgagtggaacccttttcccttggcaggatgccccaataaaaattgtgttttttgcacccccagacatttttttcctggttccatcatgggacaatgcccctccattccctcagacttgcttctgagctgcattttaaagcattgggaaaaatttgactctcaaactctcaaaaagaaacatcta

SEQ ID NO: 752645 - DNA, 607 bp, Homo sapiens
aaaggccaggggtgaacacgtttggctgccttgcccagaagagaggaaggctcccctttctggtcaaaagcccccaatcctttgtctagtgcaattagccatggaagctcaaccaggatgaacctacacatgttttgggaaactcagacccctctttctcactctaaactctcccatgaagacaacmaggcaacctgctcccaatgtcttaacccaggtgattccaaacagcactgggacaatgagtcttcccttaactttttcccctcacacttggatggaggactctgcataattcatacctgggctgaggtggggttgctcacccagtgttcatccagtggaaggtcctagcgctcaaagatcggggcactaggtgggacacccctttggaaagtgcatcttggagtccctcagtggatgtgagtggaacccttttcccttggcaggatgccccaataaaaattgtgttttttgcacccccagacatttttttcctggttccatcatgggacaatgcccctccattccctcagacttgcttctgagctgcattttaaagcattgggaaaaatttgactctcaaactctcaaaaagaaacatcta

SEQ ID NO: 752646 - DNA, 480 bp, Homo sapiens
cccaggacaacagaaagtagttggaagatgagatctccacctgaatgccgaagatttgtcatcgtcattctgccagacaaaggtgggatttggagtcctggaaagtaagcaacaacgaggaaagggtcccaggtgggagaaagcaactgttctgaaagacaactaatcacaggcaacccactagcatgacgacctgtttytaaatacctcgttccagtaccgagtctcagcagcacagccttatctgcacaccttgtctgcatggagtccctccaatatgattctataaaacttccctccagcctctgtctttcgacagacagctccttctctgctgtgtggcccctgcacccttgcaacgtatcctcatactttctctaataaatctgcctttctttgcctatggctgtcttaatagattcatttactgaccacaacaaccagcctggccggttgcaaccagaacaattttctttttgg

SEQ ID NO: 752647 - DNA, 545 bp, Homo sapiens
gaaatgcacatgagttgatttgatgagtgtttggggtgggagtggtagtgacaggaggtaagaggaaatgagcttgggaaaattcaaaaatgaaaataaggaaggcaaaagagaaaggctggaaacaacaaaagccctagaggttttacacacttggaacacttaagagacagcttcctaagcttggtcatgagttttatcatgactgtatccttacttgttgcttccagaaaaagaaaattatgtgagactttgagactgatcaaaaatcttataacagggatagaggcaaaaactagagaaaccggggttataagtcagattgtagaccatttcatgtcytcaagctgctgtgatgtgaaacatggaatgagcaccacagatagcctgagtatctatattgtgccaaatgttggtatagataacatgtccttctaaagacgtttacaaaccaagctagaggaaagcagcaaatgatgtttcaccaacagaaaagtaaagtagagactactaaggcatcacaactcaagcataattttttacaa

SEQ ID NO: 752648 - DNA, 600 bp, Homo sapiens
atgaatattgcaataaaaaagtcacagtatttttttgatttctcagggcatataaaagttatgtttacactatactctagtctcttaattgtggaacacatttgtgtttatacaatgcatatatcttaattttaaaaacttcattgctaaaaaatgctaaggactatctgagccttcggtgagtcataatgtttttttgtggtggagagtcttgcctcactgtcaatgactactgactgatcagtgtggtggtcgctgaaggttgaggtggctatggcattttctcgaaataagacaaaaatgtttgccacgttcattgactctttctttcataaaagattttcctagagcattcaatgctgtttgatagtattttactgacagaacttttttcaaaattggaatcrctcctctcaaaccctgttgctgctttatcaaccaaatttttgtaatattttaaatcctttgttgtcatttccacagtgttcattgcatcttcaacaggagtagattccatcttaagaaaacattttctttgctcgtctataagaagaaaggcctcatccattcaagttttataatgagattgcagcaattaag

SEQ ID NO: 752649 - DNA, 559 bp, Homo sapiens
ggcggaaaaccgcttaaaggcgttcctgaaccacaaacaatagcatgagagatctgtgccttaaggacatgtccctgctgcagataactagccagagcccatccctttgtttcccgtaaggaatacttttagttaatctataatatataraaacaatgcttatcactggcttgctgtcaataaatatgtaggtaaatctccgtttgggggtctcggctctgaaggctgtgagtcccctgatttcccactccacacctctatatttctgtgtgtgtgtctttaattcctctagcgccactgggttggcatctccccgaatgagctggtctcagcaacctacagtagcataacttaaattttctttaagatgtaaccaattttataagtatttcatattgtatccaaatatttccctgtattcctcttatctcaacccatcccaaccacacatatacaaataaaaagaaaaaaaaaggaaaaaaaggaagagtgaactactactacacctgactatctacataggagaatgtaaagtattaaattaagagagggtaaagac

SEQ ID NO: 752650 - DNA, 521 bp, Homo sapiens
tgtgcctaccatgtgtcaaaagataagctgtgaaagttacagagatctctctaataaagtaacattaataaacccagatctgatttcttattggaggctgaaaactcaactattctaaaatatgaattagatcccagatctatgtgatctatcaaaaattaatacattgctytacttcaaattgttgttgcattgaaagagatagttcacgtaaagcacttagcaaagtgtctggaaactagttcaaaattattatccatcattactatcattatcactaccctttaaaatccctttgaattaaattataagtctcccttaaacaatgaaatataaaaacatatctaaagtgagtaaaccaatattaagtaattttttttcattcaaatgccattcatcagtgtaggaccatctcgtcagaagtaatttttgaatcatgtttggttgaagcagtggctactcactgattggcatgtaagtgatgctctaaatcagagcaatggtgtaagagtacgtaggta

SEQ ID NO: 752651 - DNA, 550 bp, Homo sapiens
attatcagcttgtatatactactttaaactcactgcagtagaaaatgttttccatgctgctgatgagaaaaacacaattgtatctatttttatcacgtctttgaatgatatagaacttttcttagccagataagcttaaggttaggtacttagctcaattttaacctakaaatagattggaggttttttgtttgtttgtttttgagatgaagtctctctctgtcactgaagctggatcataatggcacgatctcggctcactggaacttccacctcctgggttcaagcaattttcctgcctcggtctccggagtagctgggactacaggcatgcgccaccatgcccggctaattttcgtatttttagtagagatgggattttgccgtgttggccaggctggttccgatctcctgacctcaagtgatccacccacctcagcatctcaaagtgctgagattacaggagagatccaccatgcctggccattttttacaaacatttagactctatcaatcaaatataatcatgcaagagcatgttaactgacaa

SEQ ID NO: 752652 - DNA, 641 bp, Homo sapiens
ccatcatgtttgtcatattttattcattagaaatgagtcccttgatctgccttatactctaggggagaggattctgcaagaatctggactaccaggcagtgggatcattgggtgccatcttagaggctgccttgcacagcmtctaggaggtggctgcagaatggattttggagcaggaacagggggaagggaagcagggaatcagaagggtgtggtccacaagctaatggaaggaggatagaattcaagtataggctaggttatgatgtcgtaacaacaagtcataatctgaggggcttgaaataacaaagatttatttcttcctcatgcagatagtaattacaggctgttttgggctttgtgccatatcatcacacgtgggacatgttcatcacgggtcatctggggattcttctttatgtcattttcactgtgggacctaagctgacaaagcagcttgaatgtggaaaaactccaactgtgcttcccccactatactctcacaaagcaaatctgacaccggatgtgtggggatttctgcccaccagcaagcaagcagtcagttctgcagtgcacaccaactgaatgtcctttaattgaattctgacactgtctacctggagacagcatcggatcccaca

SEQ ID NO: 752653 - DNA, 638 bp, Homo sapiens
agcccatccatcttctagtttacaaaacacaacattttcaaactgtttacttatgtccatgccaacaatattactcaaatgtggtggagtaaaaaagccacagggaatagtgtagttggccaagagcagtatttggggatctaaaattacagggaaaatcatacaacattcattttacttagtcccaaatctctatcagatgatgatgytgaacagaaagattctaaaattggcaaggagaaaggaaaagtcatctcaaagtttgggccatgccagagcagccttacagagcaaaggcaggaggaaacagagtaaggtgttgtgcccttgaaaaagctgtcacaatcagcagtgtctgctgggcaaggaaaagtacagagagaaaaagcaggaaagaaaaacaagtggaaattattgccaaaaggtgagagtaaacaaagaaaagaaaaagaattctttctatagtatttagaggacagcattagcaacatcgcaaaatcagaaatgctacttcgactcaactccattctattcctaggtagcatttgtactgtggcacttgtactgtggcaaagcaagggacctgcttcccaggagctcaacactgatgaagggacagatgcctcttctacctgctc

SEQ ID NO: 752654 - DNA, 667 bp, Homo sapiens
gaagggagatgtggctatttttgctgaggccagagctctactgagagctggagggctagttggaaagtttttaaaagagataatttggcaggaccatgaaggatactgaaatggcaaaatggagtaagaaccacaaaagatgattaaaactggaaaggaggtacaggtagtaggagggacctaaacatmctgtctctgcatactcctgttctgtggtaggtaaaagaggaggctccaaagaagccttacatggaacagaaaggaaggaacagttagtcagagaagtctgaggaaaagcagaagcttttatagcatcttcatttttatatttacagaagagatcaaatgcaaacattaattttttattgtgctgaaagatttgaaggtcaaacagaagctgatagctctgattctttagaaaaatagaagatactaagatcatttgagcatgatgtatcttggagtgaaattgaagaagtgaggtatgtcattgtagtccactgccattacttttgagaagctatgggaactagagaagcggttgaaaactagaggttggcaataacaagtgttatcttctccctttaaaagtgattaaaaagggggtctacagtaatgaccagttggtatgtttaatattgatatattacaagagcaataataataa

SEQ ID NO: 752655 - DNA, 578 bp, Homo sapiens
aatttgtggacatattttaaaaccatcacagtgttcaacagaaggggcactcttttgatgagagtcaaaggaaatgaggaagctgaaaatgggcaacctaaaaagaattagctgacagctggaaaacttagagtgtacaactatacrtcagtaatttttttattggcaactaattgtttttcaattttatttatcacataatattggagcatagctagctatatatgatgattttgggaaaaggatattgaggctgaaatctttcctaatgatgagatctattgagtttggccgtagtcccatagggggagtagttggggccattggatgcagtcatttaaaaactgagccagagagaagtttgtattggaaaaaaaaaatgaagtaaatgacagaatcagtattctgcaagcttggattctctgagactctaattttaaattaatttagagattttaaaatgccaattttctatacaactaagtgcttcaacagatttttgtctccattgaatccatgaaacttgagagttgttttggccattgcaaaaatgttcatatctttgacttccttggtgc

SEQ ID NO: 752656 - DNA, 604 bp, Homo sapiens
tgtgaaatgcctgcctcactacacggaaatggttttttctgaattttttttagctccttcaaaatagcttcattaagccaggagataaataggagccacaggaatgaaagaggaatggagagggagagaaaagagcttcataaatggggcaggggaaaatggttgcttgtgcccagggggtaaggaatgggaattgggagagtgtttcctttcaaatttcttttcttggagtgaagtgcatcctaatgtcaaaatgtctatgtcttcttcccgtctgagttaagaacatccttcctagaaatataattaggaaggattagctgctgcataaagaggctttgaacaaattaaggaagactgatgcctcacttcgaatgctgtccatcaaacctccaaataccagcacttggcaaaacaccaacgtcaggcaaaraaacaaaaggcagtgctctgaaagcactgaaactctcggaaagagagttttttaaaaaataaattctgtgtctacagtagacagtccagctaattctaaacatttgggaacagctctctatattggtaactgactgtaatgaataggttgtcacatttccttcatgaaaca

SEQ ID NO: 752657 - DNA, 614 bp, Homo sapiens
cataacctaaattaatcaaagggctaattctatagctttgtatagtttcctttgtatagctcatttgtcatttcaaaatctccttaagagcaggactggatcttgtacatcttaatcttctctgcagggactagataatggggcaaactatatagtttattaatatcaggattgatggcacccaaggccatctcttctcatctcttctctttacttaaaagtgcaccagtaggcacacccatatatacatgcctataacaatgctaccataaaaaagcatcttcattcagcagatgaagtctccaaagcaaactgcctaatgactttattttaccaaagctgagtcagagctgaaaccttagcctcctctttgactcacaacattcttgtctaaagtacaccgcggctaccaaaaggaaggaaaaaaaatagactgttcctttatctgacatccgacatayggttcttactaacaatccatatatatacatcatagagggtcaaattctaacagtggatggtgatattcaagatgaataatgttgcttgtaaattactttacagtttatgtaagtcataatgctagaaaaaactaattgcaattcacagtaatc

SEQ ID NO: 752658 - DNA, 634 bp, Homo sapiens
tagagttcattcaaaggaagacaatacctttctaaataatctttaaatttgttttaatcccatccatgttatctttattcatccaattgagccccctcttaaatgcctgcattgtgccaagaactgcagacaaaagatggagacaaatttcttgctctcaagtagatcagagtccaataggaaagacacaagtacagaaaaagaatcaccatacagctacgtgtcatamtaacaaaggtgtagaaagaggaacatggcggccttaattggacaattggcaaatatttgtgagttattatattcaagggaccataaaggatacaaagaattcttagaaatggtttgtttccttgaggagctactaccgagcctgagagaaaatcaaaaaatgtgactacacacctccttgcccaagctcatctactgatgagcagacacgtacaagagggagctatgctctggggtcacagagatttgagtgtgaagccccccccaccccatcccagctctgtgcccttgggcaagtggccaagtttgactcatgccttattcattcaacaaaatactgagtgacaattctatgctcaattttgcaccaggcactgtcatacgccctgtggctagaactggaaac

SEQ ID NO: 752659 - DNA, 532 bp, Homo sapiens
cacaagatcagatggccctttaaagccatgtgttttactagcaagctgggtgatgaaaactatcagaaggaaagacgaaaggaaaagcagaaatttattcagatggaaaaaaagagagacttggccaaaaccacttgtagtatcrgaagtcgaatgagatgatcactagcaataaagtggaaacagacagtcttgtgctgtcaaaactctaagctgtgtgtggagccactctatccctgacaccttatcacacggtaggtaatttccaaaaaaagtcattcttaaagagtgttcttgggggacctcccttgagtgctccaaaaagttgaaaacattacaaatgtacagtgtcatcttcataatctcaaaaccctcccaatgggaaaaaatgccttaaaacaagtgtcttagatgaaaattatgcagtacagttttaacaatctggctttatgttccaaagatctaacttaagacttgaataaaagaaaggattatcagaggatgctttagagaatgtattagtccattttca

SEQ ID NO: 752660 - DNA, 664 bp, Homo sapiens
tacttagttctaaatgacacataaattgcttttaatttaaaaaattctaactggctatataccttgatatggagatgagaagtaagcaaaactgcgtagagttccatgaaagtgttttgaaaaattagagaggaaaaacacattttgagaccagaatagaagaccattatcttttcataggctaaactgtgtagtcaggatttgaattttaaatccggaaaagagagcaagcttgaaatgggagtgatggtgaggtggacaccaaattattttatagtctactgtatttcttcatactttctagataaaaaattctttttgggttgttttatgcattgtgagaaattcggaagaatggagaagaatgcaaaagcatatcaaatcactgtaaacatttaatagtctacaaatatttaacacttgctgtgtactcarttttttgtaggccgtttgttagaattgagttcacatggggtataattctacgttcacgacttgacattctcaacctcagttcagcattttttctttttagaaaagagatcgttcataatgattataatttacaacacacatattttaaaggatagtaataaaaaaacccaaactgttgtacccactacgtagctgaagaaataaaaacactgttgtcattatcttagag

SEQ ID NO: 752661 - DNA, 579 bp, Homo sapiens
tgttattggtctattcagggatttgacttcttcctggtttagtcttgggagggtgtatgtgtccaggaattcatatttcttctagattttctagtttatttgcatagaggaagtcaaatagtattctctgatggtagtttgtatttctttgggatcattggtgatatcccttttatcattttttattgtgtctatttgattcttctctcttttcttctttattagtgtggytagttgtatatctattttattaatcttttccaaaaaccagctcctggattcattgattttttgaagggttttttgtgtctctatctccttcagttctgctctgatcttaagttatttcttgtcttctgctagcttttgaatgtgtttgctcttgcttctccaattcttttaattgtgatgttagggtgttgattttagatctttcctgctttctcttgtgggcatttagtgctataaatttccctgtacacactgctttaaatgtgtcccagagattctggtacgttgtgtctttgttctcattggtttcaaagaacttacttctttctgccttaatttcgttatgta

SEQ ID NO: 752662 - DNA, 620 bp, Homo sapiens
gttcttggggaatatttttggaaagtccccccatagatctcatgcacaggtgggctcaggatgttctattttggggaatgtgagtgcacagtggtatcttcagaagaacgcacttgtttgtacattgattttcaccaaagagcttgttcagattaggaaacacagtggggttggcggtggtcacagactttatgctcagggagaaacttattatcctgaattaggttggtagccatctgccagctcaactatttttggtaccagaacttagtgatgccatctctttaatgaccaaaagtcaccatgtctctactatcttgcctttgtgaggctctgcttacattgggcgggggttgccatgctaacctgaaaactcttgggcatttctgcatatcctaatatcatggatggttggactgaaagaaggaggaattaaaatatttaatttatatataagawacagtgtagtatagatgtatgtgtgtgtatgtctatgtgtatgtatgtatatatgtttgcacacatatataaatgtgtgcgtctgtgtatagactgtgtataccaaatccaaaatctcaaatgcttcaaattccaaaactttttgagtgtgaatatgatgc

SEQ ID NO: 752663 - DNA, 617 bp, Homo sapiens
gggaatagccaacaacccagaaggcatatggggaacatttctgaggcagcaagaggtggttggctttggtcaatcccttccctgcctggggctcccagggcccccagctcagcagacacagaggcagagctgccagtttgacatcagacagcagtggaggttattcttcatctgaccagactctagcagttacctttgttgccttaaacgtgtgacttattatgaacagtgacaattaggagacactggaaatagtccaagggtcactggtgtgtcattttagggrgacctgtggttgaatcttggctcagacattgaacagttatgagattttggacaaataaatgtctttgactctgtgtttttgttttccatctgaaattgaggattacttatctattacctaggctcgtgggtattaattggaagcatttatatgtaaagccatgaaatattgacaaagtaataaaccttatggaccatgattttcatttagtgattaaatgtctgtagctaagttattaatgtttttggacatcagccataggaaaagttaacaagattggtttaagctcaccactctcagtttctattcagtaagttagtagttgatactc

SEQ ID NO: 752664 - DNA, 503 bp, Homo sapiens
aattgatcttttcaatgtaagttttaattatgttctggcttagtgtaatgatgtagagatagtgttacatagtttcagttccaatctggttttccctaaaacggaagatatttagtaacatttgtatctgctattactygttcttgtataagaaaaagaaagtaaagaaatggttaactttctgtttgcaaggaggaagaaggtgttcacttgctttttcaaaagtgggagaaaagtgctctatattcccttttgcttttcttggaagaaatatgtactgtagaaagaaaaaacaccataattagaacttcttgaaaaaacaagatggtatttcagttatacctcattttgatgaaggatgggtatctggaagcaggaccgggtacatggtcataaggaattgaaaaagcctagactttaaggtcagagagataggagtttgaatctaagctctttcattaaaatggtggatatattgtttaataaccctaagggtttttttt

SEQ ID NO: 752665 - DNA, 622 bp, Homo sapiens
ttatagctcacagtaaccttgaactcctgggctcaggcaatcctcctgcctcagcctccctagtagctaggactacaggtgtgctccaccataccttgctgatttttaaatattttgtagagatgagagtcttaatatgttgcccaggctgatctcaaactcctggcctcagcaatccttcccccttgaccttccctctcctttttttttttttttttttttggaaggccagctacttcatctgtcatcacccaccattaaattttataggagcttggttgcctgaacagatttttaaagtttttattaattatagtaaatttatattaaaatactttattataaacaatattcattgkagaaagttcgaagatattaataggtataagtaaaataaagcaaacttctgcagagtttattcctattttcttcaatgtatagaattctagattgtttatttctgtatgcatttgtttataccaagatgaaatgctgttttggttatcctcatttgtgaactgatttttctctgctaatgctcttcactttttcatgttaattcattttcatcttagttatgtccattctcacatcctcatatatacccagtccttccttacat

SEQ ID NO: 752666 - DNA, 509 bp, Homo sapiens
atgggttttctatgcacaagttgaagcagacaatgccaaaagtattttatatatcattaaatctttaggaaattttgacctcgagaaatttatttcattttatttttgttttattttttgagacggagtcttgctctgtccccaggctggagtgcagtggcacgatctcggctccctgcaagttccgcctcctgggttcacgccattctcctgcctcagcctcccgagtagctgggactacaggcgccgccaccacgcccggctaattttttgtatttttagtagagasggggtttcaccgcgttagccaggatggtctcagtctcctgacctcgtgatccacccgcctcggcctcccaaagtgctgggatgacaggtgtgagccaccgcgccagccggcctcgggaaatttttagcactgggaacaaaactgaaagagtggattttcacatggcctttaaggaaataagcgtccatttggtgtgaatacttgatgtgggtaaagacct

SEQ ID NO: 752667 - DNA, 509 bp, Homo sapiens
atgggttttctatgcacaagttgaagcagacaatgccaaaagtattttatatatcattaaatctttaggaaattttgacctcgagaaatttatttcattttatttttgttttattttttgagacggagtcttgctctgtccccaggctggagtgcagtggcacgatctcggctccctgcaagttccgcctcctgggttcacgccattctcctgcctcagcctcccgagtagctgggactacaggcgccgccaccacgcccggctaattttttgtatttttagtagagagggggtttcaccgcgttagccaggatggtctcagtctcctgacctcgtgatccacccgcctcggcctmccaaagtgctgggatgacaggtgtgagccaccgcgccagccggcctcgggaaatttttagcactgggaacaaaactgaaagagtggattttcacatggcctttaaggaaataagcgtccatttggtgtgaatacttgatgtgggtaaagacct

SEQ ID NO: 752668 - DNA, 637 bp, Homo sapiens
tatgccagggctgggcgcagtggctcacgcctgtaatcccagcactttggaaggctgaggtgggcagattgcttgagcccaggagttcgagaccagcctaggctgaacatggtgaaaccccatctgtaatgaaaaattacaaaaattagccaggcacagtagcatgcgcctgtagtcccggctacttgggaggctgaggtgggagaatggcttgagcctgggaggtggaggttacagtgagctgagattgtgttgctgcrctccagcctgggcatcggagccaaaccccgtctcaggagaaataatgataatttttaaaaaagacctatgccagagtagagatacggtagaacacacgatggcccacagagggaaatatatgacaagtggctaataaaacatctggaggagatgacatttccttagtcgacatctgaaagaaggctgggatttagtaatatggcagtggatggttcttttcaaagaggactgtccagtgtgagcgaaggcctagaggctggaaacgggggactatgtagacagggaactatgaatagtctggtggcctggcgtgaaggaaatgtaaacggagctgtgggaaaatgctgcagtactagtttgaggctaggttctaggc

SEQ ID NO: 752669 - DNA, 637 bp, Homo sapiens
tatgccagggctgggcgcagtggctcacgcctgtaatcccagcactttggaaggctgaggtgggcagattgcttgagcccaggagttcgagaccagcctaggctgaacatggtgaaaccccatctgtaatgaaaaattacaaaaattagccaggcacagtagcatgcgcctgtagtcccggctacttgggaggctgaggtgggagaatggcttgagcctgggaggtggaggttacagtgagctgagattgtgttgctgcactccagcctgggcatcggagccaaacccygtctcaggagaaataatgataatttttaaaaaagacctatgccagagtagagatacggtagaacacacgatggcccacagagggaaatatatgacaagtggctaataaaacatctggaggagatgacatttccttagtcgacatctgaaagaaggctgggatttagtaatatggcagtggatggttcttttcaaagaggactgtccagtgtgagcgaaggcctagaggctggaaacgggggactatgtagacagggaactatgaatagtctggtggcctggcgtgaaggaaatgtaaacggagctgtgggaaaatgctgcagtactagtttgaggctaggttctaggc

SEQ ID NO: 752670 - DNA, 579 bp, Homo sapiens
gcttggttggaggagtggagaccttaagagatgtctcgatttttactcatgggattttaattgatacaggcgatgcatgacagcatggagacattgcttcttcctggtgtcatcgcaagaagctttactacttgtaattcccaagagaagggagcacaccaggccacagggccatagggatgcaccagtgttggtcaggaggcagaagggagccaggggcacgctcagsgcagaggcttcgtcgtgtttctgggggaaagggaaggcagggcaaggcaaacaggctagtcctgggaacagcagtctctcctcagtcagcaagcccacaaagccagagcatcaagaatacagaagataagaagcagttaccacaataagaaagagttaatacaattggccctgtgatgaagggatgctcaacagacaaatgcagaatctaagaaagcccagaacaggaggcggtgcagaactggctgtgtgattctgaggggcctcggtgtggctttcttcgtatttctgtttggggctcattgtttcttggatctgtgggtttgtatagtttcatctaatttggacaaa

SEQ ID NO: 752671 - DNA, 579 bp, Homo sapiens
gcttggttggaggagtggagaccttaagagatgtctcgatttttactcatgggattttaattgatacaggcgatgcatgacagcatggagacattgcttcttcctggtgtcatcgcaagaagctttactacttgtaattcccaagagaagggagcacaccaggccacagggccatagggatgcaccagtgttggtcaggaggcagaagggagccaggggcacgctcagcscagaggcttcgtcgtgtttctgggggaaagggaaggcagggcaaggcaaacaggctagtcctgggaacagcagtctctcctcagtcagcaagcccacaaagccagagcatcaagaatacagaagataagaagcagttaccacaataagaaagagttaatacaattggccctgtgatgaagggatgctcaacagacaaatgcagaatctaagaaagcccagaacaggaggcggtgcagaactggctgtgtgattctgaggggcctcggtgtggctttcttcgtatttctgtttggggctcattgtttcttggatctgtgggtttgtatagtttcatctaatttggacaaa

SEQ ID NO: 752672 - DNA, 491 bp, Homo sapiens
tggaactggaggttattgtgttaagtgaaataagccaggcacagaaagatagatactgcaaggtctcactcatgtgggacctaaaaaaattggtcttgtggagatagagaatagaatgatagcagaggctgggaagggtgtgtgggtgggagacgggatgaagagcrgttgattcgtgggtaaaaacatacacttagatacaataaatatacccctgtatttgataggagagaagggtgactatagttagcaacattgcagatggagtatatttcagagtagctagaaacgaggacttgaaatgttccccacaaataggaaggataaatactcaaggtaatagatgccccaaacacccttacctggatcattacgcattctatgaatgtaacaaatattcacatgtaccccattaatatgtaacacctttcgaatcaggttttttttttttttttttttgagtcgttttaaggagtgaaatttagtagcca

SEQ ID NO: 752673 - DNA, 625 bp, Homo sapiens
caccccttcttttcagggcgtctttcattgcaaacagcagataaactagttggaaaactcagcagattctcacggtggtgcctagcaggccaggcctagctgccgtttaacctgtgactgagggtgatgccaccggcctgtaaacacacattggaaaatctttacgtcygtggacacgccatgccccacagagacagctgtgcatggttctttaggtttggggtgctgtgctggcagttgcctgataaatgtgtaggattaaaatgggatgccctggagcttagctaacctttatcccccctcccccctctaaaatgaaggggctgctagttttgtttgctttatgaaagatggatctgttgttattgtttttagaacctttggagaaagatttcttgggaggaagcgatcctgaacccccagagattttctcatttactggtgcaccagctttcgagtcctaggtcttcatcctggctcagccaccctccagctgtgtgacctttgagaagttgcttgactacactgagtctcattgtcacctatgagtggaggttgctacgttgctactgagtggagcacctacccccagccactctcacagggtgatggtgacgattaaatg

SEQ ID NO: 752674 - DNA, 614 bp, Homo sapiens
gcaggcttagaaataaccttcatataatgttaataaaaaccaaactaagtagctattcaaagtatactcacggcattggacatttgggggtaattttcaccaaccaacaatgtctgtattagtatctttatatgatggtattgttatttctatagtcttggtcaacaaaatttactcatgtttgatataatttccacatacccatagcatgtctttggaagtaatgcagtgcttgaaatttaaggaaaaaatatctggttaggattccaaaatataaactattaaataaaatagtgctatttacttttaagatgaggacagtattttgatggtacagattatttcatcatccaggtattgagtctagcacccattagttatttttcctgatgatctcccatctccctgtctccactctctgaaagtccccagtgtgtgttgttccyctctatgcgtccatgtgagttctcatcatttagctcctacttataagtgagaacatgtggtgtttggttttctgttcctgtgttagtttgctaaggataatggcctctagctccgtccatgtccctgcaaaagacatgatctctgttctttgtcatggcttcatagta

SEQ ID NO: 752675 - DNA, 614 bp, Homo sapiens
gcaggcttagaaataaccttcatataatgttaataaaaaccaaactaagtagctattcaaagtatactcacggcattggacatttgggggtaattttcaccaaccaacaatgtctgtattagtatctttatatgatggtattgttatttctatagtcttggtcaacaaaatttactcatgtttgatataatttccacatacccatagcatgtctttggaagtaatgcagtgcttgaaatttaaggaaaaaatatctggttaggattccaaaatataaactattaaataaaatagtgctatttacttttaagatgaggacagtattttgatggtacagattatttcatcatccaggtattgagtctagcacccattagttatttttcctgatgatctcccatctccctgtctccactctctgaaagtccccagtgtgtgttgttcccctctatgygtccatgtgagttctcatcatttagctcctacttataagtgagaacatgtggtgtttggttttctgttcctgtgttagtttgctaaggataatggcctctagctccgtccatgtccctgcaaaagacatgatctctgttctttgtcatggcttcatagta

SEQ ID NO: 752676 - DNA, 445 bp, Homo sapiens
cgtctccttgacatccatatggattagctttctggctgccagtttagcaccatttccttgattctgagaactttacacataggtatcctgccatttacattccacatggctcctcacacatgcgtacaacatccatcaattcatttctttataaatctgaaattcagtgagttccaaccatatgctaaggactgtgctaggtgctggatatcagtagtgagcaacacactgatttttaggagtttatgtgttaagaggagagggactaaaatattaaaaattatttaaacaraaagtatttgtataaacgtcatgtagaaaaacatagaatgtttgatggcaaataaaactccttatctagggcttcaggtgcattgtcccagaggtgtcacctctagactaagacctatggctattgaatttgaagggacatggggcggaatag

SEQ ID NO: 752677 - DNA, 458 bp, Homo sapiens
cattagattctacatgtttattttggtttctaatattttaataaaaataatatataaggtagagaaaaacactaaaaaacactaaataaggattaaaaaaactaacccatttgtatatgtgtgtgtatatatttgtatatatatgtgtatatatgtatgygtatataatatttcataaatattgttgaacactgttttctttaaatttgctttccttatgaattaatcagttggttgaaggcttttcaagtcatcattgaattcaaattttttaaaatctcatctttaagcattttatgtaactttcttcaatcagcagctagagaggagagatctctcacttggtattatcagaaagatcataacagcctcactgtaaaaggacattactaattacattccttttttcacttagttctattctgtaaatgattatggcaagctttaatattgagtga

SEQ ID NO: 752678 - DNA, 583 bp, Homo sapiens
acctacagaatgggggaaaattttttaatgtatccatctgacaaaggtctaatatccagaatttacaaggaaattaaacaaatttacaagaaaaaacaaccccatcaaaaagtgggcaaaggatatgaacagacagttctcaaaagaagactattatgcagccaacaaatgtatgaaaaaatgctcatcatcactggtcattagagaaatgcaaatcaaaaccacaatgagataacatctcacaccagttagaatggcaatcattaaaatgcaaggaaacaacagatgctggagaggatgtggagaaataggaacacttttacactgttggtgggagtgtaaattagttcaaccattgtggaagacaktgtggcaatcctcaaggatctggaaccagaaatactatttgacccagcaatcccattactgggtatatacctaaagaaacataaatcattctactgtaaagacacatgcacacatatgtttatttcagcactatttacaatagcaaaacttggagccaacccaaatgcgcattcatgatagactgcataaagaaaatgtggcacatatataccat

SEQ ID NO: 752679 - DNA, 583 bp, Homo sapiens
acctacagaatgggggaaaattttttaatgtatccatctgacaaaggtctaatatccagaatttacaaggaaattaaacaaatttacaagaaaaaacaaccccatcaaaaagtgggcaaaggatatgaacagacagttctcaaaagaagactattatgcagccaacaaatgtatgaaaaaatgctcatcatcactggtcattagagaaatgcaaatcaaaaccacaatgagataacatctcacaccagttagaatggcaatcattaaaatgcaaggaaacaacagatgctggagaggatgtggagaaataggaacacttttacactgttggtgggagtgtaaattagttcaaccattgtggaagacagtgtggcaatcctcaaggatctggaaccagaaatactatttgacccagcaatcccattactgggtatatacctaaagaaayataaatcattctactgtaaagacacatgcacacatatgtttatttcagcactatttacaatagcaaaacttggagccaacccaaatgcgcattcatgatagactgcataaagaaaatgtggcacatatataccat

SEQ ID NO: 752680 - DNA, 500 bp, Homo sapiens
ctttgcctctttatttcatggtgctaggcatggtaatacaaaagcagttgccctgttctttgataaaaaatgtatctgatcttaaccatataagatttaaatattcctttaaaaatgtaaaagcgtgaggcacagttttatggtgaaaacttttcaggtakttttttactgttttttactgtaagagaaggacattttggaactggaatccactcagatttaattgcaattctgctgaatttttaagaagtcattaattgtgcttatgcaaattcactttcttcttccctacttttgccaaatgaaccatacaaatcgctaatgaatacaagggggaaaatgtctagcaaagaaacagagtgctttcctttatttttttacattgttattttgcctccttctgtatactttttctaagcccctcagataaaaattgtttctttgtttataaatctgatgtaattttcatatacttctcacttgtattcttgttagttgta

SEQ ID NO: 752681 - DNA, 618 bp, Homo sapiens
taacgctttaaggtaacttttgaaaaataataaagtgaatccacatataaaaaataaattgagaaacagactttctgctttcacaaaaattgactcaaaatggataaaagacctaaatgtaaagcacacaaatttaaaattcttagaaaataacataggagaaaatcgaggtgacagtgtattggtagtgactttttagatataatataaaaagtaaaatctaaaaagaacaaattgatgttagagtttactaaaacttctgctctgcaaaatatactgttaagaaataagtcacagactgaacaaatatgtttgcaaaaaacatacctgataargaactagtatataaaatatacaaagaattcttaaaactcaactataagaaagcaaacaactgtatttttaaaaatgggcaaaggatctgaacagatacttcatcaaagaatatacatatatggaaaatacacatatgaaaagatgcccaacatcacatattagggaactgcaaattataacaagataccactacatacctattagaatggctaaaactcagaacaacgacaacacccaatgctggcaagaatgtgcagcgacaggaactctgctgctagagga

SEQ ID NO: 752682 - DNA, 576 bp, Homo sapiens
actgagtaacagctctgcctcagtatcttaatcacagtcaatcattgactaagagcagctaagaggtgtggccttggtgcaaacatggtgatggatttcaggatgcagctacttgacccttgggtcaattaatccccatgtagttggatatcagcaagacacatcctcatggctggcatagwgtgtatagcctgctcatgaacctggggtcctgactcatatgctaatattaatctaggctaggggatgcagattttccttttccccattcccaaaaactgcttgcttctttgtaatctggtacttaactgggagattagtttcccatttctagtgtgcgtaatatgtatggccacagccctctttcccatagaagcattaaacattaagatatgtttctaatcccaggactatcatcagtcttttctttctttctcacacctgataatttctagttgtgattttcaaccactgttacttactttacacatggtttaaaatattttatcctctaattttatgtatttggagtgaaatgaaaacttgcccatgcttgctcaacataacatcttgatt

SEQ ID NO: 752683 - DNA, 586 bp, Homo sapiens
ggaaaataggcatatttcactttctaaaagagggatgctagaaataatttggtgctctcagcatgctccatatgtcataattggttcaactccactggaatgctcgtatgtagagttacatactagaaaggtcaaatcagaagaaatgttcagctttccataagataaattatgtagaaaaatagtatacagaatatattattttcttcagtttgaatatttgaaaatactcaacagactcacttgacatactcacaggaggcttttatttaaaagcaaagatatggtgcagtggtgcgtgagaggaaaagaatataggcaagtgtcgggggtcccagggactttctgcagctccagttctcctggggccctttcgttgagcacacagggcccagctgaatatctgccttattttgccaacatctgtgtgaaaagtsttgattacaggacagctcactgaaaaagtgtttagttattttttaagtaatcaaataagacttgtcaaatcatttaggtcagttccaaatcttcagtgaagaaactaaacctgaggtggccaggggagtttggaaccttaaactgcata

SEQ ID NO: 752684 - DNA, 613 bp, Homo sapiens
tgtaaataaagttctttgtaaattcagggttccagggatcctgtcattcctgaagctgacatgtttaatgaaagcagacttctgactcaagattgagcagaaggagaatgaatgaaacaactggatgaactaataatagaaatttgcttgtttttgtcaggtttgtcaaagatcagatggttgtagatgtgtagtgttatttctgcrgcctcttttctgtgccagtggtctatatatttgttttgttaccagttctgtgctgttttggttaccatagccttatagtatagtttgaagtcacgtagtgtgatgcctccagctttgttcttcttgcccaggattgtcttggctatgcaggctcttttttggttccacatgaagtttaaagtagttttttttccagttctgtgaagaaagtcagtagtagcttgatggggatggcactgaatctatgaattgctttgggaagtatggccattttcatgatattgattcttcctatccaggagcatggaatgtttttccatttgtttgtgtcctctgttatttccttgagcagtgatttgtagttctccttgaagagatccttcacatcccttgtaagttatattcc

SEQ ID NO: 752685 - DNA, 613 bp, Homo sapiens
tgtaaataaagttctttgtaaattcagggttccagggatcctgtcattcctgaagctgacatgtttaatgaaagcagacttctgactcaagattgagcagaaggagaatgaatgaaacaactggatgaactaataatagaaatttgcttgtttttgtcaggtttgtcaaagatcagatggttgtagatgtgtagtgttatttctgcggcctcttttctgtgccagtggtctatatatytgttttgttaccagttctgtgctgttttggttaccatagccttatagtatagtttgaagtcacgtagtgtgatgcctccagctttgttcttcttgcccaggattgtcttggctatgcaggctcttttttggttccacatgaagtttaaagtagttttttttccagttctgtgaagaaagtcagtagtagcttgatggggatggcactgaatctatgaattgctttgggaagtatggccattttcatgatattgattcttcctatccaggagcatggaatgtttttccatttgtttgtgtcctctgttatttccttgagcagtgatttgtagttctccttgaagagatccttcacatcccttgtaagttatattcc

SEQ ID NO: 752686 - DNA, 613 bp, Homo sapiens
cccaaaagtcagacaagaaaacttcctcaggagaaaaaattgtgggggttctactagctgaaaaattctctgagctcacacaggactgggaatcctttgagttccctccaatcagaatgagagacctcattaaaatcatagaaaattcagtagacataccaggagagytaagccttcaaagtagggaccaagttagccctataataaagagcactctatacaagtctttttaaaaaccttaaaaaatttaactataataaaccaatctatcaattactgaattgcctgaaagaaaaagttacacttcaaaggaatacaacaaaatccagaatttaacataataaaataaggtgtccagaatccagataaaaattactagatacacaaagaatcaaaaaatgtcagctataaccaagaagaaaaagtgatgaagaggaaccctttcagaagtaacaaatatgatgacattaacagaaaaggcattaaatacctcttattcatgtgtttcatatgctcacaaattaaagaaagctaataaacctaggcagaagaaacatataggaaacaacactcatctccaccatattgatgaacaccagtagtaaataaccaa

SEQ ID NO: 752687 - DNA, 530 bp, Homo sapiens
ataattattctatggtaatgtaagatgttaacattcagggaagccaggggaaaagtatttgagaactgtcatagtccattttttattgctataacagaatacctgagcctgggtaatttacaaagaaaaaaggtttattctgattcacagttctggagaccgggaagcccaagattgggcagccacaactggttggtttctggtgaaagtcttgtcccacgttgtaacatagcacagaagtcaaaaaggaagtgrgcaaaacacaaagggtagcctcactttataacaacttgctctcatggtaccaattcagttctacaatagtgacaactcactcccatgagaattaccgagtcctgcaagagcagcattaatccctcttaaccaccttaaggccccacctcccaacactgccataccagggaccatatttccaacacatgaattctggtgacatactcaaaccacagcaggaattatacttattttaaaacttttattcaggaggccgaggtgggaagattgcttga

SEQ ID NO: 752688 - DNA, 536 bp, Homo sapiens
tgcagtatcaactcaagcaccgaagaactacagtgctaccctgaggacaaaaggcattttagatgtcgtaaatatattatgaagaagtcttttctttaaattgtcagcaagataacctcattctttcctttttaatagtgatttagtgttgtttcacacaaaaatcaaatgcaatggtatttatggtaccatacattatatgataagaaacaaaaaggtttcaaaggatatcctaaagcttcagttttaagggacataagtaggtgagcagatggttctcagagaatgcagtcacagactttccccttcagaatattcctaaacgatrcattttgatttgaagggtcctgttcgtaggtccatcatatgcttctagtaaatcaacactgaaatgagatcatgcataagatttcttttttaaataaaatttctctttaaaatagtgaggtatccaacagtcctctgccttttgaaggccatccttgtaatatacacaatgttgccagctctacttgccacaccagttattcctttca

SEQ ID NO: 752689 - DNA, 613 bp, Homo sapiens
tccagtccattttaatcaataaagctccttctatacacaaagcatagtagtgagcaatgcaggaaatactaaaataggtcagatgtgaagagctaacagtataataggatcaatacccaaataatgactattatgtattatatgtattttaagggttttttgtggggagtatcagaacaattcgaatttccaaaaaagatcatcatttttgttgaaatactatgctgatagtatgtatttcagcagccaaaagataaaggaaaggartatacacacaaatttaggcttctctcgaaaagcttacaatgctagaaactgggagtcactttcttagttatttcccctgcttaggtaagcaatgttaagggagtactcaaacagctgtgttttctggtattcacagagagggaaactactaaatatctcaactctaagccacctctgcatgtaactttcatgtactccacccattatctcctccaacattttgggtaagagatcagtcacttagtcttttaaaagtaagaacataaagtagttaactaggaggaaaaaaaatcattgcccaatcatgattcaacagctgcagaatttaagaccaaagaggaatgtg

SEQ ID NO: 752690 - DNA, 600 bp, Homo sapiens
gaagatacacaaatggccaacaaacatatgaaaaaatgctcaacatcactaaggctcagggaaatgcaaattaaaaccacaatgagatactaccctattcctccaagaatggccataaattaaaaaaaaaaaaaaaaaaaaaaaaaaaaaaacagatgttggtgtggatgtgataaaaagggaacacttttacattgttggtaaraatgcaaactagttcaaccactagggaaaacagtgtggagattccttaaagaactaaaagtagaactaccatttgatccagcaatgccactactgggtatctacccagaagaaaagaagtcattatatgagaaagacacttacacatgcatgtttatagcagcacaattcgcaattgcacaaatagggaaccagcctaaatgcccatcaaccaacaataaagaaaatgtggtgtatatataccatggaatactactcagccataaaaagaaatgaaataatggcattcacagcaacctggatgaagctggagaccattattctaagtgaggtatctcaggaatagaaaaatcaaacatcttatattctcacttataagtgagcactaagctatga

SEQ ID NO: 752691 - DNA, 600 bp, Homo sapiens
gaagatacacaaatggccaacaaacatatgaaaaaatgctcaacatcactaaggctcagggaaatgcaaattaaaaccacaatgagatactaccctattcctccaagaatggccataaattaaaaaaaaaaaaaaaaaaaaaaaaaaaaaaacagatgttggtgtggatgtgataaaaagggaacacttttacattgttggtaagaatgcaaactagttcaaccactagggaaaacagtgtggagattccttaaagaactaaaagtagaactaccatttgatccagcaatgccactactgggtatctacccagaagaaaagaagtcattatatgagaaagacacttacacatgcatgtttatagcagcacaattcgcaattgcacaaatagggaaccagcctaaatgcccatcaaccaacaataaaraaaatgtggtgtatatataccatggaatactactcagccataaaaagaaatgaaataatggcattcacagcaacctggatgaagctggagaccattattctaagtgaggtatctcaggaatagaaaaatcaaacatcttatattctcacttataagtgagcactaagctatga

SEQ ID NO: 752692 - DNA, 570 bp, Homo sapiens
atgaacaactgattcaagtttgttaaaattattattttctgcatcctacttagctgaactatttttgggttcatcctgatggtagagctgattgaatacatgaacagagtctacttcttataaaatctgggagtttggaaaaaggagtattagttttaggcaagacaaaatgaaaggaagtaattctaaaataaaattatacttttgtattttatggttattttaataaagtataattttaattgtatcattattttgaattataaagtgatrtttaaaaattttaaattatatcactctatagaaggtccttgaataacattgtttccttcaacatcagtttgttttaatatcaatgagaaaaattgtttctctgctgaggccactgtctatgtggagttttcatgttctattcacatatgcgtgggttttctccaggtactcttgttacttcccacattccaaagatgtgaccattcagttaactagcctgtctaaatggtccagactgaatgagtatgggtgtgtgtgagtgctctgcaatgggatggaatcctgtccagggtgggt

SEQ ID NO: 752693 - DNA, 501 bp, Homo sapiens
acctccctgctggcttcaaactttttttcggcagcttcttcaccgctcttagccttcgttgaattaaagagagttagggcctcgttctggattaggctttggcttaagcgaatactgtggctggttttatcttttatccagaccactaaaactttcccaatatcagcaataaaactgtttcactttcttatcatttgggtgttcactggagtagcaatttaatttcctttaagaacttttcttttgcatttacaacttggctaactggtacaagaggcctagctttcatcctgtcttgactttcaacatgcytttttcactaagcttacttgtttctagcttttgatttaaagtgagagatgtgcaacccttccttttacttgaacactttagaggccattgtagggttattgattgacctattgtcaatattgtcatgcctcaggaaagggggaggccagagaagaagaagagagataggagaatggctagtcagtggag

SEQ ID NO: 752694 - DNA, 643 bp, Homo sapiens
tggaggtcttgattggctctttctaactggtaggaagggtcttggtttgggagacttctcctcaatcaggaaaatttccaggaggtttctcagacagaaaataggaggatagtttggaaaggatactcttggagttcttggttaggggtctgatttggaaggccttctgtccatctcatctttgtgtgtgtttgtatatgtggaagggatctcagaggggttgttgatggaagtccagcaggcctaactcagagaacccttcttatttktctggtcacattagatgaaccctaaagaaggctcaagaagcctatctcttggggtgactatctgctcttccccttgcccagagaccgcattgtgaattactgttcagaagtcgtccatccccacctggagtggatcaaaggcaacagggaccaacgggaaaaagtttgagctttgccaggttgatattggatgctgaatgaggtgactaatgcttgttttgttgtgtgtattttgctgggatggaaaatgttaattcagttccccatgcagcctattgggcagcatcttgcacattaagaatcttacctatggttccataaaacagtaaagggtgattttcacttgtaaagtgacttgaaccccacagctatag

SEQ ID NO: 752695 - DNA, 487 bp, Homo sapiens
gtccccagaaaattcccatgtggcctttccttcccttatcatgcctaataaccattaatttgatttctattactctagatcaattttacctgctctagaactttatataaataatcatgttatgtactcctttgtatctggtttcttttgctcagcataatagctgtgagattcatctatgttayttcatatatcagtaacttttttttggccaagagtatttcattgtatgaatatatcacaatttggttatcactttacctgttgaagaacatttgggtaatttgcaaattagagtaattataaatgaagctgtcacaaacattgaagtacagccctttcatggacagacagatgttttcatttctcttcttgtgtgtaaatacctaggaagctgaattgctggctcatagggttgatgtatgttaccttttcaagaaactgccaaatggttttctggaggggttgccccatttcatattcacac

SEQ ID NO: 752696 - DNA, 530 bp, Homo sapiens
atttctttatacaatatttaaaaaaatcacattaattaatatcaccatcaatcttattggagtctttaagtactggaagctgtctagctgatagtggtggctacaagttttctaacattccaatttttgtttgaaagcttgcattttatctttagcaacaaacactgtcagtcatttttcttgaagtgacagrctcactttattcattttcaagaaaatgtctgccagctacccaagtttgaataactatagtttgtcagttttttcaagtaaaaatgtcattccatgataaaagcagctagttctgtttgcaactgaaaaaatcaaacaagtgcttttcctcaagacaaccatcatagttcggtatgcagtaggagggttttatgcatacttctcatttgtcacacagaatattaaacagatgtgtactcctggatagtgatttaataagagaaataacttttacactcctgggtagtgatttaataaaagatataacttttacacttagtcaaaggcgttttaaagta

SEQ ID NO: 752697 - DNA, 617 bp, Homo sapiens
tggcacatgtatgcctatgtaacaaacctgcacagtctgcacatgtatcccagaacttagagtataattaaaaaaaaaaaagaaagaaagaaaagaaaaaaaagaaagtcaatgattccgtcctctctgatgatgacacaattgcctctctgcctatgcagagacttggccaagaaaggagatttgctaagcccttggaggracatgccggccacctttcccctcctttttctcctggaacttatgtgcaggctctgcagctcagcacactgaaaatgttatatgatttggttgtcttttaaactagttttattactttggccaaagttccttaaccactttgtgcgtcggtttccttgtccacataaaaggaacaatgatgcacctaccaaatagagttctagtgagaagtagaaatagtttctgtaaagcgtcgatcacagtgcctggcactagtagtcacacaataagggttgttgctattcaatttatgtgcttaatacttgatttatttcgcaaacatttgcgaagctcttgctatggccaggcaaattgctcgagttacacaggcagagtggacaaacctctgccctcaatgcatttaggctctagtcctg

SEQ ID NO: 752698 - DNA, 617 bp, Homo sapiens
tggcacatgtatgcctatgtaacaaacctgcacagtctgcacatgtatcccagaacttagagtataattaaaaaaaaaaaagaaagaaagaaaagaaaaaaaagaaagtcaatgattccgtcctctctgatgatgacacaattgcctctctgcctatgcagagacttggccaagaaaggagatttgctaagcccttggaggaacatgccggccacctttcscctcctttttctcctggaacttatgtgcaggctctgcagctcagcacactgaaaatgttatatgatttggttgtcttttaaactagttttattactttggccaaagttccttaaccactttgtgcgtcggtttccttgtccacataaaaggaacaatgatgcacctaccaaatagagttctagtgagaagtagaaatagtttctgtaaagcgtcgatcacagtgcctggcactagtagtcacacaataagggttgttgctattcaatttatgtgcttaatacttgatttatttcgcaaacatttgcgaagctcttgctatggccaggcaaattgctcgagttacacaggcagagtggacaaacctctgccctcaatgcatttaggctctagtcctg

SEQ ID NO: 752699 - DNA, 617 bp, Homo sapiens
tggcacatgtatgcctatgtaacaaacctgcacagtctgcacatgtatcccagaacttagagtataattaaaaaaaaaaaagaaagaaagaaaagaaaaaaaagaaagtcaatgattccgtcctctctgatgatgacacaattgcctctctgcctatgcagagacttggccaagaaaggagatttgctaagcccttggaggaacatgccggccacctttcccctcctttttctcctggaacttatgtgcaggctctgcagctcagcacactgaaaatgttatatgatttggttgtcttttaaactagttttattactttggccaaagttccttaaccactttgtgcgtcggtttccttgtccacataaraggaacaatgatgcacctaccaaatagagttctagtgagaagtagaaatagtttctgtaaagcgtcgatcacagtgcctggcactagtagtcacacaataagggttgttgctattcaatttatgtgcttaatacttgatttatttcgcaaacatttgcgaagctcttgctatggccaggcaaattgctcgagttacacaggcagagtggacaaacctctgccctcaatgcatttaggctctagtcctg

SEQ ID NO: 752700 - DNA, 612 bp, Homo sapiens
ctggacacagtggctcatcctgtaatcccagtgctttgggaggctgaggcaggaggatcccttggggccaggagttcaagaccagcctgggcaactagtaagatcccatctctacaaaaagtaaaaacattggctgggtatagtggcacatgcctgtagtcctagctactcagaaagctgaggagggagaatctcttgagccgaggagttggaggctacagtgagctgtgatcatgccactgcactctagcctgcatgacagagcaagaccccatctcaaataaataaataaataaataaataagctattcagagcactttacatatattatttagtcctcacaacaaatctctcagataagtagaatatattggttccttagccatagtccaaaccaaaagctcattacaggcamtcctccactttgccctgcatcatgaatctcctctcttgagggttgaggtaagggatggagtattcagtgggtagagtaaggggtgctggtgattacagccagcagagaaggcacctctttgtctgagcagcagctgctgagccacagcagagtgggtcatgggaaaggggaagatggcctggggcaggtgatggga

SEQ ID NO: 752701 - DNA, 689 bp, Homo sapiens
ggaatagtatcctagggatcctaatcagagaagtttcaagattgttatccaaggatgtttataacagcattatttatgctagagccaacttaaagcaacaaaaaggtcgaaatatagggaacttgtcaaataaatgatgacagagtgatacgatgaatgttaagaagtcataaaaatgttgtttcaaagaatatttaatgtcatggaaaattacaacacaactttgagaaaagaaggacataaaacaatgcatatgcatatatatacatacataataaagtttttaatatgcatttatatattttaaaaaatgctttaaaagaaaatctggaagaaaataacaccaagttgaaataggaaataatcaaaatgttaagagcatttatctgttcacagtaggattatgtgttttaatattttctttttaaatttccaaatacttatcaatgtattatatgctattaataatcagaaaaaaagctatttaagccacwtacatatatatatataaatacacacacatatatataaaaacacacacacgtgtgtgtgtgtgtgtatatatatatatatatatatatatatatatatatacatatatatattttttttagatggagtctcgcgctatcgcccaggctggagtgcagtggcacgatcttggctcactcctacctcagcctcctgta

SEQ ID NO: 752702 - DNA, 499 bp, Homo sapiens
ctgtgcttctccctcgtttcctattgaggtcactgtggtgcctttgttttgtgcaactcttctgggaaactattgtcccactccaatcacttctacttagagatgagaaacctgggcccagagctttaaaagaacctccccagggcacccatttagtatgtgcataagccagtgcttttctaatactacctcatagtacacatatatattattcagaactccttttgttgtaagaaacagaaacccaactcaaatttgcttagacagaaaaaggaatttattagttcaaataactaggcagttcaaggacaatctgggtcagatataactagctccatgagcccaatattaacagaaraggttctgttcttcctaccatttgttagctctgcctccctatgaactgacttcattctcagatgggttctcagcaccatacacctataccagaacagctctagatgtgcaggatccctgaatggggaactgaatagtcact

SEQ ID NO: 752703 - DNA, 583 bp, Homo sapiens
agccatggcacccagcctgttttcttcatttaatttatttctgccgtgatctttattatttcttttcttctactaattttgaatttggtttgctcttgcttttctacttatttaagatgtattgttagtttatttatttgaagatgttcttctttttttgatgtaggtgcttattgctataaactttccctttagtactccttttgctrtatcccataggtttgatatgtcatgtttccattatcatttgttacaataaaatttttaatttccttctgatttcttcattgacccactggtcattcatgagcatattgtttaatttccacatgtttgtatggtttccaaaattcctcttgctattgatttctagttttattccattgtggtcgagaagatgtttgatattatttaaaattttttgaatgttttaagatttgttttgtgacctaccacatgacctatccttaagaatgatccatgtgctgaggagaagaatgtatattctgcagccattggatgaaatgttctgtaaatatctattaggtccattcggtctacagtgcaggttaagcccaatgtt

SEQ ID NO: 752704 - DNA, 583 bp, Homo sapiens
agccatggcacccagcctgttttcttcatttaatttatttctgccgtgatctttattatttcttttcttctactaattttgaatttggtttgctcttgcttttctacttatttaagatgtattgttagtttatttatttgaagatgttcttctttttttgatgtaggtgcttattgctataaactttccctttagtactccttttgctgtatcccataggtttgatatgtcatgtttccattatcatttgttacaataaaatttttaatttccttctgatttcttcattgacccactggtcattcatgagcatattgwttaatttccacatgtttgtatggtttccaaaattcctcttgctattgatttctagttttattccattgtggtcgagaagatgtttgatattatttaaaattttttgaatgttttaagatttgttttgtgacctaccacatgacctatccttaagaatgatccatgtgctgaggagaagaatgtatattctgcagccattggatgaaatgttctgtaaatatctattaggtccattcggtctacagtgcaggttaagcccaatgtt

SEQ ID NO: 752705 - DNA, 646 bp, Homo sapiens
agcagtgtatgggtattcaccaaaatattctttcaactttgtgtatgtgtgaacattttcatggatcaatagctacatatggtgaatccctgcatattagacagcacagctcaacaacatgctctgcagtgccacagtgcaccctcagcctcagacaggccttcatgcmcttgaccacctaaggtttgcacttcctttgagacaccattcgaaaaccagatcttttctgatgccccaccccaacacagatatgatcagggcctttttcttctgtgctgtgccttgtatactccacctttgtagtttttatcatgtcgtgttgagggtgttagtttatacagcttagattcctactaaactgtaagcttcctgaggacaggggctgtgatttcatccctgcattcttaggtctcaaatcagatctcaactcaattataatctccattgagaggccttcccttcctgtcccaagctaagtgagttgcccattatacatgttcataatatcctgtacttctccaaatcataacatgccttatactttatgataatcattggtttaactctctttcttccctgctagactataagctccatgagggcatggaccattcctgccattcatccatagtgtcccaacatgaag

SEQ ID NO: 752706 - DNA, 628 bp, Homo sapiens
atccagctatctggcaaatgtgccaccctccctgcctaagggggcccagcaagtctatgcatcattgagcagttccccaggaaggacatctttttgcgggggggctctgaactttgtttcaagcaactcctgccatctgaaatacgcttcttgatcagtgaactcctcatttcgttctcacacacttcccacctacctctctctcagcactatactataacttacatatttgtcttcactattgggcattgaacttatggagtgtgcttctcttagcactttgaatgactaaatatcaatgtctgctccttacaataccatttytaaggagtcctcgatggaccccagaaggggtggtgatgtctggcccaggccttattgtctttgtatgacctgaatttggcacttaccaggcatacagcaggcacttgagatgaatgggtgaatgtgtccacctgcttggggagcctggggatggatcagggattgattttagcctctggcttctcttattcaccctaccttctaccttcaaaaccttaggcaagatagtgaacctttaagtttttttttttttttgtctatgaaatgggaatgatagtgttgcctacttcataggatgttatga

SEQ ID NO: 752707 - DNA, 490 bp, Homo sapiens
ccaggccggctttccctggcccctttctaccttgtccaggagcctcttaccccctgaggcagcgttgaggctgctcccccacgtccacagtacatgtgcatttgtagcctggagctgacaaggcccaatatgatctggtcctgttctaacgtcatcttgtctgcccgtctcagccttcatctccactgtgcatgttgggagaacctccagtctctcataaaagcccactctctcactatttcaatattcttctgttttagcccattcagctgccatgtggtacstggcagtttcctccagtccagttcccagtggagtgtctgtgctaaagtttctgaggcccgccaagcccatgaaggcccgccacagctgccatctccctcagagttcacctacatcgtgtgatgtcaccttcactgagccacagtgggcaccaagggctcaatgacatcggtgggcccctcttccctgttccgtgtggccagaatgt

SEQ ID NO: 752708 - DNA, 490 bp, Homo sapiens
ccaggccggctttccctggcccctttctaccttgtccaggagcctcttaccccctgaggcagcgttgaggctgctcccccacgtccacagtacatgtgcatttgtagcctggagctgacaaggcccaatatgatctggtcctgttctaacgtcatcttgtctgcccgtctcagccttcatctccactgtgcatgttgggagaacctccagtctctcataaaagcccactctctcactatttcaatattcttctgttttagcccattcagctgccatgtggtacctggcagtttcytccagtccagttcccagtggagtgtctgtgctaaagtttctgaggcccgccaagcccatgaaggcccgccacagctgccatctccctcagagttcacctacatcgtgtgatgtcaccttcactgagccacagtgggcaccaagggctcaatgacatcggtgggcccctcttccctgttccgtgtggccagaatgt

SEQ ID NO: 752709 - DNA, 596 bp, Homo sapiens
cttcaatcaaagatcaaattcagagtacttccaggaaaatgtagtccaaaaatgaaagtgagggtatacataaaatcttttgtcaagacctcagaaagattaaagctggtgactcagaaagcccttaaagagattaagagcataccctctgtgtcctctgaaacattattatagcttctagaaagtttaaagacaytattgctcatccatagaagtaggagctcaagatagagaagggcttatctcaagagatttttgaatgtggcttttgtcaaatgatataaaccccaagaaacttcacaggagacccatgaagttcttaagttatagatgcagaaacattttcagcttgaacaaagtggggaacagagacagtttagaattagaagaaaccgtttgggctctcagaattatgctgatagggagtagactgagagagctgctcaactgaatgatgactcagagggcagaaccagaccccagcagttaaagccaagagccatggagaattatacaaagtcttttgaccttattaagtaacttccagtaattgcataattggacttcagaattgttataggccagtggcttttttg

SEQ ID NO: 752710 - DNA, 563 bp, Homo sapiens
aacctctgcctccctggttcaagtaattctcctgcctcagcctcccgaatagctaggattacgggcataggccaccatgcctggctaatttttctatttttagtagagatggggtttcaccatattggccaggctgggggatttctggtttcttctctaaaagctaaaaagcttggaaggcattactccttccaagcttatttattccttaaaataagaaaaatttgaacaaactgaaaatcaacaatatttcttgggctcatcagataaattaggacataaaactaactgctactcccaaatctagaaaggcaggcgaytatagagaaaagcagctaagatccgtttaactgcagcagaagtcactgaaaccataaactggtagggacacttaaatggtaattccgatgaagatctgactgaatgctgagtgtggactagcttgagagtaagaaactcctggggatcacattcttagggaatcccgcacactttgatgactctcacctctagggatcccatcaggttcttacggtaaggaactaagaaaaagcaccttttgt

SEQ ID NO: 752711 - DNA, 474 bp, Homo sapiens
cagggtttgattgtgacattacgtggattcaactgactggctttgtttctggaagattttaggggrtcactgcttagcccccaactcctggactatgtgctctcactctgggggcttgtattaagccctgactttgttctcttggctccttgatgttaggaacccactgcactgaggtggggggaggcagtgggtggtggcggaaggtgctttcagaccacaggtcacaacactctgatgggtggtgccagccaaagcattttttagtgcagtaacagtaggatcagtcctcgttctcacgtgctagcagcaacagtagtggcagctgcagcagagtgccagcaggtgccatggttcctgcctcccttcaggcattcaccacagtggtgaaggcaacacagcttggcggtgaggggggtctctgttggcaactgtgtgtatggtcacactggaggtgatgttggctcaggggtg

SEQ ID NO: 752712 - DNA, 474 bp, Homo sapiens
cagggtttgattgtgacattacgtggattcaactgactggctttgtttctggaagattttagggggtcactgcttagcccccaactcctggactatgtgctctcactctgggggcttgtattaagccctgactttgttctcttggctccttgatgttaggaacccactgcactgaggtggggggaggcagtgggtggtggcggaaggtgctttcagaccacaggtcacwacactctgatgggtggtgccagccaaagcattttttagtgcagtaacagtaggatcagtcctcgttctcacgtgctagcagcaacagtagtggcagctgcagcagagtgccagcaggtgccatggttcctgcctcccttcaggcattcaccacagtggtgaaggcaacacagcttggcggtgaggggggtctctgttggcaactgtgtgtatggtcacactggaggtgatgttggctcaggggtg

SEQ ID NO: 752713 - DNA, 610 bp, Homo sapiens
agtggcagctgcagcagagtgccagcaggtgccatggttcctgcctcccttcaggcattcaccacagtggtgaaggcaacacagcttggcggtgaggggggtctctgttggcaactgtgtgtatggtcacactggaggtgatgttggctcaggggtggggtgctggtaggcacaggtctgggtgtcttctctgtgtcccggaaggtggagtggtcactcagtacgagggaggatctgctgttcactgtgcagtaktagcacaagggcagggtgctggcaggggagaggttggctggttctgtgcctgccaaggctctgtctgctctgcaatggcagttggcggagggtgggggacagacagtctgtgaggtaagcaaagaaaaatccatctgggcagacacacaccagccaagtgatgtgggaccctggggaagctacagtatggggagagagtgtgcaggctggtgtgtggccgtaggcgtcgtgccactggagctctctgcagctcaggcacaatccaccagtgcagaagctatgggctcccaagtaacccgagactgccctgcaagcagtcatggccagtctggggccccaggagaagccagaagac

SEQ ID NO: 752714 - DNA, 610 bp, Homo sapiens
agtggcagctgcagcagagtgccagcaggtgccatggttcctgcctcccttcaggcattcaccacagtggtgaaggcaacacagcttggcggtgaggggggtctctgttggcaactgtgtgtatggtcacactggaggtgatgttggctcaggggtggggtgctggtaggcacaggtctgggtgtcttctctgtgtcccggaaggtggagtggtcactcagtacgagggaggatctgctgttcactgtgcagtattagcacaagggcagggtgctggcaggggagaggttggctggttctgtgcctgccaaggctstgtctgctctgcaatggcagttggcggagggtgggggacagacagtctgtgaggtaagcaaagaaaaatccatctgggcagacacacaccagccaagtgatgtgggaccctggggaagctacagtatggggagagagtgtgcaggctggtgtgtggccgtaggcgtcgtgccactggagctctctgcagctcaggcacaatccaccagtgcagaagctatgggctcccaagtaacccgagactgccctgcaagcagtcatggccagtctggggccccaggagaagccagaagac

SEQ ID NO: 752715 - DNA, 610 bp, Homo sapiens
agtggcagctgcagcagagtgccagcaggtgccatggttcctgcctcccttcaggcattcaccacagtggtgaaggcaacacagcttggcggtgaggggggtctctgttggcaactgtgtgtatggtcacactggaggtgatgttggctcaggggtggggtgctggtaggcacaggtctgggtgtcttctctgtgtcccggaaggtggagtggtcactcagtacgagggaggatctgctgttcactgtgcagtattagcacaagggcagggtgctggcaggggagaggttggctggttctgtgcctgccaaggctctgtctgctctgcaatggcagttggcggagggtgggggacagacagtctgtgaggtaagcaaagaaaaatccatctgggcagacacacaccagccaagtgatgtgggaccctggggaagctacagtatgggragagagtgtgcaggctggtgtgtggccgtaggcgtcgtgccactggagctctctgcagctcaggcacaatccaccagtgcagaagctatgggctcccaagtaacccgagactgccctgcaagcagtcatggccagtctggggccccaggagaagccagaagac

SEQ ID NO: 752716 - DNA, 584 bp, Homo sapiens
gaggagacatgtaaacaatttcttaccttgcttaagaaatacaggtagaatatggcatttcctagctatctcctctgggaaacaaaaatgctggaatcaagagactctcacaacctcttaaatgcattactttctcctaaaatgtcttatcaagcaatgccagtgagacagtgtaagttatcgctttatcacttgttgactgtttctgttaagaagctcattgttgataagtttgtaaagcgacttatgtcttaaatatagttccaaatcgatttttaatgaaacccatgggttttaggagatcagaaaactaatttatgttgygtagtaactcattctatgaccctgggaaatttggttctcattcttctacatgcaaaatactgtcattttaagatagctttagaaaagtaaataccaatgtttatttttaaattttaaattttatgaaagaattggatcaaacaaaaaaataaggaaagacttgagtagtgtttttataaagataggttgaaatgctctgttctcttactgtataatcgaaaaaaatcagtaagatgggctacattacattagaaaagttg

SEQ ID NO: 752717 - DNA, 584 bp, Homo sapiens
gaggagacatgtaaacaatttcttaccttgcttaagaaatacaggtagaatatggcatttcctagctatctcctctgggaaacaaaaatgctggaatcaagagactctcacaacctcttaaatgcattactttctcctaaaatgtcttatcaagcaatgccagtgagacagtgtaagttatcgctttatcacttgttgactgtttctgttaagaagctcattgttgataagtttgtaaagcgacttatgtcttaaatatagttccaaatcgatttttaatgaaacccatgggttttaggagatcagaaaactaatttatgttgtgtagtaactcattctatgaccctgrgaaatttggttctcattcttctacatgcaaaatactgtcattttaagatagctttagaaaagtaaataccaatgtttatttttaaattttaaattttatgaaagaattggatcaaacaaaaaaataaggaaagacttgagtagtgtttttataaagataggttgaaatgctctgttctcttactgtataatcgaaaaaaatcagtaagatgggctacattacattagaaaagttg

SEQ ID NO: 752718 - DNA, 556 bp, Homo sapiens
gtgattggagggggctcctccaaggtccaggagcagacctggtgggggtcagagccccccaaccaccaccacagaacactgtcgctaatgctttgaaatacaaaagagccacgcctgtaatcccagcactttgggaggctgaggcgggcagatcccaagctcaggagatggagaccatcytggcgaacatggtgaaaccccgtctctactaaaaataaaaaaaaaaattaaaaaaataaaaaaaaattagccgggcgtggtggcgggcacttgtagtctcagctactcgggaggctgaggcaggagaatggcgtgaacccggggggcggagcttgcagtgagccaagatcgcgccactgcagtctagcctgggaggcagcgagactccgtctcaaataaataaataaataaataaataaaaattaaataaagaaatacagaagagccatgaggcaatgtaagagcctatctgctggccattacacttaagcgccatctcctggattgcatcccaaatggcaacaaaaaattcagccaataaataatcacctgttta

SEQ ID NO: 752719 - DNA, 556 bp, Homo sapiens
gtgattggagggggctcctccaaggtccaggagcagacctggtgggggtcagagccccccaaccaccaccacagaacactgtcgctaatgctttgaaatacaaaagagccacgcctgtaatcccagcactttgggaggctgaggcgggcagatcccaagctcaggagatggagaccatcttggcgaacatggtgaaaccccgtctctactaaaaataaaaaaaaaaattaaaaaaataaaaaaaaattagccgggcgtggtggcgggcrcttgtagtctcagctactcgggaggctgaggcaggagaatggcgtgaacccggggggcggagcttgcagtgagccaagatcgcgccactgcagtctagcctgggaggcagcgagactccgtctcaaataaataaataaataaataaataaaaattaaataaagaaatacagaagagccatgaggcaatgtaagagcctatctgctggccattacacttaagcgccatctcctggattgcatcccaaatggcaacaaaaaattcagccaataaataatcacctgttta

SEQ ID NO: 752720 - DNA, 556 bp, Homo sapiens
gtgattggagggggctcctccaaggtccaggagcagacctggtgggggtcagagccccccaaccaccaccacagaacactgtcgctaatgctttgaaatacaaaagagccacgcctgtaatcccagcactttgggaggctgaggcgggcagatcccaagctcaggagatggagaccatcttggcgaacatggtgaaaccccgtctctactaaaaataaaaaaaaaaattaaaaaaataaaaaaaaattagccgggcgtggtggcgggcacttgtagtctcagctactcggraggctgaggcaggagaatggcgtgaacccggggggcggagcttgcagtgagccaagatcgcgccactgcagtctagcctgggaggcagcgagactccgtctcaaataaataaataaataaataaataaaaattaaataaagaaatacagaagagccatgaggcaatgtaagagcctatctgctggccattacacttaagcgccatctcctggattgcatcccaaatggcaacaaaaaattcagccaataaataatcacctgttta

SEQ ID NO: 752721 - DNA, 628 bp, Homo sapiens
catccagtcagtctataatttttaatggaggaacttaaaaagttttcattcaagtttgttactgatggataaggacttactcctgttgttttgttaaccgtttcctcattgttttggatattctttgttttttttcttcttttgttattcttttatgatatggtgggttttgtagtaataacatttgactcatttctgtttctcatttgtgtatcttttctaccagtgaattttatacctttgtgtgttttcaggacggtatgtattatcctttaatttcccagtgtaggatcccttaagcatatcttgtagaacctgtctaatgttgataaattccctcagtttttgcttatctgggaaatactttttctctttcttttattcatgaaggatggtttttytgggataggattcttgactgccagtttttgttgttgttgttgtttgtttgtttttaaaaatttttagtactttgactatatcattccattcttcctggcctacagtgtttctgttgggaaatatactgttcatctcatgggaattcccttatgcatgacttgacacttttcttttcctctttttaaaatcctatatttgtctttgacttttgaaagattgaatataa

SEQ ID NO: 752722 - DNA, 587 bp, Homo sapiens
acaaagagaataaaatacctaggaatacatctaacaagggaagtgaaggatctcttcaaggagatctacaaaccactgctcaaggaaatcagaggggacacaaacaaatggaaaaatatttcctgcttatggatatgaagaatcaatattgtgaaaatagtcataatgctcaaagtaattgatagattcaatgctattcctattaaactaccagtaacattcttcatagaattagaaaacactattttaaaatttatatgcaactaaacaagagcctgaatagccaagacaaccttaaacaaaatgaacaaagctggagtatcatgctacctaacttcaaactataccacaaggctacagtaaccaaaacagtatggtaatggtaccaaaacaggcatayagacttatgaaacagaatagagaactccgagataagactacacacctacaaccatctgatcttcaacaaacctgacaaaaacaagcaacggggaaataattccctatttaataaatggtgcttcctatttaataaacagttctcataagagaactaactatatgtagaaaattgaaactggactcct

SEQ ID NO: 752723 - DNA, 601 bp, Homo sapiens
acataggcatgggcaaagattttatacaaaaatgccaaaggcaataacaacaaaagcaaaaattggcaaatgggatctaattaaactaaagagcttctgcacagcaaaagaaactgtcatcagagtgaacagacatcctacagattgggagaaaagttttgcaatctacccatctgagaaaggtctaacatccagaggatataggaacttattctacaacaaacttaaataaatttacaagaaaaaacaaataaccccattaaaaagtgggcaaaggacatgaagagacacttcycacaaaagacatacatgcagcaaacaaacatgaaaaaaagctcaatatcactgagcattggagaaatgcaaatcaaaaccacaaggagatacaccatctcatgctagtcagaatggcaattattaaaaagtcaagaaacagcagaagatggcaaggttgctgagcaaagggaatgcttttacaatattggtgggaaattagttcaacaattgtggaagacagtgtggtgattcctcaaagatctggaagcagcaatatcatttgacccacaatctcattactgagtatatagccaaagcagtataa

SEQ ID NO: 752724 - DNA, 565 bp, Homo sapiens
atttctgagttctctgttctgtcccattaatctatatgtctgttttggtatcagtaccatgccattttgattactaaagccctgtgatacagtttgaagtcacgtactgtgatgcctccagctttgctctttttgcttaggattgtcttagctatacagtctcttctttggctacatatgaaattgtgagtagttttttttttctaattctgtgaagaatgtcaatggtagtttggtggaatagaactgaatgtataaactaatctgggcagtatggccattttctcaatattgattcttcctatccttgaggatgaaatgtttttccatttgtttgtgtcytctcttatttccttgagtagtggtttgtagttctccttgaacaggtctttcacttctcttgttagctgtattcctaggtattttattttctttttagcaattgtaaatgggagttcattaatgatttcgttttctgcttgtctattgttggtgcataggaatgcttgtgatttttgcacattgattttatatcctgagtctttgctgaagttacttatcagct

SEQ ID NO: 752725 - DNA, 565 bp, Homo sapiens
atttctgagttctctgttctgtcccattaatctatatgtctgttttggtatcagtaccatgccattttgattactaaagccctgtgatacagtttgaagtcacgtactgtgatgcctccagctttgctctttttgcttaggattgtcttagctatacagtctcttctttggctacatatgaaattgtgagtagttttttttttctaattctgtgaagaatgtcaatggtagtttggtggaatagaactgaatgtataaactaatctgggcagtatggccattttctcaatattgattcttcctatccttgaggatgaaatgtttttccatttgtttgtgtcttctcttatttccttgagtagtggtttgtagttctccttgaacaggtctttcacttctcttgttagmtgtattcctaggtattttattttctttttagcaattgtaaatgggagttcattaatgatttcgttttctgcttgtctattgttggtgcataggaatgcttgtgatttttgcacattgattttatatcctgagtctttgctgaagttacttatcagct

SEQ ID NO: 752726 - DNA, 630 bp, Homo sapiens
gaacctaaatacaatttgtctttcactacccactcttccctcctttaaaatagagtctctgactattaatgttgcatacagccaaaaaaatacacactaaaaaaaaatcacaaaaataacaaaactcctacaatttccaatcctttctacctgagaaggccacgtgcccaagttcgaaaactggaagagcctcaggatagatagaaggagtccaggtccctgagaatcaaggcaccaccataaatattagccactttactttctgactttgtrtagatgaaaaagaaattgctatgctgttcatatctgtgaattttgctttgttttgttttgtctttatagataaatataatcccaagtagtataagaatatttaaatgattatatctgtctccattaaatttaaaattgttgatacaaaattagtttttttctctcttacctagtatatggggcatgtaaggaagttcagtgagttgagacaaaatacagaaagaagtgcttttgcatatatttatttatagttaatatgaggctatagagagcaaggctttttaaaatctttctgttcttacatgcatgatctgtgtaatttgaggtcacttgctgaaaagttgcaaactaccattt

SEQ ID NO: 752727 - DNA, 595 bp, Homo sapiens
acaaggtcaggagttcgagaacagcctgaccaatatggtgaaaccctgtctctattaaaaatacaaaaattagccgggcgtggtggcagacacctgtagtcccagctactcgggaggctgaggcaggagaatcgcttgaaccaggaagtggaggttgcagtgagccgagatcacgccactgcattccagcctgggcgacagggcaggactccgtctcaaaaaaaagaaaaaaaaaagaaaaaagaaaagagcaaatgtgttccagttaggggaaactgggtatgtagagccacatgggcatgaaaggacatgttatgataggggaaataaaacttaaggaataaatggtataattgaagcagatctcagaactttccttgaggctggatatttaactgcaagtctttgatctttgggggaaagggactagagatggttggaatcctgggtaaacacygaccttttagtattctagaggtgagatttaattcactgctaattagtgttggttttggctcccctagggaagtgtaaacataaagaaggcaaggagcaggaactcgggcaaaggcaagtccatgggtgtgtacatttc

SEQ ID NO: 752728 - DNA, 652 bp, Homo sapiens
cagaattaagacccaaccccccagtgaggtacagaagcttatctaccatcacatcttgatgttacagaaagaatggggacttggagctgggtgtggtagctcacgcctgtaatcccagcactttgggaggccaaggcaggyggatcacttgaggtcgggagttggagaccagcctggctaacatggtgaaacccccatctctacacaaaatacaaaaattagccaggcatgatggcaggtgcctgtaatcccagctactcaggaggctgaggcaggagaatcacttgaacccaggaggcaaaggttgcagtgagccgagattgcgccactgtactctggactgggtgatagagcgagaacctttctcaaaaaagaaaaagaaaagaaagaggaaagaaagaaagaagacttggatcctggcaaaagagattatgggaggggggtggaaaggaattctgttaaggggcaatgaaccaatagggaacagagattaacttgtaaataggtctctttgacagtgaaaggttctggtctgctcagttgtggttacattcttactcttgtagtggggaagaaaaaacagttgttttccttgggtctgcatcttaggcagataggaacttcagctttcccaaagaagttgtctgtctaa

SEQ ID NO: 752729 - DNA, 617 bp, Homo sapiens
ccaccaatttgattattataaattcatcctgtctttcctctgctctgtcctaaaccataagatcgtatttctcacccttcagtgattggacatcctgctcagaattcacaaagggagctgacaatcccctggggaatgtgggacataaggcaaggccagaactttttcacaaacaaaatagatggcctcaggacctcagaagcagcaccagtatagagccataatagacactgagtgagccagaggtagtgtctgtccacttggaaagcaaagggactgaaactctcatgcctcctcctccaagatctgcactaaccacagaatgcttcatccrtttattcaacatttactgagcatctactacatgctaagcactgtgctgggcataaaatgcataagacatagttcctgtcctcaaggagctacttgtatcggttaagattagcctaaagctgcctgcttaaatattctaagttcagcctaatggtttctctgtaatagtgaactgtaacctaactaaatgcataaatagatcaacctacccttgtgccagtcatcaagtttcaaccaatcaaaggcagccaactgttcaaactgtgttcaaacagggcaaacgc

SEQ ID NO: 752730 - DNA, 621 bp, Homo sapiens
ataaatttgaaactcttccacacatatatggtagcagaaatcttgggcatggatggggagcctcttgcctgtccatccactgaattattgtatttaatgtcttttgatttcctctcttttctttttactactattttctaccctttgtttctttacaaaaaaatagatttcatttgccccttctcaattcctttccagcatcaagcataactcttactttttgattcattattatcttcatcaccctccttcttacacttacttttttcataattgtttctaatcatctttcttttgtaacaaaagctttattccttaacaccactcyaaatatagaatgattctaaattatggtcctgtagttttttaacttcttaacattatcatgtagaatcaatacatacacaaaaacagatagaataatataacaaattcccatatgcttcaacagggagctatattccttaaaataaaataaaatcaatgcatgaccactgcaatcatataccaatctcattcttgtctcacaacagaaaataagaatcagaacagatttttttgtgtgtagatatccacatttttatccttaaatcctttgccctgtactgtgcaccattctag

SEQ ID NO: 752731 - DNA, 583 bp, Homo sapiens
aaaatataaaataaattcgaacaactcaacagaaaaaaaaaaagaattccattaaaaaatgggcaaaggacatgaagagacatttctgaaaagaggacatacaaaggcaaacaggtatatgaaaaaaatgctcaacatctgtaatcatcagagaaatgcaaaccaaagctacratgagttatcaccttaccccagttggaatggctgttattaaaaagtcagaaaattacaggtgctgttgagaatgtggagaaaagtgaactcatacactgctggtgggacagtaaattaatacagccactatggaaaacagtgtgtaaatttctccaaaactaaaagtaccatatgattcagcaatcacattattgtttatccaaagaaaaagaaatgagtatattagagggatacctgcactaccatgtttattccagcactattcacaattgcaaaaatatggaatcaacctaagtgtctgtcaacagatgaatggataaagaaaatgttgtatacacacacagtggaatatatttggccataacaaaatgaaattctgtcatttgcagcaacacagatggaactggag

SEQ ID NO: 752732 - DNA, 681 bp, Homo sapiens
agccactatggaaaacagtgtgtaaatttctccaaaactaaaagtaccatatgattcagcaatcacattattgtttatccaaagaaaaagaaatgagtatattagagggatacctgcactaccatgtttattccagcactattcacaattgcaaaaatatggaatcaacctaagtgtctgtcaacagatgaatggataaagaaaatgttgtatacacacacagtggaatatatttggccataacaaaatgaaattctgtcatttgcagcaacacagatggaactggagattattctgctaaatgaaataacataatatttatgttatgttattaggcatagaaagttaggcagagaaagacagatttcccccatgttctcactcatatgtaggagctgaaaaaaattgacttcatcaaggcacagattagaatgattgatacyagaggctgggaagggtgtgtgggttgggccaggtgcaggcggtgaagagagattggtcaatggctacaaatacacagttagatagaaggtataagttctaatgtttgataacagagtaggatgacaatagttaggagcaatatatggtatatttcatggcagcctcaagagagatcttgaaatgtttccaacacataaaaatgataattactcaagatgatagatatgccaaatacac

SEQ ID NO: 752733 - DNA, 589 bp, Homo sapiens
tggtattccacttaggaaatataaagcccaatagcttagagatgctcacatctggggctttattatttgtgttttaggttcagcaatagtaactgctgagcaactcttaaaagtttcgatgattagcttagccagtaagttcccagacagctttaaaacactgatctatgatcttacatcttctacatcagctcacaattctatggctatattttctgtgtagtaggaattaatgtttagagagaaatgtgatggcctaattgattctgaacctagaacctcaaggtagcttttgctacagttatctgaaaatgtctctcccactctgtattagacaattstaccccagatttttacacactgggtagaaagcagtgtccacctgctttccctgttaggctccagaccatctgccatggtattgccctgtcccaatggtaccaccacttctgcccattcctgctgctgcttttccaggcaccaccaccaaagctcccaggcacccctgctgattccactgggaatggctgtatttgttggggctgtgactgccctggatcactggaggggcagagtctccatcatttca

SEQ ID NO: 752734 - DNA, 589 bp, Homo sapiens
tggtattccacttaggaaatataaagcccaatagcttagagatgctcacatctggggctttattatttgtgttttaggttcagcaatagtaactgctgagcaactcttaaaagtttcgatgattagcttagccagtaagttcccagacagctttaaaacactgatctatgatcttacatcttctacatcagctcacaattctatggctatattttctgtgtagtaggaattaatgtttagagagaaatgtgatggcctaattgattctgaacctagaacctcaaggtagcttttgctacagttatctgaaaatgtctctcccactctgtattagacaattctaccccagatttttacacactgggtagaaagcwgtgtccacctgctttccctgttaggctccagaccatctgccatggtattgccctgtcccaatggtaccaccacttctgcccattcctgctgctgcttttccaggcaccaccaccaaagctcccaggcacccctgctgattccactgggaatggctgtatttgttggggctgtgactgccctggatcactggaggggcagagtctccatcatttca

SEQ ID NO: 752735 - DNA, 539 bp, Homo sapiens
aggatactgaaatggcaaaatggagtaagaaccacaaaagatgattaaaactggaaaggaggtacaggtagtaggagggacctaaacatmctgtctctgcatactcctgttctgtggtaggtaaaagaggaggctccaaagaagccttacatggaacagaaaggaaggaacagttagtcagagaagtctgaggaaaagcagaagcttttatagcatcttcatttttatatttacagaagagatcaaatgcaaacattaattttttattgtgctgaaagatttgaaggtcaaacagaagctgatagctctgattctttagaaaaatagaagatactaagatcatttgagcatgatgtatcttggagtgaaattgaagaagtgaggtatgtcattgtagtccactgccattacttttgagaagctatgggaactagagaagcggttgaaaactagaggttggcaataacaagtgttatcttctccctttaaaagtgattaaaaagggggtctacagtaatgaccagttggtatgtttaata

SEQ ID NO: 752736 - DNA, 603 bp, Homo sapiens
cgggcgtggtggctcatgcctgtaatcccagcactttgggaggccgaggcgggcggatcacgaggtcaggagatcaagacattcctggccaacacagtgaaaccccgtctctactgaaaatataaaaaaagtagccaggcatggtggtgcgcgcctatagtcccagctactcaggaggctgaggcaggagaattgcttgaatytgggaggcagaggctgcagtgagccaagattatgccactgcactccagcctggcgacagagcgagactctgtcaaaaaaaaaaaaaaaaaaaaaaaaaagagcttcttatctcatcaataacaaatgaaccctttcttcatccacatcaaatctattttttaaaaattgggcctctgggttcacaaaagtgagtaagactgggtccttgatgtctgagaaatcagcctgtcaggaaaagaaagaggtgaacaacaacatataatgtgaataaataattccaacacagagtaagaggaaatcctactactgtctgggagactgtcatggtggttttcactaagggtgtggcatggggcataagtaggggattgattttcaggccaaaaagaggagctactt

SEQ ID NO: 752737 - DNA, 579 bp, Homo sapiens
gaatttgtggacatattttaaaaccatcacagtgttcaacagaaggggcactcttttgatgagagtcaaaggaaatgaggaagctgaaaatgggcaacctaaaaagaattagctgacagctggaaaacttagagtgtacaactatacrtcagtaatttttttattggcaactaattgtttttcaattttatttatcacataatattggagcatagctagctatatatgatgattttgggaaaaggatattgaggctgaaatctttcctaatgatgagatctattgagtttggccgtagtcccatagggggagtagttggggccattggatgcagtcatttaaaaactgagccagagagaagtttgtattggaaaaaaaaaatgaagtaaatgacagaatcagtattctgcaagcttggattctctgagactctaattttaaattaatttagagattttaaaatgccaattttctatacaactaagtgcttcaacagatttttgtctccattgaatccatgaaacttgagagttgttttggccattgcaaaaatgttcatatctttgacttccttggtgc

SEQ ID NO: 752738 - DNA, 549 bp, Homo sapiens
gccaggaaaatttgatagctacatgtagaagaatgaaattggatccctatttctcaccaatacaaaaattaactcaggatggattaaagacttaaatctaagacctgaaaccacaaaaattctagaagaaaacctaggaakaacttttctggacatggcctaagcaaaggatttatgaccaagaccccaaaagcaaatgcaacaataacaaaaataaataaataggacctaattaaactaaaaagcttctgtacagcaaaataaaaaaacatcaaagtaaatagaaaacctacagattgggagaaaatatttgcaaattatgcatctaacaaaagactgatatctaaattctacaaggaactcaaatcagcaaggaaaaaacaaataatgccattaaaaagtgggcaaatgatatgaatagacatatctcaaaagaagatattcaaatggccaacaaatcatcagtaatcatcagggaaatgcaaattgaaaccacaatgagataccaccttcccccagacataatggccattattaaaaagtcaaaaa

SEQ ID NO: 752739 - DNA, 502 bp, Homo sapiens
cacatctttgtagattttattgtttatattttgaataatataagggaagttgggaggcacactaaaatgcttgtggcctctaaaggtcttcatcttgccctgttttgatcacatgctcaccaagcaatctttgtgttgtaatttaacttctcgtacaggagkcgttatatggtttcctggaatggaaagttgacattagtattccagtccgtgtaacagctatttttcccatcataaatcaataaataggcattctggttttatgtattggtctgtgagcttgtgtaatttgagtcagccactgaggtatgggatactctaactgaatggcaatgtcaggtatccaggtctgtccatctaaaactaagagtctggtcaatgaaacaaaggaagcccttgcagaagcgtcatttacttcctcttggagaaaacatttgacttaatttctatttatcaatatccacctacatttgaggattaattcttcaaaatagaagctttt

SEQ ID NO: 752740 - DNA, 541 bp, Homo sapiens
cattagtcattcagaaaaggaaaattaaaactgaaatgcaatgcacaacacacttattagaattattaaaattgaaaagaccaacaatatgaagtgctgtcaagaacagagagaaaatgaaattcacacattctgctggtgagaatgtaaaatgcaaccatcactttgaaaacagttcagcaattccttaaaaagctaaacatatacctacatgtgatccagcctttccaccctgagatatttatcacagcaaataaaagcatatgcccatataaaatcttgtacatgaatgttcatagcagctatatttgtaatagccaaagastagaaacaattcaaatgtccatcaacacataataattatatattgaaaaacaatatgataaacaaaataaagtatatgcatacagtggaaaactactcaacaataaaacaaataaacttgatgcatgcaaaaaatcaatgaaaatcaaaattatcatgctgagtgaaagaaaccagacaaaaaaaatacacacatactgtatgattccatttatat

SEQ ID NO: 752741 - DNA, 541 bp, Homo sapiens
cattagtcattcagaaaaggaaaattaaaactgaaatgcaatgcacaacacacttattagaattattaaaattgaaaagaccaacaatatgaagtgctgtcaagaacagagagaaaatgaaattcacacattctgctggtgagaatgtaaaatgcaaccatcactttgaaaacagttcagcaattccttaaaaagctaaacatatacctacatgtgatccagcctttccaccctgagatatttatcacagcaaataaaagcatatgcccatataaaatcttgtacatgaatgttcatagcagctatatttgtaatagccaaagactagaaacaattcaartgtccatcaacacataataattatatattgaaaaacaatatgataaacaaaataaagtatatgcatacagtggaaaactactcaacaataaaacaaataaacttgatgcatgcaaaaaatcaatgaaaatcaaaattatcatgctgagtgaaagaaaccagacaaaaaaaatacacacatactgtatgattccatttatat

SEQ ID NO: 752742 - DNA, 627 bp, Homo sapiens
tctctcagagaagcgttcataggaatgtgcctcgtctccaagggtgtctgggaaagagctactgactactgagctctgaaacagccacctgaactgcaggaacttagcaagaggaacagctcagatccaagaagagaaaccctttctttttgtactgtttatctactgccctctaatgacagcacttaacaacgtgacagttgaccaaggatatttacagggtccatctctgttattgcagatctggcaatgaagaatggacttkgaagtggtagacaatacaattgataactggaagaacagataacagaacagcatacaggttgactttccttggaatatgtgaatccttgagcaagaacttccttaaaagggggtttgggcagacagacattgatgtgacttactttatacagatttcatgcagtcaaaaatgagaactctttttaaggctttgaggaagcacattcagtttgcttgtactttattgtgccattgtataaagtgtcccgtattctcaggagtttgtgggctaaatatgctttatattcagtagctaggtaatttggaacattggcttcattcaagtagcttaagtcatcagttgcccagctattgttttcttaa

SEQ ID NO: 752743 - DNA, 533 bp, Homo sapiens
caatttgtttggcattgttcttaatatattaatcagaaataaacttagaaaatgttttgtttcaaaacattctgatacagaagcttattgactatcggtgaactcaaaaattacatttggttgtcaaaagctgaatgttttactttttcacatctttgctgtaattgtcatagctaccctaragacatatggatgcctctgaaactgtttgtttattttttcactcagcaaaatcttactgagcagattttatgtgcttggcacagtttcaggtgtttgcatgctagtggcagaggcaagcaataagcaatagagttaaggaaagtattagaaagtgataaatgccaagttgaagaatataggagggaagggcaattggaagtgttggggggagttgtgctattctcgatggggtaaagacctcactgagaacatgacttttgagaaaaatcttaagaaatgaaaggagttaatcatcctgtatctggagggagaccattttaggcagagaaaaatcacaagttcaaaggctt

SEQ ID NO: 752744 - DNA, 578 bp, Homo sapiens
aaacaaatacggggaaagagagagaacaaacaaaaaggagaaacagaagacaaactaaaaaataaactaaattctacagtactaaaactagaaggtattctcaaaattttgaaaattaataaaattgcagctatcttcacttattccttcaacatttacttacracttacgacatgccaacttctatgctaggtgctagtgatacatgctaagtactaggttaggtgctagtaatatgtgagacaaaacatctagcccctaaacagtaatactgcaaagcaatagctacgcaggtgaaggtacttccgaatcataaggaagaaaacaactctgcctggggacttcacaaggtattaaaggaagagcaggaattggttagtcaaagaaaaggggaaggatagtctagagcaggagtctctaacccctgggccatggattgggtccatggcttgttaggaaagccacacagcagatcagtggtgggcgggcaagcattactgcctgagctctgcctcctgtcagatcaacaacagcattagattctcacaggaccacaaaccctattgtgaactgtagat

SEQ ID NO: 752745 - DNA, 512 bp, Homo sapiens
gaatgttctggttttaaacctaaaagtctgtgccctgggaaaccctttagtctcagccaaattgggacagttggtgactctaggcttgggacaaattagacgctcaataataaagatgaatcactttccagtgtcaccttccctgagttgttacwcctcacattggtacacctgcctgtaaaggcagctacacctactgtaaggcaaagggagggaagtcttccgtgtcctttcggtgggatgacaacgcccttgacaacactgctgaaatgacaactctgtaaattccatctctgctctagacgaggttttgtctgaatccccttgtgacatgtgttctgcatttttgcaaaatcactgaccagagctaaagtgaaaacagggagcatggaatatggtggagctcacagcctctctggaagcagatgcaccagccaggtggttccttctcattgtatgggtgaacagggcaaggcacagagcttctggaatcgaaatcctccctgtaacag

SEQ ID NO: 752746 - DNA, 625 bp, Homo sapiens
ttataacttgcttttttgatttttgcttaataatataaaatgacataattccatatcattagtcttctgcaagactattctttttatttaactgcatcatttttcattcatcagatagtccataattttaccaatttcttgtatttggataatcacattgtacccaatcctacraatattttgaagaatattcctttctgttaattctagcataacatcttctgtctttacacggccaagccaacctttttatgattgatgagaaatttgatcctcatcaaatagaggaattatgaatcccacatggttaaggagaaagtattcctatggcacttcagttaagtatctttgtagcactaattgcattccactacataatacattttcttcattcaatatttaacaaatatttgagtacctgctatgtgccaggcatgaagggtgggaggggttgcaattttaaaggtgttcagcgtgatacaagaccatgtcagagcagcaatggttgacagactgcagagggctgtataagccaccaagaggagtctggcttttattccaagtgaaatgggaagccattggaaggcttagagcagagaagagacttggtcttcttagtcatcaa

SEQ ID NO: 752747 - DNA, 625 bp, Homo sapiens
ttataacttgcttttttgatttttgcttaataatataaaatgacataattccatatcattagtcttctgcaagactattctttttatttaactgcatcatttttcattcatcagatagtccataattttaccaatttcttgtatttggataatcacattgtacccaatcctacgaatattttgaagaatattcctttctgttaattctagcataacatcttctgtctttacacggccaagccaacctttttatgattgatgagaaatttgatcctcatcaaatagaggaattatgaatcccacatggttaargagaaagtattcctatggcacttcagttaagtatctttgtagcactaattgcattccactacataatacattttcttcattcaatatttaacaaatatttgagtacctgctatgtgccaggcatgaagggtgggaggggttgcaattttaaaggtgttcagcgtgatacaagaccatgtcagagcagcaatggttgacagactgcagagggctgtataagccaccaagaggagtctggcttttattccaagtgaaatgggaagccattggaaggcttagagcagagaagagacttggtcttcttagtcatcaa

SEQ ID NO: 752748 - DNA, 606 bp, Homo sapiens
tcaattacctgccactggatcccttccaccacgtgtggggattacgggaactaaaattcaaaatgagatttgggtggggacatagccaaaccatatcatttccaccacttacccctcccaaatctcatgtcctcacacttcaaaacacaatcatgccgtcccaacagtcccccaaattctaactyattccagaattaacccaaaagtccaagtccaaagagtcatctgagaaaaggcaagccccttccacccatgagcctgtaaaaatcaaagcaagtagtcacttcctagatacaatgaaggtacaggcattgggtaaatacagccattctagataggaaaaatggccaagacaaaggggctacaggccatgcgagtccaaaatccaacagtgcagtcattaaagtttaaagttccaaaatgatctcctttgactccatgtctcatatccaggtcatgctaatgtgagaggtgggctcccatggccttgagaagttctgcccctgtggctgtgcagggtacacccccctcccggctgctttcatggctggtgttgagtgtctgtggcttttctaggtgcatggtgcaagctgtcggtgaatctac

SEQ ID NO: 752749 - DNA, 649 bp, Homo sapiens
gatttgtaacagctatcaaagtctccaagataagaactttccttaggactaacatctttaatgataagtagataaaggcttctacctcagtaattaaaataaggctctcttatgccatatttgggatactcaatcacagccgtgttcaagatcaaaaacttatgggatgtctgatgtttacatagattccaactagcagttgaagagatttctgcactataagtaattaaaacaaggctctcttatgccatatttaagtttctaaaggagacttaagcarcctctgctacatgtagtatggttggtgtaaaaagaaaaacaccttatttaaaaatgtctaagatgccagcttcgtttttgactccccatcacctgagagtttttttttacctgttaaagcatggaggaaaagacaaagtttcacaaagtctgtaaaagtcagtttttttgtttgtttggttttctttttgagacagagtttcgctcttgttccccaggctggagtgcaatggtgcgatctcagctcaccacaacctccatctcccaggttcaagagattctcctgcctcagcctcccaagtagctgggatcacaggcacccgccaccaggcctggctaatttttgttttttagtagagacgaggtttct

SEQ ID NO: 752750 - DNA, 630 bp, Homo sapiens
agcatggaggaaaagacaaagtttcacaaagtctgtaaaagtcagtttttttgtttgtttggttttctttttgagacagagtttcgctcttgttccccaggctggagtgcaatggtgcgatctcagctcaccacaacctccatctcccaggttcaagagattctcctgcctcagcctcccaagtagctgggatcacaggcacccgccaccaggcctggctaatttttgttttttagtagaracgaggtttctgcatgttggtcaggctggtctcaaactcctgacctcaggtgatccacccccctctcagcttccaaaaagtactggggattacaggcaggagccactgcgccccggcctgaaatagccagtcttttaaagggcccagcccctgggcaatcaccgcatctgttctatattctccctttccttttcctttccttttctttgccctgtgtgactagaaaaagggtctctggagtaaagatgtcacctgtgaaactctgggtggtgattcaaacatttgcaaacattctaactgttttcgctcgagggcggtggtggttatagtttcagcttgccctaaatacacatgcccacgcccatgtcagctggtgcctcctccataca

SEQ ID NO: 752751 - DNA, 469 bp, Homo sapiens
atggggcaaagattccctaagtgaagggaatattgaaagaaagttctggagcatgcaatcctgtccagttgaagtactgcaggaaaaggaagcacgcacacacatatgtacacaaatgcacactcatacaggcaaatcctccatgactgtgcctcagaatcaccttattcaattgacagaagcacagtgtgactaccatacttttgttacatccatgaagtgtgtgtaaagaaacacaagtcacacgatccttggctggcatggctgcctstgccctgcaagtgcccatggccacagggagttgcaatggtaccagcatgggctttgcattaagtatatttaggtttgaatcctaattctcgcaccttctgacacaaccacctgaattcaagttctggttcttgctctcagaagctgtgtggtcttgggcaggtgacctgacttccctgcctctctgtttcctcatctg

SEQ ID NO: 752752 - DNA, 574 bp, Homo sapiens
gtttgctaatattttctccccttctgtgggttgtctgtttactctgatgattatttcttctgctgtgcagaagccttttagtttaattaggtcccatttatttatttttgtttttgttgcatttactttgggttcttagttatgaattatttgcctaggccaatgtgcaggagagtttttcctaggttatcttcttgagtttttatggtttcaggtcttagattcaagtcttttgatccgtcttgagttgatttttatataaggtgagagatagggatccagtttcattgttctacatatggctagccagttttcccagcactatttattagatagggtctcctttccccaatttatgtttttgtgtgtattgttgaagaccagttggttttaagtatttagctttatttctgtgttctcttttctgttscattggtctacgtgtctacttttatactggtaccacgctgttttggtaaccatagccttgtagtataatttgaagtctggtaatgtgatgcctccagatttgttctttttgcttaggattgctttgggtacttgggactttttt

SEQ ID NO: 752753 - DNA, 586 bp, Homo sapiens
ggaatagtctgactaccaccaaaatctttttcttttcctgtataagatgaccagcatcagaccccgtggcaccagcatggacagagttgtacaaaagatgttcattaagaactggattggccgggcgcggtggctcacgcctgtaatcccagcactttgggaggccaaggtgggtggatcacgaggtcagagatcgagaccatcctggctaacatggtgaaaccctgtctctactaaaaatacaaaaaattagccgggcgyggtggcgggtgcctgtagtcccagctactcgggaggctgaggcaggagaatggcgtgaacccgggaggcggagcttgcagtgagtggagatagcgccgctgcactccagcctgggcaaaagagcgagactccatctcaaaaaaaaaaaaaggaactggattgagagactcagtcattcattcaagaaatagttgttggccacctaccatgtgccaggcactgataggcgctggatataaaacaatgtgaaaggcagtcaaaaccattgcccaacatagggagcttgtagccatgggggcacagagacagatgatggccatctata

SEQ ID NO: 752754 - DNA, 569 bp, Homo sapiens
tctggaaactcagtgtctggctaacacggtgaaaccccaaaatttattttcttacagttccaaaggttagaagttagaaatggaggtgtcaccagggcatgctccctctgagactctgcacagaagccttgattccctcttctctgcttcttgtggtggctgtcaattcttggtgctttttgactagcagctacaaagtttacaatcccaaatctgcctctrtcatcacatggggttcttcctgtgtgtccatcttcacatggcattttaatcttcttataggacaccagtcatattggattagggcccaccgtaatgacttcaccttaaaaagaccccatttctaaatgaggttactcttacaggtaccaaaggtaaggatgtcaacgtatctttttagggggacacaattcagtccataaaagatagaaccaataattgacaatcttccttttattaaggttagctatatacttgtcatcactttctcaagattgtaaacttcttaggcgtatgagctgagctctaatagaagaaatactttgatcctctttggtaaatccatagta

SEQ ID NO: 752755 - DNA, 468 bp, Homo sapiens
aactaactaaaataaaatacaaagaggtcctagaatgtcatggaatgatgaaaaaatcttgtaagatgaaatgttgttaaataaagttctgtcatttaggaaatattgagtaagtatggagaagtatgtgtttagaaatcaaaattctgtaaataagaaaaacttttattcattacgagaaagaatatcctaataaatttttagagattggtcaagacaatttattataggtttctttatgttgcgaacattcccttaayctcttcctgcctgtttcccactctactccttccaaactcagtctaagtttaaaatcactcatcttaaattcagcatcactttctcagcagttttctatctgaggccagttttcctattaaaaataagaaattagttaagtaataatatacttgcatagcatttcacagattacataattgttttacaagtgtcattttatttgctctt

SEQ ID NO: 752756 - DNA, 606 bp, Homo sapiens
taagtctacgagagtatctaagctagagtagacactcaataagtgattccttttctattttgggctccctttatgtatcctattaataatcgctataaggtgatttcatgattacaggaagtcaatataaaataggtaaggctgattaaaaatttaagagttcctggttaactcctttatgcaacaatatattttattaatcagtttggttaaatgattggaatatatttaattcattttaactttattgacattatgcttgacactgtcattactacaaacaacagttatagtgaaacacttgcagaaactaaaacacagaactttgctactgaactaataagtctaaatcactttattgtgaccctattattattcatttcattgttgtggttgttgtktttgttgttgtttggtttggtgacacaattagtcctgacttttgggttgatttgcattttcttatactgctttccacatctatcatcactgccttaggtatgcctggctatgtatgccagctgtctcatctgctaatagtgtttctaatttttggttattttgtaaaataaataaccagatttttaagcttgaggttcatatgta

SEQ ID NO: 752757 - DNA, 605 bp, Homo sapiens
tctagattttctagtttatgtgcacagatgtgttaataatattctccaatggttatctgtaattctttgaggtctctggtaatatcccattgttgtttctaattgcatttatttggatctgtttacttttttattattctagatagtagtatatctactttattaaatttacaagaaaataacaactcctggatttgttgagattttttaaattttttttttaatctatctcagagtccttcagttcagttccaattttggtaatttcttgtccttagctttgcagtttgattttggttcttttcgtcatgatgttaggtagwtaaaatgagatctttccaactttttgatgtgagcatttagtactataaatttccctcttaacactgccttagctgtgtcctggagattctggtgtgttgtatacttgttctgattggttttaaagaacttcttgatttctgactttattatttacccagaagtcacttagaatcaggttattgcatttccacgttattgtatggttttcaggaaatatctttgtcttgatttctaacttgattgtgctgtggtgcaagatagtggttgttatgattttaggt

SEQ ID NO: 752758 - DNA, 654 bp, Homo sapiens
atctgtattagcaatgctctattcacagttaccaccaagctatcttctaaaacacaaataaacaaaatgttaatttaatgactattgccttttccttgtggactgagtaatttaaaatgcattacaataggttttatgtttatttgttaattaattgcaaaattgaacagctattatgtataagacactatattgagcaatagaaaaaatagtaagacgtaataagacataacactagttaacatttctagagtacttaccataactcagcactgtgctattaaggtttttgcgtgacttagctcatttagtccctttagaagcctagaaattttgtctcagtgttactaaccattaacaagaagtaaaatgaaaatacagatagttttaaatataatgcaaacttatatccttgtttttgcagatttgtatatctggtttatgcctgttcttcctatgtaattattaatagaacatcctctgcctttgaagaatgtcccttsaatgatattttacatcgttatcccatttaaataacttgcccaaggtcacacagctagttactggcagaactatttcttaaacccagattttctgaagccaaagcctaaattaaaccatctcccacagctaaggaatactttttagtttaat

SEQ ID NO: 752759 - DNA, 624 bp, Homo sapiens
tgctagatatatatctaaaggaaatgaaattagtatgtcaaaaaatatccatactctcatgtttattgtagcactattcacaatagccaagatatggaatcaacctaagtgtctgtcacgtaagtgtctatcactatcaatggatgagtggataaagaaaatgtggtatatatacactagagaatactacttagccttaaaaagaaattaaatcccgtcatttgtgacaacatggttcaacctggagactattttgtaaaaygaaataagccaggcacagaaagacaaatactgcataatttcactcatatgtgcaacctaaaaaaattgatctcatagaagtaggtagaatagtggttaccagaggctggggaaaatacagaggagtagggcataggaaaagtttggtgaacaggtacaaagttacagttagatagaaggaataagttatgatgttctattgcacagtagggtgactatggttaacaatattattatggtatatttcaaaatagctagaaaagaggacttttagtgttcttactacaagtaaatgataaatgtttgaggtgatgggtttgctaaatatgctggtttaattattacacaatgtatacatgtatc

SEQ ID NO: 752760 - DNA, 634 bp, Homo sapiens
atgatgctattacagaagaaattgaagggggacggatttctgtaagtatgcagtcctttatcacccccttgtggccacttaaacaactggaaggctcctagcagtttacatgcattataaaggtttaagttgcagtcatcattaaagcaccagctgacaggtttgattttgtcatcactcaaatgtgatccagaaattaatctagccaaacatttattattacaattcatataaatcaattgccatttttctttacctgggagagacaacaatgttttcatggtcttgccctggggatatataaagcacctcagctactatctaccacsgtgctgttagaaggaatttaatttaaatgtaaacagagacttctgtttacagcctccagggaatgaatgattaagctagaaaacaatcaagactcctaaattgtcgcttgttgagaaacacagtctggaatttgcatacacacaccctaaatattcagtgctctcaatctaaaccactgtcttaggccaatacagaagttaatgtgcctttcacttatgaggttgcctaaaggctttagtctgggaaaagcagcgacaggattccttaaaactccttaatgccattccagtagacctgaagaacc

SEQ ID NO: 752761 - DNA, 581 bp, Homo sapiens
tgctgcagttggagcttctatcccaggcgtcatccagtctgggtaggaggagcctctggtttgtggtgtgatcaaccttgatagccctccttggatccctgttctgagcaaagctgcctggccccatggcccactaccagcagtttccatctattccttgccctgaacaactcccaacatggtatccactaatttgttgccaatctccagaatcacaagcctcaaaaattaacaaagatggggtggggatgacagttcgaggaaaagaaatgtaaagtcgtcagaggccagtgactaagaataactcactgaatgctttcacacactttcatacactaattgtgagaatgtaaattgactcaacaattctagaaagcaattgagcaatgtgtttccaaagcctttaaaatgatcatatcctttgacctaattrttgctcatctatacatttattcttaggaaagagatgttaattagacaaagaatcagctacgtggaggttcattcagtgttatttataatagcagaaaattagagacaatctaaagccccccaaaagggcaatattgtgatatatccat

SEQ ID NO: 752762 - DNA, 616 bp, Homo sapiens
tatgctactgcactccagcctggcaacacagcaagaccctgtctcaaacaaaaaagaaaagaaaacaaacggattcaaatctcgtcccatgtaactctggaatgtcctgttcgctctctaagattatcaaagattcccaagagggttgcattctcctggttatctcctactgatagcagcaggagacagccaaattcytaggcagacaggggcaggtccttggtgaaacctgatgttcaaggcaaagacagcttagagcctgaaaactgggctgccagttccaggttgggtcctcaacccgaagtgagaactttcttgatactatttagctaattgaatggtgctttttccaggccagtccgtggaccactcagcacacactcccctattctgagcccataaaaaccccagactcagcgacatgtcggaactacctgcctttgggtaggggctacccacttaaggtcccctctggtgttagcagctgttttgtcactcaataaaactcttctccaccttgctcacgctctggttgtccacataacctcattcctcttggacacaggacatgaacctggagcctgcccggatgcgaaaggagctgtaacactgaatc

SEQ ID NO: 752763 - DNA, 616 bp, Homo sapiens
tatgctactgcactccagcctggcaacacagcaagaccctgtctcaaacaaaaaagaaaagaaaacaaacggattcaaatctcgtcccatgtaactctggaatgtcctgttcgctctctaagattatcaaagattcccaagagggttgcattctcctggttatctcctactgatagcagcaggagacagccaaattcctaggcagacaggggcaggtccttggtgaaacctgatgttcaaggcaaagacagcttagagcctgaaaactgggctgccagttccaggttgggtccwcaacccgaagtgagaactttcttgatactatttagctaattgaatggtgctttttccaggccagtccgtggaccactcagcacacactcccctattctgagcccataaaaaccccagactcagcgacatgtcggaactacctgcctttgggtaggggctacccacttaaggtcccctctggtgttagcagctgttttgtcactcaataaaactcttctccaccttgctcacgctctggttgtccacataacctcattcctcttggacacaggacatgaacctggagcctgcccggatgcgaaaggagctgtaacactgaatc

SEQ ID NO: 752764 - DNA, 590 bp, Homo sapiens
taagtgtttaattccttgcatcttctctgaagctaggcattacctttggatcaagcaataggtaaagaaactttaattacatttttgatatctaaatctattaaacctctataagaagaaaccagccataggaattcttacctgggttgaaggaccagatgaataaatccaggcattaaataacacaatgtctttcctgttccagtctgggctactcctataagatctattccttgcaacacaatgggccatgcctgtgactgaaacggaatgataaacattaacacaaaaagtacatcttttgctgggcgcagtggctcacgcctgtaatcccagcactttgggaggccgaggcgggcagatctcctgaggtcgggagttcgagactagcctgaccaacatagagaaaccgtctctactaaaaawacaaaaattagctgggcgtggtggcacatgtctgtaatcccagctacaagggaggctgaggcaggagacttgcttgaacctgggagacagaggttgtggtgagccgagattgcaccactgcattccagcctgggcaacaacagcaaaactgtctcaaaaaaaaa

SEQ ID NO: 752765 - DNA, 673 bp, Homo sapiens
tttctcaggattagactgaagctatacattattgagaaggatgctacaaaatgatgtgatcatgtgcccttctcagtgcatcgtatttcaggacaggtgatgttaattttgatcacttggctaggaaattgcttgtgttctttactgaaaacttgtggttcttccatttgtattactaaatattgtggaggagatacttcagactatgcaaatatcttgtttctgcytaaaccatcacccgtgagttttagcatcaggggtcaattttgcctgaggcaatgattactgtggtccagtggtgattttctctctctctctctcattccttctgcatttatcaatgggaaccttcatggaacagctgttgtttcttcaccaatggctcctgaatccccccacccccaaatctcttgtaaccaccattttattctctatgagttcaacttctgtacattccacacataggtgaaagcatgagatatttttctttctgtgcctggtttatttcacttaacataatatcctccaagtttatccatgtcaccgaaaatgacaggatttccatctttttatttttatttttggggcagagtctcactctgttgcccaggctggagtgcagtggcacaatgtcgactcactgcaacctctgcctcttgggttcaagcaattc

SEQ ID NO: 752766 - DNA, 673 bp, Homo sapiens
tttctcaggattagactgaagctatacattattgagaaggatgctacaaaatgatgtgatcatgtgcccttctcagtgcatcgtatttcaggacaggtgatgttaattttgatcacttggctaggaaattgcttgtgttctttactgaaaacttgtggttcttccatttgtattactaaatattgtggaggagatacttcagactatgcaaatatcttgtttctgcctaaaccatcacccrtgagttttagcatcaggggtcaattttgcctgaggcaatgattactgtggtccagtggtgattttctctctctctctctcattccttctgcatttatcaatgggaaccttcatggaacagctgttgtttcttcaccaatggctcctgaatccccccacccccaaatctcttgtaaccaccattttattctctatgagttcaacttctgtacattccacacataggtgaaagcatgagatatttttctttctgtgcctggtttatttcacttaacataatatcctccaagtttatccatgtcaccgaaaatgacaggatttccatctttttatttttatttttggggcagagtctcactctgttgcccaggctggagtgcagtggcacaatgtcgactcactgcaacctctgcctcttgggttcaagcaattc

SEQ ID NO: 752767 - DNA, 640 bp, Homo sapiens
aagtatctgcacttatttcagtctctgctttcaattcttttgaatatatacctaaaaatggaattgctgggtcataaggtaattctctaactttctgaggacaaattaaactgttttccacagtggctgcaccattttatattcctaccagtaataacaagggttcaaatttctcaatatctttgccaacaattttgtcttttccattttttcttttcttttttcttttttttgagatggagtcttcctctgtcacccagtctggagtgcagtggcrtgatctcagctcactccaacctctatctcccaggttcaagcaattctcgtgcctcagcctcccaagtagctgggactacaggcgcctgccaccacaaccagctaatttttgcattttttttagtagagatggggttttgccatgttggccaggctggtcttgaactcctgaccttaggtgatccacctgccttggcctcctagagtgctgggattacaggcgtaagccactgtgcttggccccatttttttgatgacagccattctaatgggtatgaactggtatctcattgtggttttgatctgcatttccctaatgactagtgatgttgaacatcttttcatgttcttattggccatttgt

SEQ ID NO: 752768 - DNA, 596 bp, Homo sapiens
tgagctggatttttttattttttaagctttaacacaaaagttaaatggtttctttatttcactcaagggttaataattgagaaagtgattatcaacatgtacacaaagctaactagaagattagctttctcagtagaaatccaagtgtcctgttaacactggtgtcacttataaatgttctgaaactttaccttttctttctttcttttttttttttttgactcccaacataaaggccatactagaaaacctcaggaatgtaataatttatttgtaattttttttcttcaaaaaatcccttgaagttcagacattaacactgatacgcaataccaaatagctccacaggacagatggaaacaggaaaagtcagatggttggcacttaaaaggaacagtaattaagcaattgaaagtggattggattgttggttaatatttgttyattcgaaagaatcaagtggaagaggtagcctcttggaagagggagattaagttgcacctgatgcttcgcctcactgaccaaggggctgggatatcttgttaactccctcttttctgtttaattgcattctgtactctaattttctcagattg

SEQ ID NO: 752769 - DNA, 534 bp, Homo sapiens
tgaaatgtaacctcttgataacagccaaatcactgtattagaaacatttaaattccagctctgagggtcaagggtgaggcatttaaaaggttcctttaagttaaaccaaatggatgaattttaaaagaacaaaagcaatttatgaacctatgggcatatcattaaaaaagaaaaaaattattaataaattccaaaagttaaaaggagttgggaaaaaaacctaactagaaagaaaaaattttggtttcaattaagggggattttttggtccaytttatgtaagagcttactctttttccaaatgggcatttattatttgcacagatacataaaaatgattcccattttaaaaaccataataaaaatatacattaaccacagaagtacttactctaactggaaagaaaatgaacatggctattttcaaaacagtaataaacacaaaaggtcaacatacataaatcatgacaagtgtacatctcatttttgacaaaaataagttccatttttacattaatgcttcatcatcaggct

SEQ ID NO: 752770 - DNA, 603 bp, Homo sapiens
tttttaggcaggacctagattttccctgtcaacctaagatgaaaataatttcagtgttgattcagaactgaacattaagtaggccctcgtcctgcagttggccacttgagtgttttgttttgtttttattttttaaggtgggcattttcctttaacctctactttttcaaaagcaacaaaggggcctcaacctgagtttcctatgggcctctcttctgcatccccaaagcggccaagagcaaatcctgggggataagaaaaaagtgtaaactaggtaggattgtgatgctcaaaataaccatctagcaatatcttggagcttgagaatagattttgtgggcttatttcttcttgcctcttccccatcctttcaagagagaacttatttttgaaaagtatctatatayacacacacacacacacacacacatattattatttaggtttttataccatactgtattggcgagaataccactatcattgtcctttacagtctatttcttcccccaagtcttggtctttttttattttctattttttcatgaaccacacaggagactttaacatcctggtcttttctgtttcttctttgtttcccca

SEQ ID NO: 752771 - DNA, 637 bp, Homo sapiens
ataccaattataatttaaaagttcttttccaaaaagttagggaatcatttgctccttcctgtggctcaatggggagtgattataattgtcgcttttagtacagctctagagacttttagctatctctagacagctaactacttttgagatatgtaactttatgactgacactttaggggcctccaggtctactataggcttacttctggcaaaagasttcctggcttccctagatgacgtacccactgtgccctagcctggtctgccaaattttaatgaccaagtatgtaatgcaaatataaatggtccccaccttaggatggttctacttaaaaattttcagtgtattgtactcctcatcataagtcgaggagtacaattatcctcctcaaccatgtcaataaatactcagacttgtggaaggttctgggccaggctctgggaaagcaaagaggtgacaaagtctttgccagaaaattctgcccttcagaggaagagagcagaagaggtcaaggaaaaattaagtccccagagggcagaaaccatacctacccgggcacagtaacgaacacataataaacagcctagaaatgtttgttattactcataattgttacggcaaacactttgggtttcg

SEQ ID NO: 752772 - DNA, 629 bp, Homo sapiens
ctggccggagggatccttacaggcaaacaggtattgagagtcaggatgtaacggtatgcagaaaaaggcatcctttaaatctaggactataaaccatttagttccttcaggtatttgagtcagcaaggactcaaacggatgaattgggactatggcccattaatgaggcagatgtcctgaactagtctccattccccattgggtttttatgctcctagtatcggggtgttgcaaggactgttacagggtctgaggaggccctgcatttttaggttattaataatagcttctagccctttcctggcctctggctttagaggatattgtctctggttaggaaaagaagtgggatttttaaggcggatctgaactggcctagcagttttagcttgacctattcttccttgagttgtccacacttctggattaatgttggctttcactaagggaagacaaagagtttgtcctggggccatgaggatgctggcccccaygtgggctaaaatatctctacctagtaaaggagtggggggactttcaggcatatttaagaaggcatgtgtaaataataagttccccccaactacagtgagagaaatattgggttagagtctttcctgagacaccca

SEQ ID NO: 752773 - DNA, 621 bp, Homo sapiens
attgctttctggattagaaaaactcatccagttcttgtggattacacactaggaaccagttttctgcaaaaagcaaactactccagagaacagtcctcttggtatcgttccagttcatgaacagccattgaaaatgaygacgaaggtggtcatttcaacgccagcttgctgtggtttcgaaacagcagagcacgaatgaagcccaactaagccctcggtgtgttaatccaatgatgatgtcttcaccccacatcaccttctttatcccaacaatattcccgaggcaatacaagaaaaaaggtgtatccgtttcctggccattcgtgggtatattttagcctcaaaaggggcatgtggacatgaaaataggctctttcagagtaggggaatttatcttcactaaaaatttggatcttttgttaatcacaatttttttcattcactttgattttttatgatatggaattaaagtatttcatattttgaccactgaagttttggtgcccactgaaattttgtgctcaaagcagttggctcaatttccccaccctagccctgtcctgggcaccactgctggctaaaaattctatttatacatacatatatattatgtttttagac

SEQ ID NO: 752774 - DNA, 565 bp, Homo sapiens
ccttttttgaatggaaacaatgtacgtcttacatgtattgatcgatatctcatgtctccctaaaatgtagaaaaccaagctgtacgcagaccacattgggcgcatgttctcaggatctcctgaagtctgcgtcacgggcggccatggtcactcatatttggctcagaataaacctcttaaaaaaatttacagtttgtctcttctcgttgacacccyagtcttttggtagcatctgtaagacccatgagggaaagctacaactgcaaatttgataaggtttctcaaaccattgtttgattctgcaagagtaatgtcacctggggtgctcttgtagaaggggacccttgaaccacaacatttatagaaataaacctttcctttccaaatttatgagcttcacagttcttcacctaacatcattaatacactgagaatctattgcgaacccaaaatatctgagacaggtctcagtcaatttagaaagtttattttaccaaggttgagaacgtgcacctgtgacacagcctcaggaagtcctgacgacatgtgcccaaggtgttcaggg

SEQ ID NO: 752775 - DNA, 565 bp, Homo sapiens
ccttttttgaatggaaacaatgtacgtcttacatgtattgatcgatatctcatgtctccctaaaatgtagaaaaccaagctgtacgcagaccacattgggcgcatgttctcaggatctcctgaagtctgcgtcacgggcggccatggtcactcatatttggctcagaataaacctcttaaaaaaatttacagtttgtctcttctcgttgacaccctagtcttttggtagcatctgtaagacccatgagggaaagctacaactgcawatttgataaggtttctcaaaccattgtttgattctgcaagagtaatgtcacctggggtgctcttgtagaaggggacccttgaaccacaacatttatagaaataaacctttcctttccaaatttatgagcttcacagttcttcacctaacatcattaatacactgagaatctattgcgaacccaaaatatctgagacaggtctcagtcaatttagaaagtttattttaccaaggttgagaacgtgcacctgtgacacagcctcaggaagtcctgacgacatgtgcccaaggtgttcaggg

SEQ ID NO: 752776 - DNA, 645 bp, Homo sapiens
gaggcaggaggatcccttgagcccagtgctcaagggaacagtgaaccaagatcacaccactgcgctccagcctgggtgacagagtgagaccctgtctccaaaataaacaaatcaatcaaacaaacagacaataaataaacttatagacagacacacagatagaggcacatcctataacatttttcacttgcctgttttcaaaaattctctctcttcctttagactattaatttttaaaarattacgggagccagcaaaagttgaaggagagagttaccatcccaggccttttcaaaagagggaaagctctgaggcaagcaggatgcagcagaagtggaacccctaggatgtccatctgaagaatttcaagaagagattatggaattcaaaaataaaaaacttcttgcaatttcactgagtacatcagtattttaagaaaatcttgttctaaccaatgatctccttttgcattactgtatttttattattgaagtccaatacctagaatgattataatttccttttagttatagcaaacttaattacataaaaatttttttgaattccttttttacagactgtattatgacttgcacagaccatatacaacctgcttggattttctgttctgtcctaaacatctct

SEQ ID NO: 752777 - DNA, 550 bp, Homo sapiens
taattcacaaactataatatgggatgaaactcagaaacaataagagaaaaaatggccataactaccctatgctatatctgtattagcttttgcgttatccatattttggttctccttcatttgtgtgggtaatgaagaactgactgtaattgcattcagttcattgatgctgaattcaatcttaggtctgaggtcattacctgactattacacattggcattataaatgctctctagtgctgcaacgggtagtcttagatctgcyggaagcccgaattttttaaatttgagtttaagaatttgtctaatgtccttacgaaataaagattaataaaactaagccctgcgtaaaataaatcaagcaaagataattatattcattttcataatttctcattataagagcctttcataaaagaaatcaaaagtacttagatttggttactaataggtatatctaactaatatatgacagataataaaagattttttatgtaaaaaaattcaatgcgttaacattggggggggggcggttctggagtatcaaagc

SEQ ID NO: 752778 - DNA, 623 bp, Homo sapiens
tggccaaaacaaaggggctacaggccccatgcaagtccaaaaatccagcagtgcagtcaaatcttaaagctccaaaatgatgtcctttgacgctgtctcacatccaggtcaagctgatgcaagaagtgagctcccatggccttaggcagctccacccctgtggcttcacagggtatagtccccttcctggctgctttcacaggctggtgttcagtgtctgcagtttttccaggtgcacagtgcaaactgtaggtggatctaccattctggggtccagaggayggcggccctctgctcacagctccatgagtcagtgccctagtaggggctctgtgtgggggcaccaatcccacatttcccttctgcactgccctagcagaggttcttcatgaaggccccacccctgcagcaaactgctgcctaggcatccaggcatttccatacatcttctgaaatctaggcagaggttcccaaatcccaattcttgacttctgtgcactcgcaggctcaacaccacatggaatctgccaaggcttgggatttgcacactctgaagccatggcgcaagctctatgttggcacctttcagccacaaccggagtagctgggattcagggcaccaa

SEQ ID NO: 752779 - DNA, 566 bp, Homo sapiens
cccatcaacaccagataaaccaagctgaccaaaataatgccttgggggctctgaaaattaaagtgtatcatataaagcgcaacacataaaggtaggtcaaggccgggcgcggtggctcacgcctgtaatcccagaactttgggaggctgaggcgggtggatcacctgaggtcaggagttccagaccagcctggccaacctggtgaaaccccatctctacttctctactgaaaatacaaaaattagctgggygtggtggtgggaggctgaggcaggagaatcacttgaacctggaggcagaggttgcagtgagccgagatcgtgccattgcactccagactgggcaacagcacaagactctctgtctcaaaaaaaaaaaagtaagtcaagatccacgtgctaaacctaaacggggtgatttcctgctaaaataaaaagatttaaataggatccagagtctcctaacatcatagacaatatgtttaggatacaacaaaaaatcacccgtcataccaagaaccaagaaaattgtaacctgaatgagcaaagacaatcagttgacaccaa

SEQ ID NO: 752780 - DNA, 633 bp, Homo sapiens
aatccattacactgtacacttagcacttgtgcgctttggggatgtattttatacctcaatttattttattttatttattaatcttttttggagacacagtctcactctgtcacttaggctggagtgcagtagcaggatctcagctcgctgcagcctctgccgcccgagttcaagccatcttcctgactcagcctccccattagctaggattacaagtgtgcaccaccatacctggctaatttctgtatttttagtagagacagggtttcaccatgttgcccaggctgatctcaaactcctgacctcaagtgatctagccgcctcagcctcccaaagtgctgggattacaggcatgagccrctgtacctggcctgtacctcaatttagaaaaactaaaaaatgaatgtgttgaattcctactacatgacaggcattattccaggcacagcagtaaaatcagagtccctgctcctgtggaacttacagtctagggaaagaagacatttcctacactaatccactagtaaatggaaatgccgagagtctgggaataacacaaagacagagccaacgggatttgctgacggatttgatagaagattttcaaaagaagagcagatttttactttgggc

SEQ ID NO: 752781 - DNA, 614 bp, Homo sapiens
atggttttgttttaaaagctagcttatttattaaagattttactctcctaggaccttgtctttctttttgagcaaaagtttttctctttcttttcatttgactgaattgttttcacctgattttttttttttttttttgactaaaatagttactgcaacagagggtactctcttggtttttaagaaatttatgtttaatttggctgaaagaaaaataaaagcgtctccctctagcaccaccagaccttttctctctgtaccttaagtgaggtaaaatttgctatttgattttcacaaactgagttgtttaatgtgcaaatttagggctatttagctgacaactgcctagggttgtgaaagaggttatcaagaatctgaaagtctaagctagagaaaaaaaaagggaggtgactttataaatctataaaaygtacttccgtcagcatgcctaatacatctttatatgtatttatgtgttgtatacaaaatatttcactactaaaaatatataaaagagctctaactggtttcaagaaaaataaaagcacctaaatcagatactaaaaaagactagtcacatgcttttttcatgtttatgcaacaagtaaaatctt

SEQ ID NO: 752782 - DNA, 550 bp, Homo sapiens
agtggactaaaaccagaaatcaataacaagaggaattttggaaactatacaaacacatagaaattaaacaatatgctcctgaatgaccagtgggtccataaagaaattatgaaggaaattcaattttttttttttttgagacrgagtctcactctgtcgcccaggctggagtgcagtggcctgacctcggcttactgcaagctccacctcccgggttcatgccattctcctgcctcagcctcccaagtagctgggactacaggcgcccaccaccacgcccagctaattttttgtatttttagtagagatggggtttcactgtgttagccaggatggtcttgatctcctgacctcgtgatctgcctgccttggcctcccaaagtgctgggattacaggcgtgaaccaccacgcccggccaaaaattttcttgaaacaaatgataatggaaacacaacataccaaatcctctcaaatacagcaaaagcagtactaagaggaaagattatagcaataaatgcttacatcaaagaagtagaaaaccttcaaata

SEQ ID NO: 752783 - DNA, 550 bp, Homo sapiens
agtggactaaaaccagaaatcaataacaagaggaattttggaaactatacaaacacatagaaattaaacaatatgctcctgaatgaccagtgggtccataaagaaattatgaaggaaattcaattttttttttttttgagacggagtctcactctgtcgcccaggctggagtgcagtggcctgacctcggcttactgcaagctccacctcccrggttcatgccattctcctgcctcagcctcccaagtagctgggactacaggcgcccaccaccacgcccagctaattttttgtatttttagtagagatggggtttcactgtgttagccaggatggtcttgatctcctgacctcgtgatctgcctgccttggcctcccaaagtgctgggattacaggcgtgaaccaccacgcccggccaaaaattttcttgaaacaaatgataatggaaacacaacataccaaatcctctcaaatacagcaaaagcagtactaagaggaaagattatagcaataaatgcttacatcaaagaagtagaaaaccttcaaata

SEQ ID NO: 752784 - DNA, 550 bp, Homo sapiens
agtggactaaaaccagaaatcaataacaagaggaattttggaaactatacaaacacatagaaattaaacaatatgctcctgaatgaccagtgggtccataaagaaattatgaaggaaattcaattttttttttttttgagacggagtctcactctgtcgcccaggctggagtgcagtggcctgacctcggcttactgcaagctccacctcccgggttcatgccattctcctgcctcagcctcccaagtagctgggactacaggcgcccaccaccacgcccagctaattttttgtatttttagtagagatggggtttcactgtgttagccaggatggtcttgatctcctgacctcgtgatctgcctgccttggcctcccaaagtgctgggattacaggcrtgaaccaccacgcccggccaaaaattttcttgaaacaaatgataatggaaacacaacataccaaatcctctcaaatacagcaaaagcagtactaagaggaaagattatagcaataaatgcttacatcaaagaagtagaaaaccttcaaata

SEQ ID NO: 752785 - DNA, 611 bp, Homo sapiens
ccaaaagtaaatctatactaatatcagacaaagtagatgttaagaaaaaagtattactggaggtaagtgaggacatttattgtttaagggactaatttaaaaaatatgataatactagagagatcatggcaggtgggaggcaggattggattgcagctacaactcggatggacagagaagcgtgtggaggcttgcattgtgaattttagctccagattgactgcaagaaaaaaccagcaatccagagaggacccacagaccctctgaaggaagcagactgctcctgcaggacccaggagacacctcaaatactgtgtaggtatccacggctgagagacccatggacgatttacatcacaggactctgtgtagacaacccccagtaccagcccgaagctaggtagacttgctgggtggctagacccagaggagagacrtcaatcactgcagtttgggtcacaggaagccacatccttaggaaaagggagagagtactgtatcaagggaataccccatgggacaaaataatctgaacaacagcctcagccctagaccttccctctgatagagcctacccaaatgagaaggatccagaaaaccaactctggtga

SEQ ID NO: 752786 - DNA, 505 bp, Homo sapiens
cattttcatcatactaaaagaaaacttcctgcccattaagtagtcactcccccttccccactctcagagcccctgacaagcagcattctgctctctatctctatggatttacctattctggatatttcatataaatggactaatacaatatgtgacctttggtgtctggcttctgagattcatccatgttgtagcatgtatcagtattttgatcacttttatagcttaacaatatttcattgtatggatacaaccaattttgtttattcatttatcagttgatggacacttgggttgttcccatcttttggsttttctgaataatgctgctacaaacttttctgtacaaggatatatttaaatgtctgagcgcttttaagaaaaggagcttctgagttgtatgttagctctatctttaacatttaatgaagcataaaacttttccaaagtggctgcactattttacatccataccaggaaagtataagggttctaatttctctat

SEQ ID NO: 752787 - DNA, 602 bp, Homo sapiens
agattaatttgattacttctctacaacagcaaaattccataatcaaataatgttgcttgaggtcttctcttgcttcggagttggataatctaaattatgtaacctctagttgattttcacttcatcacgtatcaaggatcatctctgcagatagaaagaaaattttctgttgagctgcatgttacctcattgagaagggcaaagaattatagatggaggcactttgttgrattaagcttcttgataacaggaatactctagaatcaatgagacatccagtatggttaccacacaaatagaaagggggagctctgtgaaatcaggaggactttggtttcaaccattgcttggcaactagctttttgtgtgactatgagaaagacatttgctgtctttgagcaaattggtttaagcaaattggtggaggctgtcagataaatacattgtttatagctgagtgacaggttctttcttgaagggagatccagaaaacacacccccatagtagccataagggcaatttttattgtattataaaaagaattatattataaaacttaaagtttgcaataacctgctattgcctacatagtaagcctaga

SEQ ID NO: 752788 - DNA, 614 bp, Homo sapiens
ttaggtgaagaataggagcgtgggatttacaatctgatttttaaatagatattaatatttataaaattgtgtaaatttatagaattagaaatacagtagaaatattatctaatttatagaactagaaatcaaaatacatctgcagataagttttttttttttttttttttttgagacagagtcttgccctgtcgcctaggctggaatgcaatggcacaatctcagcttactgcagcctccgcctcctgggttcaagtgattctcctgcctcagcctccgaatagctgagactacagttgcacgccaccacgcccagctagtttttgtatttttagtagaggcggggtttcgtcattttggccacgctagtcttgaactcctggcgtgargtgatccactcaccttggcctcccaaagtgctgggattataagcatgagccaccactcctggccgtaagttttttaaaacttacggatttgtaaccagcaatttatttcctaggttcttctcatggctctgtatagctaaaggggaaaaaaaatatagccaaatactttgagagtttgctcaaccaaatttccctctaaatggaacaaatacataccatcttcat

SEQ ID NO: 752789 - DNA, 610 bp, Homo sapiens
tccacccactggccttcaggtagaaattctcagttggttaaagtaatgagctcatcctggatgtctagtcaccaggcatctgtctacatcagccagagggcatggaacccgcagcccagagacatgagcaacaacacacagccagaacaggctgagggcttttcacccagttcctaaggaaggtgaaaacaaagcacctcacctaggaaaggaaggctgctcctgggagaaaagactaggcccacctcttcagccccctcattcaattccaatcaagacacaaggaaaaacaggctgggsgagttgggaggctgaggtgcgcagatcacttgaggccaggagtttgggaccagcctggacaacatggtaaaacctcctctccactaaaaatacaaaaattagccgggcatggtggtgcatgcctgtaatcccagctacttgagaggtggaggttgcagtgagccgagattgcgccactgcactccagcctgaaagagcaagattgtctccaaaaaaaaaaaaaaaagatacaaggaaaaacgaaaagacaaaaacaaaagccaagttagaaaacagaaaggaggaaagaggaagtatggtttaaacgctg

SEQ ID NO: 752790 - DNA, 529 bp, Homo sapiens
gaactccctggtgtcccgccacctgctgtcttacttggtggtggatgaagctcattgtgtttcccaatgggggcatgactttcgtcctgactacttgcgtctgggtgccctgcgctcccgcctgggacatgccccttgtgtggctctgaccgccacagccaccccacaggtccaagaggacgtgtttgctgccctgcacctgaagaaaccagttgccatcttcaagactccctgcttccgggccaacctcttctatgatgtgcaattcaaggaactgatttctgatccctatgggaacctgaaggacttctgccttaaggctcttggacaggaggctgataaaggggtgaggcattgaggtggaggccaagcagctgttagagcagtggggtgcgatgtgatggagatggagattrgtctaagacctttggtttttctagctttctcagccaggcttcctaaaacttgtgcacaaaaagagttgtctctttggtttcctggcattgtcctccttaccagggtttccttg

SEQ ID NO: 752791 - DNA, 647 bp, Homo sapiens
acacaagaaaggaaatgtgatcacaggaaatataaaaatgcaatcacttcggtttagctgtgaactctgttgacatagtcataataaggaaaatatggatttaataagaaattgtgttgtaaacatattgggaagttgggggtacagaatctgtgtgtatttgtgtgtattggtggggatgagttacctgcccaaagcagaaactcaatagatgatgtctcagatatcagtgtctggtttttgtttttttggggttttttttttgttttgttttgttttgttttgtttttcagacagtctttgtcgtscaggctggagtgcagtggtgcaatctcagctcactgcattctccatctcccaggttcaagcaattttcatgcctcagccccccaagtaactgggattacaggcgcccaccaccacgcctggctaatttttgtatttttagtagagacaggtttcaccacattggccaggctggtctcgaactcctgacctcaagtgatccacctacctcagcctcccaaagttctgggattacaggcataagccaccatgcccgggctctttttttccttttctgtattaaataattcacagtattttaaaaggatatgttggcaaatagacatgtacacaaaaaaggc

SEQ ID NO: 752792 - DNA, 647 bp, Homo sapiens
acacaagaaaggaaatgtgatcacaggaaatataaaaatgcaatcacttcggtttagctgtgaactctgttgacatagtcataataaggaaaatatggatttaataagaaattgtgttgtaaacatattgggaagttgggggtacagaatctgtgtgtatttgtgtgtattggtggggatgagttacctgcccaaagcagaaactcaatagatgatgtctcagatatcagtgtctggtttttgtttttttggggttttttttttgttttgttttgttttgttttgtttttcagacagtctttgtcgtgcaggctggagtgcagtggtgcaatctcagctcactgcattctccayctcccaggttcaagcaattttcatgcctcagccccccaagtaactgggattacaggcgcccaccaccacgcctggctaatttttgtatttttagtagagacaggtttcaccacattggccaggctggtctcgaactcctgacctcaagtgatccacctacctcagcctcccaaagttctgggattacaggcataagccaccatgcccgggctctttttttccttttctgtattaaataattcacagtattttaaaaggatatgttggcaaatagacatgtacacaaaaaaggc

SEQ ID NO: 752793 - DNA, 635 bp, Homo sapiens
ttgaacccagaaatcacacagcagcatttcaggagacatggatgaaaatacagaacgaaggtcggaagtgctggatccctaaggacaggcagtcctctgtatcatataatttcaaagaaatgagtcccagatggggaaggaggggcccagccacacctcagttagcaatccatggcatctggcccgaagggaaggaggtatgttggggcttgcacggctgaygggagggtgtaccagacacgcggtggctccctgtgggctgtggaaccacaggagtgaggtggggcttctgggagtctcagcttcaggttacttggatcaactgccatcaagaaggcccctctggcagtgcaatggagccaaggaggggtcagagggagaataatggtcattgttcccctttgcatgagatcacaacttccaacaactaccagcgcttctaccagcagtgttcagcttatgatgtagtgaggccttccttggaaggtggcaggacaaagccaaagcaggcttggatttccttcccttgcgacaattgaagagtgactttcatggcctgcctgcctttctgactcctgctcagatccggttatcacccagcaggcccctagaacccccagaaccctagacctcag

SEQ ID NO: 752794 - DNA, 612 bp, Homo sapiens
tgtttgtttgcttgagacggaatctcactctgtcgctcaggctggagtgcggtggcgtgatctcagctcactgcaacctctgcctcctgggttcaagcaattctcctgcttcagcctcccgagtagctgggactacaggcgtgcgccaccacacccggctaatttttttgtatttttagtagagacaggtttcaccatgttggtcaggctggtcttgaactcctgacttcaaatgatctgcctgcctcagcctcccaaagtgctgggattacaggcaggagtcaccacgcccatccctattgtagcttttaatcaggcatgatgtacagacagtgtggcacgcaggtcttcagagtagagtgcagcccttttgaggagccgagagcagcctgccctgtggcggaagcagagggcacagcttggggtgggcatgaagaggctggcgasatgattgtggggaccacttaggatgctgctgcagtgaccacaggtaagcattgatggtggcatggtccaggatggcacagtggcgggaacagagaggtggtgaccaagtcagacgtcctctaaacctgaaaccagcctgatggctgccccttccatggcccccac

SEQ ID NO: 752795 - DNA, 631 bp, Homo sapiens
cccccaagaaaaaataatcttgttgtttatctgaaattcaaatgtaactaggcatcctgcattttatctggcaaccctacagctagagaggctgttgtcaccacacaataggaattctcccatcagaccctggccctttggcttcagcctcaattccaactaacatgcagatgcttgtggaaggaaggagtgggccagttagttcctatcagccctcagcctcccaactgggagaaagcctgccaggaagatgggagaggagggagatactcagggtacagtgtggagatggggyggggagcaaatgttctcatgtggaatgttccctgagctgccaagggagaaaggggcagaccaactccctcccgcttctgttcctccagagaccctcctgggtcctccgccaagcttggcaggatgctctatgtggcagcaatggggcaccaccaggtctccagagacgcgggtgggcaggtctgagttgaatgcgctgggtagagcgccctgggtgttgaagtgggtctctggcgccccctggtggtgaagggggatctgagtggttgcccggccccaacctgacccgttagatgaactggaccggagcttcacgagtcagatgttgtcatcacag

SEQ ID NO: 752796 - DNA, 685 bp, Homo sapiens
aaaaaaaaaaaaaaaaaaaaaaaggtggatccttccttcctctcatcttttgcttaagttacagccaatactggaatacaatttcaccagcatctgcatagaatcaactataagtagaatcgctgcaccatagggcacttgcatttgtaattttgagatttccaaatttttctccacaaaggttgtgccgatttatattgccaccaataatgggagaccaccattcttttccaacactctgaaacatgacaaaatttcagtgccactttgaggaaataagatctagtgttcaatagatcagtgggatgactatagataacattaattgattgtacatttccaaatagctagaagagaattgttgggagaaaagctgagtgttgggagagaagctcaggcaggacttgcatgtctgctagacttgctggctccttgcttctagcactcccattatctcaagcagcygtatgtttctcgttcacttgatacactatttcctttcaacctccacatcctcaccacctctttgagcaccaataaatagcctgggctcccagtgcccaggggccttcacagcctccacactcgcgatggtcccctggtcccactttctctctcaaactgtctttttctcattcctttgactctgccggacttcatcacccccactacctggtgttggatc

SEQ ID NO: 752797 - DNA, 643 bp, Homo sapiens
cctattcaggaggctgaggcaggaggagcacttgtgcctggggttaaagacaagcttgggcaacacagtgagacctcccatctcaaaaaataaaataaggctaggtgcggtggctcacacctgtaatcccactgctttgggaggccgaggtgggtggatcacgaggtcagragatcaagactatcctggctaacacggtgaaaccccatctctactaaaatacaaaaaaattagccaggtgtggtggtatgtgcctgtagtcccagctactcgagaggctgaggcaggggaatcccttgaactctggaggtggaggttacagtgagccgagattgcaccactgcactccagcctggagacagagcgagactgtgtctcaaaaaataaaataaaataaaataaaaaggtaacataaaataaaaattaaaaagatatttacaatttgtaaaatatttcattcgtttttatctgggaagaaataagatataattttctaaggcttctcaggcctgtgcttcataggtggaagcattacatgttctggtttgccagggatggttgatacgtttatgcccacagtcctgccatatttgtcgataaagcctccttttcatctcacaagtgtctcctttggtagataaat

SEQ ID NO: 752798 - DNA, 656 bp, Homo sapiens
ggctgaggcaggaggagcacttgtgcctggggttaaagacaagcttgggcaacacagtgagacctcccatctcaaaaaataaaataaggctaggtgcggtggctcacacctgtaatcccactgctttgggaggccgaggtgggtggatcacgaggtcagaagatcaagactatcctggctaacacggtgaaaccccatctctmctaaaatacaaaaaaattagccaggtgtggtggtatgtgcctgtagtcccagctactcgagaggctgaggcaggggaatcccttgaactctggaggtggaggttacagtgagccgagattgcaccactgcactccagcctggagacagagcgagactgtgtctcaaaaaataaaataaaataaaataaaaaggtaacataaaataaaaattaaaaagatatttacaatttgtaaaatatttcattcgtttttatctgggaagaaataagatataattttctaaggcttctcaggcctgtgcttcataggtggaagcattacatgttctggtttgccagggatggttgatacgtttatgcccacagtcctgccatatttgtcgataaagcctccttttcatctcacaagtgtctcctttggtagataaattatattattcctgctttcgtagac

SEQ ID NO: 752799 - DNA, 620 bp, Homo sapiens
ttggtagataaattatattattcctgctttcgtagacaatcatgaatttcaataaactatttcttggctaggagcagtggatcattcctatcatctcagcactttgggagatggaggcaggtggatcacttgaggtcaggagttcaagaccagcctggccaatatggtgaaaccccatctctrctgaaaaaaaaaaaaattaccaaaagttagctgggcgtggttgtgcacacctgtaatctcagtttcttgggaggctgaggcaggagaattgcttgaacctggaggtagacattgcagtgagccgagattgcatcattgcactccagcctgcggtacagggcaagactccatctcaaaaaaaataaataaataagtaaaaataaaaaagaaactacttctcgtatggattaaataaggcacagtttgatggcgtatcttggggacatttttgttgttcaaaacacagaactgctcattttcgtgaactgggttcatcaatttgaaatttaggtgacaaagtaaactgcttcttgaaaaggcttgatccttgttgaaaatcagcctgatttaggaaggagtggaacttttggctgagttttaccgggaacataacttgt

SEQ ID NO: 752800 - DNA, 653 bp, Homo sapiens
cgataaagcctccttttcatctcacaagtgtctcctttggtagataaattatattattcctgctttcgtagacaatcatgaatttcaataaactatttcttggctaggagcagtggatcattcctatcatctcagcactttgggagatggaggcaggtggatcacttgaggtcaggagttcaagaccagcctggccaatatggtgaaaccccatctctactgaaaaaaaaaaaaattaccaaaagttagctgggcgtggttgtgcacacctgtaatctcagtttcttgggaggctgaggcaggagaattgcttgaacctggaggtagacattgcagtgagccgagattgcrtcattgcactccagcctgcggtacagggcaagactccatctcaaaaaaaataaataaataagtaaaaataaaaaagaaactacttctcgtatggattaaataaggcacagtttgatggcgtatcttggggacatttttgttgttcaaaacacagaactgctcattttcgtgaactgggttcatcaatttgaaatttaggtgacaaagtaaactgcttcttgaaaaggcttgatccttgttgaaaatcagcctgatttaggaaggagtggaacttttggctgagttttaccgggaacataact

SEQ ID NO: 752801 - DNA, 627 bp, Homo sapiens
aatttttcaaaagacatggtatacattttcaactgtgttctaatggtcatgagaataatttgtgatgagtacattaattttttgcaaaatgataactgaatgtaaaggactagaacgcagcaatcttaaaagtcaaggaccatgaaacatggggaagaatttaactttttaaaacaatcaagttcttggccaggtgcagtggcttatacctgtaaccccagcaatgaggtgggaagactgtttgagcccaagagctagagaccagcctggggaacgtagggagaccccatctcaaaacaaaacaagacaaaacaacaacaacaaaaaacccaaaaaacagcagacgccaaaacaattagctggacatgaaagcacatgcctgtggcctcagctactctggaggctgaggtgggaggattgcttgagcctgggaggtcaaggctgcagtgagctgtgatagaaccactgsactccagcctaggtgacaatgagatactgtctctaataataataacaacattgaattaatttctcatatatagaaatagcaaaaaagttattactttaataaagcagtaaacacatatgttaactagattcccatgtttatagaggccattttaggag

SEQ ID NO: 752802 - DNA, 530 bp, Homo sapiens
gtcgagaccagcctggccaacatggtgaaaccccgattctactaaaaatacaaaaaaaattagctgagcatggtgacaggcacctgtaatccaagttacttgggaggctgaggcagcacaatcgcttgaaccccagaggcggaggttgcagtgagctgagattgcgccactgcactccagcctggtgacagagcaagactctgtctcaaaataaataaataaataaagataccaagcatattagattagggctcaccctaatgaycttttaattacctctttaaaggctccatctccaaaccagtcacatttggggtactggaggttaagacatatacattttaggctggcgttgggggtgcacaattcagtccctaacgcacactaccaaccagctctttggagaggggcaggatgctcaggctggtggtaggaacttccgtggacttcctttgacgctgagtgcatgtaggttaggtcagattgacccacagagtccttcggtgaggcaggatggatgcaaagtggcc

SEQ ID NO: 752803 - DNA, 594 bp, Homo sapiens
cagtaataggattgctcggtcaagtggaatttctttcttcctttttaaatttatttttaatttttagtttactttaagttctgggatacacgtgcagaatgtgcaggtttgttacattggtatacatgtggtatggtggtttgctgcacctgtcaagttgtcatctaggttttaagccccacgtgcattaggtgtttgtcctaatgctctcccttccctgattttaggtatttgaggaatcgccacactgttttccatgacagttgaattaatttacactcctcccaacagtgtgtaagcattactttgactccacaaccttaccagcatgtgttatgtttttagtaatagccaataattttaatktttaaaaaagtaataagtcgctagtcaaggaaatgcacatggagattgtgatgagatacagttccatactattacactggcaacaattaagaattctgtctgaaccgagtgttggaaggcatgtggataaattggatcgtttatacactattaatgttagggaagggttgtaaaatggtacaatcgcttgggaaaataatttgataccatcttgtaaagttaaacatt

SEQ ID NO: 752804 - DNA, 604 bp, Homo sapiens
atttaattagatccatttgtcaattttggctttttttgcaattgcttttggtgttttagtcatgaagtctttacacatgcctatgtcctgaatggtattgcctaggttttcttctagggtttttatggttttaggttttagatttaagtttttcatccatcctgagttaatttttgtataaggtgtaaggaaggggtccagtttctgttttctgcatatggctagccagctttcccagcaccatttattaaacaggaaatcatttcttcattacttgtttttgtcaggtttgtcgatgattgtagatgtatggtgttatttctgaggcctctgttctgttcctttggcttatatatctsttttgttaccagtaccatgctgttttggttactgcagccttgtagtatagtttaaagtcaggtggcatgatgcctccagctttgctctttttgcttaggatgtctttgttatacaggctcttttttggttccatatgaaatgtgaagtagtttttttctagttctgtgaagaaagtcaatggtagcttgatgggaatagcattgaatctgtaagttactttgggcagcaaggccattttcatgat

SEQ ID NO: 752805 - DNA, 584 bp, Homo sapiens
tagttgaaatcctcaaatgcaacttgcagatacccaggcccttcctggcccccaatccacataattggctcctccagttctaccacccaaacccccaaatttatggcattttttcctcctatttcatggtttaaaatggctccaatctcttcttttacaaagttattccaacctgggaaaagttaatttccccaaaccttataatgcttggcttagagtagagttcaggggaaggcaacgcagaagcctgacatgccggaaaaagagtaaaagggttttttgtttgttttgtttgtttttttacsagttgggcttttggtttctctctacctgtgcaaactggtaaaagggatcatgaggatcactgtttatattctctgtgaagttttaattggtgaaaaaggatatgtgaagttggtcttaagctgtagccagtctggtgtgctttgcatgtctttctgtatggttctgtcaaaagaaagggtaccttaggttaggatgcaggcccaggaccccataagcctgctgttcaagccagcccaacaaaatggtcagtaacaaactttgttacaggcccccatctt

SEQ ID NO: 752806 - DNA, 558 bp, Homo sapiens
atatatgtacacacataaagagcttatagcttcaattctaaaaatttgtatttctgtctttatgatgtttcagtcataaacacagaaatacataatcactggtttatgtaaaaaactgactcttgtcctttcaccatctttatattttttaccagaaatgtttttcggaagcatgtgacaaattgactttacctgctctccccaattggccatgatgtataatcttatggaatacatgaattaaatttcagacaagggactgaagagagaccagctggccatctgcgtgtctccaaagcccacctaagtgaayaaaatatctagactctttccaactggctttatcagcctctggtggttgcttttgggattatctaatcccccaagagaccctcacagggaagaggacttaaacccaaatgattatagggaattgaggaactagagtaggtagagaaagacctggcaaaggtggatagagtggtggaggaggtagaagtaggtgttgaaaagggccagatcaacggactcagagggactcgtggaaaggtggcagat

SEQ ID NO: 752807 - DNA, 564 bp, Homo sapiens
gcaagatcacaagatattagacaatgattcaccatgatctttactcaccagtgataataatggcatagaacagctgctatgtattcatagaaacatactgcaattacctccttttgttcaggtagaatgtgttgtttggcacaattagtgtttcattcactgattgatcaagattaacaggatttttagtgtcatatagtttatatttttcctctttattatggcctgtctttgggagaaattacttaacagttgtttgtattctgcaatggtcaatatatgcaaaaactgagtgaaatcctactrtgtgtaaagctcttgccttcaaggaaattttctgtcattaaaatgtgccacactagtaaataggaagcaaaataaaatgtaacattactaatttagagatgattagctatatttcttctagcagataacaaaatggtgctgtaatctacattatagatcttaagaatgtgactccaatcataaaaatatgaaaacagtcactttttttctttctagagtttaatgcaatgtgttctgttcaaaagaacacaatcagaa

SEQ ID NO: 752808 - DNA, 649 bp, Homo sapiens
cctagcattatttaactgtctgtgctaggagaggcaagctcgcctctaggagtcataggctcttggctccctactcaaacatgactacaaagtgtctctactcactctgttttgttatgaaagacagaaaatagtaaaaggcaggatgtaaggtatgagccaatgtaggaaaacagttttgggggatgaaattcattagtatggacacttgacatgaactgaagcatgagttataatagagctttagcaacttaggaagaaagggtacaggctaagaaagacagcttcctaaaagtttgcctctggatggaaagtagaagcttaaaatattrggtgcagtcataagagatgtggtcaatatagcctagtttggaaaactcagaagatttattgcattaggtgagctgcatcaaggaaagtccaagtagcgggtaacattagcctcagatgtgcagctctggacagatttcaaattctcagcacattcaaagtgagatagtagccacgaactggagggatcatagggagataggatccagctagaagaagctatggagggtgtctaactccagcaagtggactgcagaagagaaaaaaagcttcagtactagaggaaagcttaggtaccacattccaaaatcaagccaaa

SEQ ID NO: 752809 - DNA, 517 bp, Homo sapiens
aattcctactcatccttcagaactcagttcaaaactatttcctcatcatttccctacctgcctaagctacatgctctcatagtaccttaccctttaccctctgtattagttcattcttgcaccgctagaaagaactacccgaggctgggtaatttataaagaaaagaagtttaattggctcatggtttcacagcctgtacaggaagcatggctagggargcctcaggaaacctgcagtcatggcagaacatgaagagaaagcaagcacaacttccatggccagagcaggaggaacagagaaaagggggtggtgctacacactttcaaacaactagatcttgtgataactcactcactatcacgagaatagcaccaaaatggaaattggcccccatgatccaatcatctcccaccaggtccctcctccaacattaaggattacaatgaaatttacgtgagatttgggcaaggacccagacccaaagaatgttgccctcactacactactatgcttata

SEQ ID NO: 752810 - DNA, 613 bp, Homo sapiens
taggtagaactcaatgattaacttagccaaggccacactcctggagctgaatagggatggattaactttccctgaacctcatgatggaaattagcaggaagggagaacagaggaaggtcctgaggagctactcattgttatccacttcatgtcttccttcaacatctttttcatctcccctgcccactatgcctattttaatgatgaagaatgttaagctgggctttgagctkggcatgtgaaagcttgttctttgttctgttgaagaaaaactctactgccaggcatggtcgtcacgcctgtaatcccaacactttgggaggccaaggcaggaggatcacttgagtccaggagtttgagaacagcctgggcaacatggtgaaaccccgtctttacaaaaaaatacaaagattatctgcgatgctggtgcatgcctgtgatcccagctactggagaagctgaggtgggaggatcgcttgaaccagggaggctgaggcttcagtgagccatgatggtgccactgcattccagcctggacgatagagtgagaccctgtcctcttcccccagaaaagaaaacctccaaagaattgttcctttgggggccctgcctc

SEQ ID NO: 752811 - DNA, 613 bp, Homo sapiens
taggtagaactcaatgattaacttagccaaggccacactcctggagctgaatagggatggattaactttccctgaacctcatgatggaaattagcaggaagggagaacagaggaaggtcctgaggagctactcattgttatccacttcatgtcttccttcaacatctttttcatctcccctgcccactatgcctattttaatgatgaagaatgttaagctgggctttgagcttggcatgtgaaagcttgttctttgttctgttgaagaaaaactctactgccaggcatggtcgtcacgcctgtaatcccaacactytgggaggccaaggcaggaggatcacttgagtccaggagtttgagaacagcctgggcaacatggtgaaaccccgtctttacaaaaaaatacaaagattatctgcgatgctggtgcatgcctgtgatcccagctactggagaagctgaggtgggaggatcgcttgaaccagggaggctgaggcttcagtgagccatgatggtgccactgcattccagcctggacgatagagtgagaccctgtcctcttcccccagaaaagaaaacctccaaagaattgttcctttgggggccctgcctc

SEQ ID NO: 752812 - DNA, 635 bp, Homo sapiens
ttccaccggggagagaagaaaatatctctctcttctctctctctctctctctctctctatatatatatgtatacacacacacacacaaatttataaaaatatatattatgtaatatatatttatatattatatatttatattatatataaatatacaaaacatataactttttatatatataaaaaattttttttggtaaaagcaggttcgaagagttttgttttaggtgacctttaaggtctccactaaatctcattggttttataattggagtgtgggcatttctgcttcatggttatatagtgttggagaagtcggtcagcattctatcttcactccttcatctgtaaaatgggcatgaggagacaaacaccactcacttygcagagttatcatgtgaacgtgccctaagaagagcaaaggattctgcaaaagcatggtattagtgaattggtgtcatcatcaactatttcttccatggcatctccgagttgcattctgggaagtgctggagatatagagaaccaccagacacagagtctggtgggaaataaagaagcatgggttgacagtctcctgggatataggtaaatgacctagcagtttcaatggggaaatgatgagtgcccctagg

SEQ ID NO: 752813 - DNA, 597 bp, Homo sapiens
gccagaggctgaaagctatgtctgctccacatgacagcaaggtccctgatgaaaaggggaaactattccactctccgctcgcccctctcccgctccctggacagtgggtggcactttgtgttgcactgagtaccttgtaaactcctccacgtcccatctgttcaccccaagtcattcaacagagcacaaaatagagaagtaataagaacgtattttgaaatggaattttgatcctaacagggtcctggctgggctgccctgcacccacagccctgggaaggaaagagacaacatcccactcttccctggatcccccagtgccacacgcraagtgtgggacatggtagacatgattagctaataactgggctggacgcagtggctcatgcctgtaatcccagcactttgagaggttgaggagggcagatcacttgaggtcaggagttcgagcccagcctggccaacacggtgaactccagcctctcttttatttttatttttatttttattttttttccgtgaaaccctatctctactaaaaatacaacagagcaagactgcgtcttaaaaaaaaaagtctttaaaagatagtaataa

SEQ ID NO: 752814 - DNA, 541 bp, Homo sapiens
agtttctgattggccaggccttggtcatgtgcccacaggtgagtggaaggttctgattggtcaggccttggttgtgtgcccacgggtgggtggaaggttttgattggccaggctttggtcatgtgcccatagtggccaggggttatgaagggtaggagagcaggcagggtcagccctttcaaactctgtggattagaatggggtagaaggggatggtgctcttcaatggagaaccaccgtgcttttatcagatgaagggatgaatgtctaagtaagagatgtggtacccaccagaggactttctgtaaggttgtttccagctstttcctttgcagctgcactctgtgctgacccctgatgtttgtggaggaggttgaggcctcctctgggagccttcctgcttttctagcctccgctcaggaattgcaccttcttactcccacttgaagtgccccctaccctcatcacgtccccacctccaatccctctatttacctggagaaacctgctctacatcctcctctgcctaaaaccctctact

SEQ ID NO: 752815 - DNA, 629 bp, Homo sapiens
gctggtggagaatattgtaagggctctgtgatgctagccatttctcgttacaattactcctgctgttattgtcgctgtctctcaactcaaggtggagggtgatactaggtcactacagcaggagatttgcccttgtggcagcccaggctgaaagtccataccctgcatttgctttcttcttagaatgctgtcctgccgatyttcacttgctgacatcctccttgtgccaatgcctggtaggacaggctttaagaagcttttcagagggagagcccaacataagagccttcttctccatgagtctagcctccctttgagagctggaactggatttccttcatccctgcctccccagtgcctggcactgggtaagcactcagaataaatttgttggggaatgaaggagctgtgtctgaaagtttgcatgggtctaagacagtgtgttcactcagctccatgactgcatcaaagcatttctaataccagatgacttacagtgtggaagaaagagcagctaggaaacaggtctgtatccgtggccaggaggcatgagcctcagaaatgttggcaggatgagcagccttagagaatgatggcagcgccccggggaaatgacaggaagcacaagt

SEQ ID NO: 752816 - DNA, 496 bp, Homo sapiens
gggggcacagggttcatactgttgatgaaaaaagccaaactctgaaatacttgaagaagtttattctgagccaagtgtgaggaccatggcccgtgacacagcctcagaaggtcctgagaacatgtgcccaagatgtttgggttatactttgactttatacattttagggagacagaagctacagggaaaacataaatcaatacgtgtgagttatatgttagcttggccaagaaaggcaggtcatcttgaagtgggtgctttcaggtcacaggcggattcaaagatttcctgattggcaattggttgaaagtgttaagctttgcctaaagagtttgagtcagcagaagaaatgcttggsgttaagataacgggggttgtggaggccaggtttcttcttatgtagacgaagcctccaggtagcagacttcagagagaacagatggtaaatgtcttttatcagaccttaaaagctgtcagacttttagttaaatctctc

SEQ ID NO: 752817 - DNA, 574 bp, Homo sapiens
gagagatgaaaaggaaagatggagagagagacacacagagacagaggggcacacacacatacacagactgattttatcagggatcgaaacaccatagggagaatgttttaaagttaccctgtacgtaataacacacatttgatgggaagtgattctgtatgtcactgtaagatttattcagatcacagaaatgaaccagcacctcctcaatgatgaatcattaattacttaatttagtaacttaaatcattaatgacttaatttaattttaaatgtkttatccccaaaaataacgaaaatggatgttaaaaacttaactgactttaacaactaaattaaatgttaaagctggttatacatccgtgtcaagttcctcactgattcccacctccattcataggcacctcaaatggatgtgaaacatatttaatgaatgggtagcatacatttaaactatttgtaacatatatttgatagcaagtgattctataatacaggttgcatgtttcttgttacaaaataaatccacatgaaggctctgaaaaattctaaaaacaaagtttgtttatttaat

SEQ ID NO: 752818 - DNA, 645 bp, Homo sapiens
aagggatttagtggatatccctcggacttttcttttccagttgccccaatctgttttgtccctgtatcctatccctttctgagactcttggaatccttttgaatgatttgtctttaacactccttaaaacctattttcaaatgaagtcctcgcctcttacttcagttggaacatatgaagccaccagcctggggctccttcctgttcctactataagcatcattaacatgatctgtatccagacgcaatcctgaatactctatttgtaaccctaaaggtacctgctggatttgagcctgagctctccattttcgctcacacatatcatggttctcctcacttctagaacatttccccaagattacaaacaaactcctttatctcccgtattaagtcaccacacacacacacacacacacacacacacacacacacaacctgaacccacatcaccccacatccccctcaaacttccccagcatcyccctaaccaattcatagtaatccttctcaaaagagttatcaacttattcctgaattgttctcccatgcaatttggccctaaacactatcacaaagtactttcattacggaaaagtccaggaaaataatagaataaacgcctacgctggtcacttccaagga

SEQ ID NO: 752819 - DNA, 585 bp, Homo sapiens
accatatgtgaaggtggaaggcagtgatattgatgatcctgactctagtgtaggcctaggctactgagtatatttgtgtcttcattttttcacaaaaaattttaaaaagtaaaaaaataaatttaaaagtagaaaaaracttggatgatagactagggatataaagaaaaaaacatttttgtacaaccataccatgtatgctttaagctaagtgctattacaagagtcaaaaagttttcaaaaatctaaaagcttataaagtaaaaaaagttacagtaagctgaggttaatttattaaataaatacatttaaaaataaatttagtggggcctaagtgtacagtgtttataaagcctgcagtagtgtacagtaatggccttcacattcactcaccactcactcactaactcacccagagcaactcccacgtctgcaagctccattcatggtttcatggtcagtgccctatacaagtataccattttttatcttttatactgtatttttattgtaccatttccctgtttaaatttacttagatatataaatacttatgttgagttagtattcagtacttcctatagt

SEQ ID NO: 752820 - DNA, 518 bp, Homo sapiens
ctcaaaaaaaaaaaaaagaaaaaagaaaaagaaaaattgatatgttcagagaggagagaaaaatggacatatataaaatgctcagtttaaaccagagaagagagaaaatgagggaggattagaaacaacaacaaaaaacaagtactacagatgcaaaacagttacgaacttggtagattttaatctcactatatccttagttgttttaaatgcaaatggtctagatacagcaattaaattcagacactgtcagaatgggtttwaaaaaaagaagatccaaccatatggtgtctacaaaacccattttaaatatagagacagattgaaaataaagggacagagaatgatatgctaatactaatcaaaagaaagcaggagtagctagctatacattaattacagacagaacagatttcagagaaagaaaaattatcagtgatgaagaagaatgttacattaagataaagtggccaattcgtcaaggaggcataacatgtttaatgtatgtggacctgact

SEQ ID NO: 752821 - DNA, 548 bp, Homo sapiens
cggcagtcctcctcaggaatggctggcgaccgagaaccccgccgcgcaggcgccctggcctagccaatggggactcgcatcccgcgcgtccagcgaccaatcagaaacgctgagggaagatgtgctcaggcacagccaatcccagaggcctagagcccgctcgttagctgagggggtgggaaagggacgaccaaccgccacagcccgtgcgggagagggggttgggaagaagagggagggctgaagagaggagaacgcgcgcgagcggcgccggcggcagagaggcctagtctgtaaggcggtctctggcccgggkggggctgggaccggcgggctcccaggaaaactttgtacaattggaagtcagggctcctcccattctggaagccctgtccaaacccgcgcctgggggttgccgcgtgagtgtacgggggaaggccgggcctggcgggagaaaccaggacaggcgccttgagtcggcaaacggctcccaggactgtgctgagcccgcaggggacctgaggcaggccccggagaagccctcgtgc

SEQ ID NO: 752822 - DNA, 565 bp, Homo sapiens
cagtagttttctaatatctaattgccctcacataggctgaataaaatttcattacaatgactttttttttgagatggagtcttgccctgtcacccaggctggagtgcagtggtgtaatctcagctcacagcaacctccactttccgggttcaagcgattcgcctgcctcagcctcccaagtcactgggattacaggcatacgctaccatgcctagctaatttttgtatttttaatagagatggggcttcactatgatggccaggctggtcttgaattcctgacctcaggtgatctgcctgcctcgccctcccaaagtgctgggattacaggcatgagccaccatgcccggccattacgatgacttttaaaacatccaaaattatcacgaatatttcttcartaattttttttacctccaccccattccacacaaagatgtcttccccatcagcaatttcagtttcacacagtgtcagttcatcccctagaaagagatcaccagtgagaccattcatcatgaccatcagaaacaactgagctaaagaaagagctgagacaaatatt

SEQ ID NO: 752823 - DNA, 460 bp, Homo sapiens
tcagaccatcatcaaagaggggatgctgaccaaacagaacaattcattccagcgatcaaaaaggagatactttaagcttcgagggcgaacgctttactatgccaaaacggcaaaggtgaggccccatgcaggaaagcacacgcgaggacatcacaggagccgtcccaggggaggaactgggggtgctgagtccttgtgtgggaaaagcttcaattctcagatctgttattgccagtgagttttgtaacactccacgcygtcaggttttacttgtctcaaggcatgttttatttcttatcaaaattaatttctgttcattttccttttctttaatgtcatcggtaatggggaaaaggaaaaaagggtcacagagacagccgcgttacagctggatatctctctctcagaaaggcggagggaatcacggggctatgaatttcatcttcttattattaaataa

SEQ ID NO: 752824 - DNA, 596 bp, Homo sapiens
  misc_feature 26: n = A,T,C or G
ggcaaaaataagtgaagacagtctanatttagttgccagcttttatattgtttttgatgagaaagcattgtgtttttccctttttttaaacaaacttggaaaggccttcttattgtcaagatttccttataaataaacatttattgggcatttactatgtggcacccattgtaccaggaactkgggagacaagatagatggcctgcctcctcttgaaaattctgttgttttgaggaggcagattaaacgcctgcacacagacagacagacacacacacacacacacacacacacacacacgaggaacaggttgggatgagtgttatgatgaggaaacaggaagctaacatacagaatgcagccagcatatcctacccaaaaagtcctctttgaggaaggagagaatgtggaaaagtacattcaaggtaggggcataagtgtcacagacctcttgggagtctgccgacaacatgtccctgcctgcttacctgccagacagggcctcctcataagacttggatgcagaggctcttgagtggaattttaataacctatttacaatatcaaaacatggcaatgtatttcagaaacacaaa

SEQ ID NO: 752825 - DNA, 596 bp, Homo sapiens
agaaacacaaaataagtttcaagttccttgtaaacatcccgctctgtcctttggaaggtgcttctgggaacgagcctgcgcaagtttctctcctctacttgggagacatagagatctcagaagatgccacgctggcggagctgaagtctcaggtcagacttcttcctgcaccataacttagtggtaatgtggcttcttccagtgagatattaatatattcttctatctccttttccctcaattacagtctgttctgatatggcatttgtcatatrccatgttcagtggtaagtacccgcaggcaatacacgcccatggtgcagacggctcctcgtggcctcactggtccctcctctgacaggcatgctgtgcttttgtttcaatctatcctcagtgacttgcggcttttgttcatttttatttttttagggaaacatggtttcttggaacatttgtaaagcattcactttatccctttatttacattgtttgtgtaccattgtgacccatatgttaaatgttgttatgaaaagctgtgttaccagttttccaggaggttagaactccagcttttatgttaggatgctaaactagat

SEQ ID NO: 752826 - DNA, 583 bp, Homo sapiens
catagattcacattcagtggttaaaattacacacagtggatccttagtgttaacttcttttcatgaaacaactttagtacaacataagtgtctcttgtatctggtccaagactctgtgctgccatgttacacaaggattacagtacaaagtgtcatgtctatgagaggttcatgctatgtcctccaaaggacacaactttatcaaggctttaaacattttcagtccaagttctgattgcagtagaatttcagtggttatggaagacacgataagtatagtytggatacagattaccctcgttagtcacttaaagggtgctttaagtgtgtgcatgctggggcctcctactgtgggctctgtggttacggtcccaaacatcacaaatgtcaatgcgcttgaagaaaaggttaaagacaacaaaaggaagacaaagttacatggcaaaaagagaaatgctcctgggatctccaaccttattaaacatgacaacatatatataatgacaaaaattccacagatccactcccacatgatactagagatcaagaccaaaggaaacacaggactgtagcaggtatttct

SEQ ID NO: 752827 - DNA, 635 bp, Homo sapiens
agacgaaatataaaaaagtggaaagggctctacaaagcttttctaagaactaattgacaacatggtaaggctatggggggtagggcatgctatttgtccttactttttccatgtatatgaaaatccaattgaggcaaaatattttggccatgagcataatttcacagtatatttttcaagctaatgagacaaagcatatactacttaaattctaagtaccctgataccaaaagggtgttgaagaagaatatttttcatttacacagttagcaaaatggttctgaaccctttctatcaactagagtcattgggagcttttaaaattacagatgcattggcaatctcactgcttaaaaattctaatktaattggtttggggtagagcccaggcatagacatgtctatttgtttgtttgttgcccctgtgttgattccaaagtgaagccagagttgagaaccattggatgaagaaaataatactcaacagcgttgaagatgcagtcaagttggagcacacagaaacactgagtaaaaattagtatcatctgtctaaaatgtaatttggcaatatcttatatgcccaaacaattgactctctttctaagaatatactctaaagaaacaggcaaagaatc

SEQ ID NO: 752828 - DNA, 544 bp, Homo sapiens
gagcatttatgtttgtgtgcagttcaaaaacatggtcagttttgatagctagaaatttcataactatatttatagaatatttgactatagaattcaaaatggctatgcaatgaaataaatcaattttagcaacacttttttttttcatatagattcagggctttgtgtttttaggactggaaatggytgtatttgagggagagattgtaattctctgaagtgtgtgtgtgtgtgtgtgtgtgtgtgtgtgttgacctaatgagataaggaattaatcatatggcattttctgtagatatcagttgcttatctgaaactgcagtgtttgtatgaactgataattctttttgtcttcttccttcctacttgtctgcctctctcttttctatcttatttcagtttcaatttctccttcttcctctcctatgtttattgaggtatgtatgaaggactatgacctacttggggcatgggtaaatatttacagtttgaagagtgaacaagatttatagagttacaaaaatgatttattaggagttcctga

SEQ ID NO: 752829 - DNA, 509 bp, Homo sapiens
tcagcttcttttaaggacttctctacactggttattctagttagccattcgtctaatcttttttcaaggtttttgtcttctttgcaatggtttcgatcttcctcctttaactcggagaagcttgatcatctgaagccttcttctctcaattcatcaaagccattctccatccagctttgttctgttgctggtgaggagctgcactccttttgaaggggaggggcgctctgatttttagaattttcagcttttctgctctgctttttccccatctttgtggttttatctacctttggtctttgrtgatggtgatgtacagatgtggttttggtgtggatgtcctgtttgttagttttccttctaacagtcaggacccttagctgcaggtctgttggagtttgctggaggtccactccagaccctgtttgcctgtttatcagcagtggaggctgcagaacactgaatattgctgaacagcaaatgttgctgcctgatcgttcctctggaat

SEQ ID NO: 752830 - DNA, 658 bp, Homo sapiens
ggggttttggacattcactgaggatcaatgtacattcctcctattctgggttcactttttcttgacctttaactttcacatagtattgattacaacatttattcaatcggaacatatgccaggaactgtgtcataaaatttacatatgtattataatttaaatatcacagtcattctatgaagtaaacattttaaagatgaggaaatggaagagttgcaatgagaaactttcctttgagcacacaggcagaaagaaaaaggaaattgcactcaaacaaatggagagttacaatgagaaactttcctttgagcacacgrgcagaaagaaaaaggattcaaattacacccatacaatcaaagtccctaagaaattttcttcagatattgctttatactttttcatgtctgaatcagtgcttggaactctgtcaataatctgtaaagtagactgtgagtgagaaaatggcttttctctcttaccagaagaaggctggatctctgtgccatattataggaaaactcatacgtattgactttcttctagttctctctaaagttccaacctacctgggcttccgtctaaggctatatttccaaaatctttaaggacagaaattggttgtttatcttcccgtaataacaatcccatgttcctttc

SEQ ID NO: 752831 - DNA, 652 bp, Homo sapiens
cataagaactcacttattatcatgagaacagcacccagggggaaatccaccccatgatcacctcccaccaggtcccatctccaatattggggattacaatttgacatgagatttgagtggggacgcagatccaaaccatatcaggatggataccctaagtaccttgacttgattattacatattctatacatgtaacaaaatatcacatgtatcctacaaatatgtgaaatattatgtatcaatgatctaaagaagaattagtattaaatgaacacattttgctgaacatagagtaggggtcatggaagacaaagttgaaaaaagcaaacatgggaaccaagatggccaaataggaacagttcyggtctacagctcccagcgtgagtgacgcagaggacagatgatttctgcatttccaactgaggtaccaggttcatctcactggggagtgccggacagtgggggaaggacagtgggtgcagcacaccatgcatgagccaaagcagggcgaggcatcgcctcacctgggaagtgcaagggatcagggaattccctttcctagtcaaagaaaggggtgacagatggcacctggaaaattgggtcactcccaccctaacactgtgcatttccaatgggcttaacaaatggcac

SEQ ID NO: 752832 - DNA, 541 bp, Homo sapiens
gataaagaattcaaaatgttgattatgaagccactcaaggagttacaagagaaaggtgaaacccaacataaagaaatttaaaaaacaattcaggataataatgaaaaattttctaaagagatagatatcttaaagaaaaacgaatcagaacttctggaaatgaaagacacatttagggaattacaaagtgcaatggaaagttttaacaatagactagaccaagaagaattttggaactcaaagacaagccttttgaattaactcaatcagaaaaaataaagaaaaaaaataaaagaaatgaacaagagctccaagaaatatgggattatgtaaaacagccaaacctaagaatcatytgtgctcctgagggagaagaaaaagcaaaaagtttcaaaaacttatttgagagaataattgaggaaagcttccctggccttgctaaagatttagacacacaaatataagaagctcaaagaacacctgtgggattcatgacaaaaagacattaccaagacatatagtcatcaggccatctaaagtc

SEQ ID NO: 752833 - DNA, 543 bp, Homo sapiens
aaaaaaaaaaacaatcccatcaaaaagtggacacgtgacacgaatagacacttctcaaaagaagatatacaaatggccaataaatatatgaaaaaaatactcaacattgctaatcatcagggaaatgcaaattaaaactacaatgagacaccatcttaacccagccaaaatggccattattaaaaagtcaaaaaaacagtagatgttggtgtagaggtggtgaaaaggggatgcttacacactgctgatgggaatgtaaattagtacaacctctatggaaaacartatggagagttctcaaagaacaaaaagtagatctactgtttgatccagcaatcccactactggctatctacctaaaggaaaataagtcattatatcaaaaagacacatacgtgtatatgtttatcatagcagaattcaacattgcaaaaatatggagccaatataagtgcccatcaacgaatgagtgaataaagaaaaggtggtatatgtacaccatggaatactactcagccataaaagagaatgaaatagtgtttt

SEQ ID NO: 752834 - DNA, 641 bp, Homo sapiens
cattcaaccaatagtttttgaggcaaccaaagcaaaaacagacaaatgggattacattaagttaaagagtttctgcatagaaaggaaacaattcaacaaagtgaagagacaacacacagaaagtgagaaaatatttgcaaactacctgtctgacaagagattaataatcagaatttataaggagtttaaacaactctataggaaaaaatctaataatccaatttgaaaatctgcaaaaagatatgaacaaatattccttaaaaggagacatacaaatagcaaacaggtatatgaaaaasggcttaatatcattgatcatcagagaaatgcaaatcaaaactacaatgagatatcatctcaccccagttaaaacggtttatatccaaaagacaggcaataagaaatgctggcaaggatatggagaaattggaacttgcatacactgttggtgggaatgtaaattagtacaaccactatggtgaacagtttgcagtttcttcagaaaactaaaagtagagctaacatacaatccagcaatcttactcctaggtacatatacacaatggagtactattcagccacaaaaaagaatgagatcctatcatttgcagcaacatggacggaactggagtcacttcgtt

SEQ ID NO: 752835 - DNA, 601 bp, Homo sapiens
aagtatctacagtcaccaccccagaggagagtcagaaatgagtgaagccaagcctcagaaacaaagattcagtacatcatgtcagaataaaaaccaaaaactgaaccgatgaccatagctttgtctggaaagatgggataaaggatggaaacaggaatcttgagaaaaagcaaaagatgaaaaaggaaatgagggaaggagactacaaaaaatccatttccagaagttatctgattttgactatgaacttaaaagtgatatatgagagaaacaaataaacactsaataacagcctcaggtgcccaatgagtttgttatcagacatcactcaagtcatgtcagaataaaaaccaaaaactgaaccaatgaccatagctttgtctggaaagatgggataaaggatggacacagggatcttgagaaaaagcaaaagatgaaaaaggaaatgagggaaggagactacaaaaaatccatttccagaagttatctgactttgactatgagcttaaaagtgatatatgagagaaacaaataaacactgaataacactgaataacagcctcaggtgcccaatgagtttgttatcagacacaggaaaata

SEQ ID NO: 752836 - DNA, 499 bp, Homo sapiens
acacaggaaaatagattctctctaaaggagtaaaaaaatctcccagacactgcatagcataatgaatgaatgaaaattttgtttcatgatgaattaatgactgattgattttattattaaatcttaattttttgtttcctcttaccaaggtatagagtgattttccaagttgagatgtaattacaaaattaatattttgtagaagttacattatttcaggaaagtaagccagtgtgagccttcagaaagacatcaaatcaaaacctctattgytgcaaaaagaaaattacataaaagcctggtgaaatacagtgaaagctgaagagagcgctgaagtgacaccaagcaatgagcataatcgaggaacccttttagcagagacaaaaatggacctaacaggagatctccaggctattttcctttgctagcctgaccatgtgactcaactgacatttttgccaacattatatggcttcttgtttcttgcaggctgctaagt

SEQ ID NO: 752837 - DNA, 499 bp, Homo sapiens
acacaggaaaatagattctctctaaaggagtaaaaaaatctcccagacactgcatagcataatgaatgaatgaaaattttgtttcatgatgaattaatgactgattgattttattattaaatcttaattttttgtttcctcttaccaaggtatagagtgattttccaagttgagatgtaattacaaaattaatattttgtagaagttacattatttcaggaaagtaagccagtgtgagccttcagaaagacatcaaatcaaaacctctattgctgcaaaaagaaaattacataaaagcctggtgaaatacagtgaaagctgaagagagcgytgaagtgacaccaagcaatgagcataatcgaggaacccttttagcagagacaaaaatggacctaacaggagatctccaggctattttcctttgctagcctgaccatgtgactcaactgacatttttgccaacattatatggcttcttgtttcttgcaggctgctaagt

SEQ ID NO: 752838 - DNA, 594 bp, Homo sapiens
gcgtcctcactgcctttctctcgggatcctggggctcaagtgaactgatgccatccttggttcatcgtttgttcatgtaaggctcccttgtattttcatccgttcattttaataacgtgatgagcacttgtgaacctaccccactccaagaagtggacagcagagaaagcaatcaacatgcttctttctctcccattcccaccctgcctggcaacctccatctggagttttctccttctcctttttcttaaaagttttaacacatatacacacacttgctgaaaaacacacggcttgttgtgcttgtttccaagctgtatgggacggagtcacacagagtcttcgggacttgtcattttcactcagtcttaacgctatgcagcactggtgctgtcgcygtggccttcgctcaccgtggccagagctgtgtggggtttccgcgtgcagcgcgccatgaagtgctccttaactctgggatggcactgggctgtgtctggcttggggctgctcccaacagaactgccctgagatgtgagcacatgctcgagcttctcctgggggtgcctgcagggaacctgctgtagaaagggcaca

SEQ ID NO: 752839 - DNA, 591 bp, Homo sapiens
ccaaagttccccatttcccctcaactctccaggcttcagccatctgggcctttctttcctgatgttagtagcttcaatttacatcacagttaacttggaacagcgggggggctatatcctgggtcctttctccctccgtctgcttccttctcagtcttcattagtggtgttctgtgagcctcccacccaccccaactctccgagtgctagttaggtgctcaggtttgtgctcttggatgaaactcctgctacataagtggacatagaaaaagaggctggcaagggttgtttccagaggggtctgagccaatcccacgctrttgctgggcttgaggttccacatctgtgaatgggaattaagcttcccctgccttcatccaaggtgggatgataattaaatgagagtggatggatgggtcctttggaactcctgaagcaccactggaggcaagggattatcattcttctggctttctctctgtcgaggacttgggtgttcctccagagtcagagggcaggtgcctctggaaggtataatagctaacgtggattgagtgtttacgaccagcccaagcaccctacatggcttaa

SEQ ID NO: 752840 - DNA, 632 bp, Homo sapiens
tgcttgttcacatatatggtacgaagtctgatatacttagaagtatgggatgagaagaaggtgatgatgaggaaatgcattctctaccatatatttatcacatgcatttcccaatatgtctgcagaaactcaggcccaagatatgctccataatacaaacttatatggacaaatatattttggatacagagacatacctcatcttcttgcactttgctttattaaactttgcaaatattgtgttttttacaaattggaaatttgtggcaaccctgctgtcagcaagtctactggtgccactttccaccagyttgtgctcacttcacatttgtgtcacattttggtaattcttgcaatatttcaaaatttttcattattattatatctgttatggtgatctgtgatcagtaatctttgatgttactactgtaattgttttggggtaccacaaactgcacccatataagacagtgaacttaatgttgtgtgtgttatgactgatttacccactagtcattcccccatctctctcctcctcctcaggtctccatattccatgaaaaacaaggatattgaaattagaccaattaataaccctacgatggcctctaaatgaccaagtgaaaggaaga

SEQ ID NO: 752841 - DNA, 636 bp, Homo sapiens
ctgcccttctttacctacaattgccttggtaattcctttaccacctgcaacgccagcctcagctagtgtgacctatgacagtgaggatgaacacaggaaaacacactacaggcacagttttgcttttcagcacttggttgacaggaggctgataaactgcctaattgtgctctgcttactttagatgaacactgctccctcttaaaacttcatttgagatcacataattatgaatttatatcaaatttggtccaacccaaacaaaatgtgttatctccactgatcacayatccaaatgcctttttatctgtacatagcatatttatgccagttttgttgtagatggagtcacctgggcgcagtggctcacgtctgtaattccagcactttaggaggccaggattacacttcaggaggccgaggcaggtgaatcacttgaggtcaggagctcgagaccagcctggacaacatggtgaaaccccatctctactaatacaaaaattagctgggcgtggtggtacatgcctgtaatcccagctactagggaggctgaggcaggagaatcgcttgaacccagggggcagaggtggattgcagtgagctgagatcgagccactgcattccagcctgggcaac

SEQ ID NO: 752842 - DNA, 656 bp, Homo sapiens
tgtcacaacttataaaggcaatatgaacccaaaaagcaagcagtagcaagatttattgcaaagaaggaaagaacaaaactttcccaatgtggaagggaacccagcgggttgccagagtactgggcagcctgctttcattctcttatctggccccacccacatcctgctgattggtccattttacagagagccgattggtctgttatacagagacctgattggtccattttgacagggtgctgattggtgcatttacaatccctgagctagacacaaaagttctccatgtctccactagattagctagatacagagtgttgattggtgtatttacaaaccctgagctagacacagggtgctgattggtgtgtttacaaaccttgagctagatacagagtgctgattggtgtatttacaatcccttagctagacataaaggttctccaagtccccaccagatcagctagacacaaagygctgattggtgcattcacaaaccttgagctagacacagagagccgattggtgtattcacaatcccttagctagacataaaggttctccaagtccccaccagactcaggagcccagttggcttcacccagtggatcccccacaggggcgcctgtggagctgcctgccagtcctgcgcgtcc

SEQ ID NO: 752843 - DNA, 601 bp, Homo sapiens
tttgtgcatgcgcgtaatgaagatagcaacaccttaagcccagtggtgcttaaggcacgtgagggggtgggtatgaagggaagcaggccgttagttggcaaatgctagattgaaagaatccactgtacagcatatgctgaacatttgtcgtctttggagaggaaagaaaacgaacaggacttacagctccaatgccctcacagaaccccgcgggcatttgcggcgccttccctccgcctctctgcttcttgttccctcacccctgcttgccacggcgtctgttccctctcaactcgcctggcagatctcagcatgcccctgcttcctctaggtggctgctattgccagagcccactgagtagacgcggattacccgttkgtcagccccgggcatctgggctgttccagagttttctagtccaatgacccgtggggagcgtctcgaatgacgctgccctcgaagcagcccggctctcagccccgtcctgccctctccccaggcactggcgcgctgatcctgcaaaagggtgagatccgcgtcatcaaccagaccacctgcgagaacctcctgccgcagcagatcacgccgcgcatgatgtgc

SEQ ID NO: 752844 - DNA, 610 bp, Homo sapiens
agaggtgcccaccaccacacctggctaagttgtttttttttttttgtacagacagggtctcactatgtttcccaggctggtctcgaactcctgggctcaagtcatcttcccgtgttgggctcgtgctgagccaccacccccagcctccctagatttttacttaataatttaaaatattycctctcttcttgcttggtggcctgaagggacaatgtcaacaatctggggaaggcttagggagcttttgggggaacatttgagggcttcttgtatgctgatgcgccacatgggcttggggcagggaagaggacctggggagagaaatgacatggccagtgtcaggagggcagaaggtagccttggctcaccgctatgtccccagctcaggcttgtcttagaacatgctgatatgtgtttgttcaatgaatggttttttgcctgccatgagttatggaaacaaaaaggaggaaatatagtctgattggagcaacactgcaaggcttctcgggggaggtggggtttgcagagcctctttcattttagcctgagtgttttacctctttgagggagggagtgttgcctagaacctgtgcgagaatctgtcgcattt

SEQ ID NO: 752845 - DNA, 546 bp, Homo sapiens
aatcaaggtttagctaagaagtatatcaaagcagccaactttaacaagactggtgaattgccttatccccagattttttatttcttttaatcttgctctagtcatatttttccttaaggattatgaaacttagatagcaatatgtgttatctttttttatgagaccaatgatttattttccacaccccatacttatgtacacctgaggagagccaaatagttgacactactactccatcagaaactaccactctccactagcagcagttacacaagttttcatcatcagacttaagaggatcaaactactctccagagaagagatggtaaatatttgacacctgtgatactatttctcttctccttcrgccatggacatgataaattaattatgggattccttttggcggcacctggaaacagccttaaaattcttagcaatgcctaagcaaccaccacaaaacaattgaaattgccatatagaaagaaacctatctatcctctcagctctagaaggtgtactttgctaacagcaatcatgcttac

SEQ ID NO: 752846 - DNA, 522 bp, Homo sapiens
ctagattatgacaaactttacagaagttatgtctgtttgaaactaaaaagaaaaaatacattcctttgaaaagttccaatttcaaagacatttagacacgatggataagtaggaaagagtcttggaattagtgtgattagtactaccatttctcttaacatctcctaatccattgtaaacatttgatttcagaataaggttccatatgtattgcaaaagcagagtgaaaagattacaccctagaaatgtgttattgaaaatgttctaaaagtgtttctttacatgaatatcaatgaaaagttgtttcttttttacttcactagaagtaattattgaccaaattatgacyaacatagaacatttaaagaattaagataaaaactgaaatattccatttttcatttacaacagtagaggttttagtgttttcttgcaaaattctttagtattttcatacatgtgtttgtgtgtgtgtattttaaaaacttttacctcagggatagaataagaaaagcagcacac

SEQ ID NO: 752847 - DNA, 641 bp, Homo sapiens
tgctaccatgcctagaggcaatcatacatttgacttgaagtctttgcattctcctgacttttcctgctttttgtacatagataagaagttatggtaatttggcttggtgactgtgcactatcagagatcattggcatgtgtccaccatagtgtcttaatgtcgaaaagccccttcctagatatctactcaaaccccctatcagataccatccttcaggaatcctgaattcttagctgaaaacaaaataatgtgcatgtttagaaaaagataaacagacatcctacagaacggaagaaaatattcgcaaactatggatctgacaaagaactaatatccagaatctacaagggactcaarcaaatcagcaagaaataaataaataatcccaacaaaaagtgggcaaaggacaagattagacaattctcaaaagaagatatacagatggccaacaaacacatgaaaagtgctcaacaccattaattatcagggaaatgcaaattaaaaccacagtgagatcccacgtactcctgcaagtccataatttaaagaacaaaaaataatagatgctgtcatggatttggtgaaaatggaacacttttacactgctggtgggaatgtaaactagtacaaccactgtgga

SEQ ID NO: 752848 - DNA, 591 bp, Homo sapiens
gttttaactgcttgaagttttttttttttttttgaggtggtagtataacggatgagctatttcacagtactcagatgcccacagtctgcaaaatccagtaatgcctaagaatctccttaactgtttcagaattttgagaaagggaaaggaggaaatgggctcaattcttttctcacctggtactctggtcctttctgataagactagacctaggtactttactgaagtttgacagagctgagctttagactttgagaccctatattccctttcagctaagaaactgaggagcaccttcgtgcctttctgagacttcctcggttggggcacagaggagagtatcatttgcatactgtaaaatttcaacttgagggtgagaaaaacaaaaaaagatatttggacggggcctgtttaagcaacttccttccaatawcaggggctgcctgagtaattaacctgctctttattgaactgggagacaaggaggtgtgtttcactaaagcttctctcagcctttccaaaaaggccaagagattttcatctgatttctgatttaacaaggacagtttagagtaattaacaggcttggtt

SEQ ID NO: 752849 - DNA, 643 bp, Homo sapiens
attctccatccggttttgttcccttgctggcaaggagttgtgatcctttggaggagaagaggtattctggtttttgcagttttcagcctttttgtgctggtttctccccatcctcatggatttttctgcctttggtctttgattttggtgaccttccgatggagttttgtgtggatgtcctttctgttgatattgacactattcctttctgtttgttacttttccttctaacagtctggcccctctgctgcaggtctcctggagtttgctggaggtccactccagaccctctttgcctgggtatcaacagcggaggcttcagaacagcaaagattgctgcctgttctttccacaggaagcttcatcccagaggggcacctgccagatgccagctggagctctcctgtatgagatgtctgtcaacccatgytgggaggtgtctcccagtcaggaggcatgggggtcagggacccacttgaggcagtctattccttagtagagctcaagtgctgtgctgggagatccactgctctcttcagagctggcaggcaggaatgtttaagtatgctgaagctgcactcacagctgtccctatccccaggggcctattgaggggtaagggactccctcaaaacattaggag

SEQ ID NO: 752850 - DNA, 615 bp, Homo sapiens
tagctctcaatattgagtcttctgacatacaaacacagtctattcctccatttattccagtcttttaaaatttctcccagtaatgctatgtggtttcaatgtacatatgttttacatcttctgccagatttatgctcatgtattttacatttttgatggtattgtaaatggtattttttatttgaacttctaattgtttgtggctagtatatagacatacaatttatttttgtatattgatattgtatcctgaaactttgctaatacctttctttatagtttgcataagtaattatatcatctatgaataactacacttgtacttcttcctgcccaatctatatgtcttctatttctttattttttcatgtgttattacattggctagaaccttcaatataaaagtttaacagatggagagcagatatccttayattgttcctgatcttagggggaaaacatctagtcttttactttttttttttttttttttgagacagagttttgctcttgtcgcccaggctggagtgcaatggcgcgatcttggcccgctgcaacctcctcctcctgggttcaagcaattctcttgcctcagcctcccaagtagctgagatt

SEQ ID NO: 752851 - DNA, 606 bp, Homo sapiens
aaaacagtattaacatatctttattttatttagttcagcgtttctcaaaatgtattccgtaggcaatagttaacaagatgtttccatgaaaaaaatgtgaaggtgggctggccgggttccattgtcaaataattttggaaatgctattaaaacacgtttgttcttctctagagcactcacaacaacttctatcaactrcgttgatcccaatgaaaatacaaaatgatttcactactaacccttgccattttccatgtaactcctactcactcatcagaaggcactttgtgaattacctgtgcactttgccattagtgagtacctcacacaactcgttactggcagagtgcagatgagggacctgagttttccagcctgactacttacagcccactcttctgactctgtaagtgcaacctttagtagcagggggttgggaaaggaacaggcacttcagagaagagagaatttggtcaagctgctgaattgactgtgagttttcagagggaggagttcagcagggatttttactggctgctcaggtaatgatgaagaaatcctgcacaacatctcatttccaaatttactgatttttcccaagatagc

SEQ ID NO: 752852 - DNA, 572 bp, Homo sapiens
tccttttctcttgcgacatatggattactacaacctccctctttcccctccagcccacttttccttttcaaatgctgaagccctcaaaatcatctttggagaaaggcataaacctttctcccaggcacgtccttgattttggcaaaataaacttctaaactgattgagacctgcttcagatactctctggtttacacatggtatatctttcttcatcctttactttcagcctagattcctgaatctaatgtgtgcctgctacagacaacatcttagagggtctttttatttttattcagtctgataatctctgcctttgactggattgtttaattcattcacatttgttattcatagggttcaatatacatctaccatttgctttttacatcattcrtatgtttttattcttttgctcctttacttacttcttttggattaagtggatattttctgatgtaacgtttgaggatctataatgatttttattaaaaaaattatattattagtagttgttttgggatttcaatatacatgttaccctttaaaatatattttaaatttattccaat

SEQ ID NO: 752853 - DNA, 606 bp, Homo sapiens
ttgagccaagtttaaaacagtaaaatgtgtgtgtgtgtgtgtgtgtgtgtgtgtgtgtgtgatttcttcctaatattaaaggaaattcaagaaaatagaaaaatttttaaaacacttattctataggaaatatcaaatatccatatctcaaacctacgtttttaggtacatacatacaagtgctacactggagctattgtatcaataaaccaagaacttataaagttgcctttatatttcaaagtattttccaaacatttacattttcaaaaaatgctgtaacaaacagttctatatgttcagtgccatatgctcaacataataatataactgtagttaaactaatgataactaagtcacartaacatggatgactttgcaggctgctggagcagcaggttttctttgcagaacaaagcttgaagctttgaagctcctctgacaaaagtgttgtgagcggggtagggagaagaggagcaggaggcagaagagggcttggtccattccaaggagattttagacctgagggaagtcacctgtcaatttctgaatgtcattggattatctgctataattcatgaatgtgggtttgaaaactcaacgtta

SEQ ID NO: 752854 - DNA, 589 bp, Homo sapiens
ggacaccaagcccttcatgagggatccacctccatgacccaaacacctctgacgaggcccctggcgatcacattcagcatgagatttggaagggacagatatccaaactacaccagtggatgtagtttgggctagagtcctcaccctcccagtggrgaacacattctctttcgctcatactccatcaaacgggaatcaagttaatcctagcattgagaaatattctgggaaatgttgttttgttgcagtaaggaacaaattcatttaaaagaaaagtgcatcccgtccaggaccagactcatataatggctatcctaacaacacaataaaaaacaaagcagtctgtcaatacgtggttcgtttgttccagtaacctttggctctatttttccttaattctttcgtttttatatgcttaagttctgggatacatgtgcagaacgtgcaggtttgttacacaggtatacatatgccatggtggtttgctgcacccatcaacccatcatctacattaggtatttctcctaatgctatccctccccttgtcccccaacccccaaaaggccccagtgtgtgatgttcccctctc

SEQ ID NO: 752855 - DNA, 621 bp, Homo sapiens
acacttcaatgtttccctgtcatcctaaagtctaaactttctagcattgcattcagggcctttcaccactttttttcctcagcttacttctattgtcttctggtagactaagaagtttggactttatcataggtcatgsggattcatgataaattttaagcataagactgatatggaaaaaaattccatgttagaaatgtcactccagctgtagtgtgtagaaaaatttggaagcagttttccttacgcatttcccctagtttgtgtatcaggaatttctgccagcggtccgaattttcctcttttggagctgcattttgcacatctaatttctctttacccaactgcccttcggattattaaaagacagtttttatgtccgtcaagaagttatcataaaaactttggcttcttttccaagtgagatgcgtctacccagaaaagagacatgagttgacttgcagtttacaaggatcacaacctggctactgtgttgacaatagattgtgagagagcaaggagaccagcgagaaggctatggcaataatccagatagacaatggtggcatgaattatgaaggtagcattggaggcagtgcgaaattgtaggatactgataca

SEQ ID NO: 752856 - DNA, 474 bp, Homo sapiens
aataacttgacacacgagcatgcacccatttcctctagttaaacctgcctctttggttgagatgagaaccagatggctgttatcctttttattccttggcatctatgtacaccaactgtgaaggccaaggatacagaaccatagcaagattgtacaaaatggatttggtcagaggaagtaatcatgacctatctataaaaccttccaaagtagggcctgcaaataccacttytgtttggagcagaaagtgttttagtgggccagaatgtgcaaagcacatttcttcatttgaagagctcttcatcttcccctcatgtaaggtgaatcgctgcaacctgggtgtacttcataacaacccgactctccttggaggaggtgtgctcacactgctttcaaacaacttgagtctttggaatgatcgtatctatttatttaaccttcttgccctttgcacatcatctgactgctggacag

SEQ ID NO: 752857 - DNA, 529 bp, Homo sapiens
gagtatcatgtctcagcttcctactaactagctttctcccgtgagtcggggagcagagctggtgcctggtctctagggttctcttccgcggctctgtgcctatgtcgagccagcagtttcgcatcagcactttcgccaatagcggagactcagtgttttctcggctgctgcaccgctggaaggcctgaacacaacagaacgtttcggcggggcgctgtggctcacgcctgtaatcctagcacttagggaggcygaggcgggtggatcactcgaggtcagaagttcgagaccagcctggccagcgggtgaaaccccgtctgtactaaaaatacaataattagctggccgtggtggcgcgtgcctgcaatcccagttactcgggaggctgaggcagtatgcttgaacccaggtggcggaggttgcaatgagacgagattgcgccactgaactccagcctgggtgacagagcgaggctccttctcaaaaacaaaacaacccagaacgtttcttgttcacaagactcagaagt

SEQ ID NO: 752858 - DNA, 627 bp, Homo sapiens
ctgtcatttgctcttcatcataaaagacagtaactacctgggtgatgattataagcagatccctagtccttacctcactttcccagttactaactgtgctcttccagaaagccagagagggactgtggctcgcttatctcatgcttgcagcagcctagagagagcccagcatggctgrgacagatgttctctgtttgccctccaaatctgctctccacccttctccaccctttgcaccctgctccgcatcatgagggtgtccttttcttcagcttctgatttgattttgccagtggaaagtaccagcaggagattgaagggaccgaggaaggagagatcagggccactttctgccaggttttggtttggcagtggccacactcccctgctgaaggccacaatgatcagcaagcagcctctccttcacctgaagctctcactcagcctccctgggaattgtatctttcctttcccctcaggcctagggtataaagactccttctctctgtatgcctcttcatcctttgtcaatgtcttttcatcatgccctgcttttatagatactctccattcaactctgttcgttcacccctttaaacaaatgctttttcatgtgttttatgatag

SEQ ID NO: 752859 - DNA, 644 bp, Homo sapiens
tcctgctgcaatacaaataatatttacttcagacaataatcccacccaggtgctgtcttcattgaaattatttcaaaatacgtaagttatgaaactttaaattattgtgttttataagtttctgtcttgtttcatggaacaaaaatataactgtatccacacaatttcaagtagctggacaaatttttttttaacggtaaatctttctaatattttgcaactcatctattgttcaatcctatcaggatttcactctgtctctttatgrgaggataaagtgatgtagtctctatgtcactgcacactcagatcagggcagctcagagagtatcctgaaatgagtacatttgcccgtcaagttacttgaactttagtgaaaggagaggaagagcaatcagtgcccaaaggcagttactctatttctgatcctgtttctcatggctacaaaaactgggtttgcatttgcctggcactttacagtttatagaatattaacaaatgctggggaatcttggtgatggaatttaacagtgagtgtggatgattagaacagcatcctggaaattggtaacatgccccaatttacagttttcccttggattttccaacagccttgtgcttctttattttcatgtctggacaaa

SEQ ID NO: 752860 - DNA, 644 bp, Homo sapiens
tcctgctgcaatacaaataatatttacttcagacaataatcccacccaggtgctgtcttcattgaaattatttcaaaatacgtaagttatgaaactttaaattattgtgttttataagtttctgtcttgtttcatggaacaaaaatataactgtatccacacaatttcaagtagctggacaaatttttttttaacggtaaatctttctaatattttgcaactcatctattgttcaatcctatcaggatttcactctgtctctttatgggaggataaagtgatgtagtctctatgtcactgcacactcagatcaggscagctcagagagtatcctgaaatgagtacatttgcccgtcaagttacttgaactttagtgaaaggagaggaagagcaatcagtgcccaaaggcagttactctatttctgatcctgtttctcatggctacaaaaactgggtttgcatttgcctggcactttacagtttatagaatattaacaaatgctggggaatcttggtgatggaatttaacagtgagtgtggatgattagaacagcatcctggaaattggtaacatgccccaatttacagttttcccttggattttccaacagccttgtgcttctttattttcatgtctggacaaa

SEQ ID NO: 752861 - DNA, 640 bp, Homo sapiens
tatgatagaagtattttctacttcactaaaatatttgcagtgtttacatattagcattttcttatattttttaccttaactttttaatatatattgagtcactataagcttatagttataattctgccaatttccttgagaattgtgttttcagttaagttcccaaacaaacaagtgttttaacagacacttgggctaagagattggctagtagttctttttgtaagttgagaattttaatgaggttaaaatataaatttaaaactgtttcatctctgcatgaataaatggacttactcttccaccattttatagtgatggtaaacaatgatagcatgttgatttattcagaatttgtagtgtaaatttctactgcrtaaagtatacacacaatttgtaaaaattaaggataaagaggactaatggagtagccatcttccttcccctcctcctatatgcccaaagtaatttagagttgatttgaagccacttctctagcaattggacttgcatagaatcgtgggggttcacacatcaccagcccaggaaacttcaggctgtcctttgttactctgtttactgaaattgacatatcagcaagttcaaaattatcctgaatagtagttttggcatgttctac

SEQ ID NO: 752862 - DNA, 590 bp, Homo sapiens
ctaagttccagatactctgtcaccaattgtgagatggatgccatgaagcagcactttcctcctggggtgcagcaggggcaggactttcctctggggtgcatcaggcctgggattcaacagactaggcaccaggactccagaggccaccaaccctgagcccaggggattgtgtgccctgtcagctccattgtatattattgcacacatacaaacaaattctgcaatactttaaatttagcaattcagcagtagaagacagtactgggagagtgaacgaccacattaagaactgggcaatgaccagcctgggcaacatggtgagaccctatctttacaaaaacaacagtaaaaaaaatgagccaggtatggkggcacaaacttgtatttctagctactctggaggctgaagggggaggatcacttgagcctgagagttcgaggctgccaaggccatgccagtgcattcccatctgagtgaaagagcaagaccctgtctcaaaaaaaaaaaaaaaaaaaaagaattagtcaagtaataggcaaagcatcctaagcaaaaaaaaaaaaaagaagcctgaggatcacattatcca

SEQ ID NO: 752863 - DNA, 651 bp, Homo sapiens
aaaggtgttcatggtagccttgcataaacttttgtttttctgtggtatcagttctaatatctcccgttttgtttctaattgagcttatttggaccttctctcttcttttattggttaatcttgctaataatctatcaattttatttatctttcaaagaaacagttttttgtttcatttatcttttgtattgtttttgttgtttcaatttcatttagttccgctctgatcttggttatttcttttcttctgctgagtttgggtttggattgttcttgtttctccagttctgtgaggtgtgaccttagattgtctatttgtgctcttttggactttttgatgtaggcatttaatgctatgaactttcctcttagcaccatttttgctgtatcccagaggttttataggttgtgtcactattatggytcagttcaaacattttttaaatttttatcttgatttctttgttgacccaatgatcaatcaggggcaggttatttaatttccatctatttgaatggttttgggggctccttttggagttgatatccaatttattctactgtggtctgagagactacttgatacaattttgattttcttaaatttattgagacttgttttgtggtctatcttggagaatgttccatgtg

SEQ ID NO: 752864 - DNA, 605 bp, Homo sapiens
ctattaaagtcccattgtaactgagtacccccatttttctaagaggaagagagtgaattattttttaaattaatttcttctctctttccttgttctctcctgttttccacttcccacttagctctttagaaatgcaattataacctttactttcccttcaccagacactggctacatggcaagcttacctaactatgggcttacttagaagctccagaactgaaactctctctgcccaggagattgcctcagctgatggcagtcaatttacatcctcaaggatgcccatgacagtactccatcccacctggagagtatctcagattatggccactttaaaacctagcactacctgtgrtgatgccagctggaccacctggtagataaggcactgaagtgagtcatataggccccgcatctgcttgcttcctcccctgcatgccattcatgccaagttcccctttaaaagctgctgcattctgcccccaaaatgaagtggtacccttaaaggcaggagcctgtactgcttcccctaagctaagctttggaataaagtaatttataccagacgccactcttgttaatggagttaacaagtggtgagt

SEQ ID NO: 752865 - DNA, 557 bp, Homo sapiens
aaaaaaattataaatttaacatccacttttattttactaggcttttagcgaaagaaaaaataggatactttagaaagcaactttcttttgtcaacacctaccaatgatcagatcttgataacacgtatcttacggtagttaaggaattgattaaagtaattactgagccactaaatattatttgtggttgctggaggacacagtccctctgatagtagtaactcatcacctttctttctgaatgattaagggcaattctaaaagtaataagctaatcattttgaccagtggatttccaatcatgtgtcttaattttttcctcatgcttattcacattcctcttttaactttcatcaaattatacataaacacccacccacmcacacacacacacacacacacacacacacacacgtgttgagtatccctaatccaaaaatttgatatctgaaatgctccaaaatcctgaaccttttgagagctgacatgacatcacaagtggaaaattccatgcctgatctcatgtgaagagttgcagtcaaaatgcagacacacaa

SEQ ID NO: 752866 - DNA, 669 bp, Homo sapiens
agtattctctaaataagaaatcagatctggatcctatacttcaacagttcatagaataaacagtaatatatactgattacctaatatgagctatgtaccatgctcagttctgaagatataaaaatgataaaatgattttctttgagagttttgcattatggcaattctgtaacacttagaaaagaataaaatatgtaatcatcttaaaatctctaagcaaatatctcatgagcatctcagatttaaatgtcctcgtcaaatataatccccagcaccatcaatcaagttttctaaaatatatccattcaccaacagatcctgttgattttacctccactggttttaaatatgtaaaatatacactattcttcatctcttgtgctgtcaycttaatctgagccactattctttttcactaggattcctacaataatctctttagatctttttcctcttctactgtttcatcctcctcatcaattttccattacattagggatatttattaaaattataaatgatctatctgtatccatgaagccatcaatattcttttcatttcatttaggctaaaaaaaagtaaatcattaccctattctacagcaccatgaatgccaatccttatactgttcctccaatcctatttccttccaactttcttctcacttt

SEQ ID NO: 752867 - DNA, 656 bp, Homo sapiens
ataggtaaatccatatagagggatatctcaatacagcttaatcatgtactaatagaataagcggaaaaaaatcagtaaggatggggaaaatttgaactatgactaataaacttgacctaattgaaatatgtggaacgctgtgccctacacctgcacaatacacattctttcaataaacacatggaatattcatagacaatgactagccaaaataatttagtgtacatgtcttggcacgttctactaaagttgaagacataaataccttacaacaaagcaattccactcagtatgtatcaaaaaacgtatatacatatatgcaccaaaagatwtgcaaaattgttcgtaacagcaatattcacaatggccaagaactgggaaaatcccaactgttcatcaacagaagagtgaatatttatacaatggaatactacatggtaatgaaaataaatcacagctaaacataccaacatattagaatatcactcacctaatgctaatcaaaagaactcagtcaaatacatactgtatgtttccatgtttaagaaattttaaaaaataaagagtaatgaaggtaaaagtaaagagtaatattacagattaatattattgttatgtttgttgaaagggaagggatagtgaggggacatgaaata

SEQ ID NO: 752868 - DNA, 516 bp, Homo sapiens
tagctcacttctctaatctctgtacttcagaatggggtatatttaatagctcaaagagaataagcaagctgtgattattaactctatttggttaatgtgttggtgtaaaagcctgtgtctattataaaatgttctaataataggcgtgaagtgagtgtgagtgaaatctgaacatgatagrggaactgcattattttaatcttaaatatactacatcttgttactttttgagatagtattttttaaatttttctaatttcaagattgaaagattatgtccccaattatttcatattctgcttaaatataacacttacttctagaacatgcaattttatccaggaatacctttgcacatagtgtttactcatcccttaatatttttacacactcttcgagtcttaactgaaatactccttctttatgaaacctttctccactctcccagatagaggcagttagactgctttcttcatgtgctcacgaaattgacagcagcctttgtgcttgctataa

SEQ ID NO: 752869 - DNA, 620 bp, Homo sapiens
aaaatataacatatttaggagtaaattgaaccaaagaagcataagacttgttcactgaaaattacaaaacaacattgaaagaaattaaagacctaattaattataaagatattctgtgttcacagatccaggcataacatttttaagatggaaaaattctccaaattaattcacaaatttagtgcaacctctaccaaaatcttagcttccctcctgcaacctcttttttttttttcagaaattggcaagctgatcctacaatgtatatggaaatgcaagggatacagagaaatcaaaacagcttttcacaawagaccattagaagtctcacactttccaatttcaaggcttactacaaagctacattaataaacaatattttacttgtataagaatggacaaattggtcaatggaataaaatttatagttcagaaataaaaccatacatctatgacaagctaccaagaccattcatgggggaaagaattatcttctaaacaaatgtggtgagacaactagatatccacatgcgaaaataaataaataaataaaggtgaaacccaacctcacaccatatataaaactttacttaaagtagatcaggccgggcgcggtggct

SEQ ID NO: 752870 - DNA, 620 bp, Homo sapiens
tggtgaacgtggtgaaaccttgtctccactaaaaatacaaataattggccaggtgtggtggtgggcgcctgtagtcccagctactcaggaggctgaggcaggagaatggcatgaacccaggtggtggagcttgcagtgagccgagatggcgccactgcactccagcctgggtgacagagtgagactctgtctcaaaaaaaaagaaagtggwtcaaagacctaaattttagagtttcactatagaactcttagataataatataggcataaatctttgtgactttcaagtagctaatagtttcttatagtactcaaaaacaagaaacacaagaaaaaatagatacattggacttttttcaaataaaaccctttgttcttcaaaagacatgatcaagaaagtgaaactaccctcagattgtgaaaaaatgttttcaaattatgtatctgataaggaactagaatccagaatacaatgaactcttacaacttaacaataaaaatactcaatttttaaaaagggccaagtatttgaacagatgtttctactttatttcaacaaattcaggccattgttaactcttttaaatgaaaaaaagaactccaagcaccgtcttgtcagg

SEQ ID NO: 752871 - DNA, 620 bp, Homo sapiens
tggtgaacgtggtgaaaccttgtctccactaaaaatacaaataattggccaggtgtggtggtgggcgcctgtagtcccagctactcaggaggctgaggcaggagaatggcatgaacccaggtggtggagcttgcagtgagccgagatggcgccactgcactccagcctgggtgacagagtgagactctgtctcaaaaaaaaagaaagtggttcaaagacctaaattttagagtttcactatagaactcttagataataatataggcataaatctttgtgactttcaagtagstaatagtttcttatagtactcaaaaacaagaaacacaagaaaaaatagatacattggacttttttcaaataaaaccctttgttcttcaaaagacatgatcaagaaagtgaaactaccctcagattgtgaaaaaatgttttcaaattatgtatctgataaggaactagaatccagaatacaatgaactcttacaacttaacaataaaaatactcaatttttaaaaagggccaagtatttgaacagatgtttctactttatttcaacaaattcaggccattgttaactcttttaaatgaaaaaaagaactccaagcaccgtcttgtcagg

SEQ ID NO: 752872 - DNA, 620 bp, Homo sapiens
tggtgaacgtggtgaaaccttgtctccactaaaaatacaaataattggccaggtgtggtggtgggcgcctgtagtcccagctactcaggaggctgaggcaggagaatggcatgaacccaggtggtggagcttgcagtgagccgagatggcgccactgcactccagcctgggtgacagagtgagactctgtctcaaaaaaaaagaaagtggttcaaagacctaaattttagagtttcactatagaactcttagataataatataggcataaatctttgtgactttcaagtagctaatagtttcttatagtactcaaaaacaagaaacacaagaaaaaatagatacattggacttttttcaaataaarccctttgttcttcaaaagacatgatcaagaaagtgaaactaccctcagattgtgaaaaaatgttttcaaattatgtatctgataaggaactagaatccagaatacaatgaactcttacaacttaacaataaaaatactcaatttttaaaaagggccaagtatttgaacagatgtttctactttatttcaacaaattcaggccattgttaactcttttaaatgaaaaaaagaactccaagcaccgtcttgtcagg

SEQ ID NO: 752873 - DNA, 641 bp, Homo sapiens
gtcagaggatgtttacagttaagaaaacaagttaataatgtttatggaagagatccaggacttagcaggtccagaaaatatcctgatgtcacgatatcttaagaacaaaagtattcttagtttaagagtaagtttcactttaaagataataatataaattattgtggaagacagtagttatacaaagattaacaatcctttgtcccaagcccttgtagtagcgcacatctccccaaggattgtttttttttttgcgttattatcttatatataaacaagcattatacctaaaatggacgcattcctcctcttgcttttgggccctactctctatggagtaggcatttttttgtttcttcatttctgtaataaaattgctttcactttactctgtggacttgcctyaaattctttcttgtgtgacatccaagaaccctctcttggggtctggttcgggacccctttctggtaacaatacctccttcttagtgtgtgatagagatttttaaaaaagaatgtaccagaatattaaaatgggatgctttctatctcagtttttggctgtggctttaaaaggctgagtaaaaaagagacagaaagagagaaagtatgtgggaagtatttcgttttgcattccaaag

SEQ ID NO: 752874 - DNA, 609 bp, Homo sapiens
ctttctttttttctaattgttctggataccttttctttctttctttttttctgattgttttggctaggacttcgagtacaatgttgcgtagtaatggtgagagtgggcatacttattttgtttctgatcctagaaggaaaggtttcaactttttacctttgaatataatgttagctatgggtttttcatataggggctttattgtgcygaggtacattcattccatacttaatatgttgagagtttttatcatgaaagtttttatcatatacattttatcatgttttttctgcatctgttgaaattattgtatagttttgttcttcgttcgattaattcggtggatcacatttattcatttgtgtatgtaaaacatccttgtatccctaggataaatcacacttgatcatagtgaatgatcattttaacgtgttgttgatcttggtttgttagtattttgctgaggatttttgtgtcaatgtttgttagggatattggcttgtagctttctgttcttgtaatgtctttatctggctttggtatcagagtaatcctggcctcataagtttggaagtattatttcttcttaaattttttggaagagtgtga

SEQ ID NO: 752875 - DNA, 609 bp, Homo sapiens
ctttctttttttctaattgttctggataccttttctttctttctttttttctgattgttttggctaggacttcgagtacaatgttgcgtagtaatggtgagagtgggcatacttattttgtttctgatcctagaaggaaaggtttcaactttttacctttgaatataatgttagctatgggtttttcatataggggctttattgtgccgaggtacattcattccatacttaatatgttgagagtttttatcatgaaagtttttatcatatacattttatcatgttttttctgcatctgttgaaattattgtatagttttgttcttcgttcgattaattcggtggatcacatttattcatttgtgtatgtaaaayatccttgtatccctaggataaatcacacttgatcatagtgaatgatcattttaacgtgttgttgatcttggtttgttagtattttgctgaggatttttgtgtcaatgtttgttagggatattggcttgtagctttctgttcttgtaatgtctttatctggctttggtatcagagtaatcctggcctcataagtttggaagtattatttcttcttaaattttttggaagagtgtga

SEQ ID NO: 752876 - DNA, 602 bp, Homo sapiens
cctaaaatatggcagaaaaatattttggaaattatatcagatttcttaaaactttgtggaaaaaaagatgtgaaacaaaattataaatatgaactcctggcctcgtgacccgcccacctcagcctcccaaagagttgggattacaagcgtgagtcactgtgcctggcccctgattattcattttggggccaggtgcagtggctcacacctgtaataccagcyctttgggaggctgaggtgagtggatcataaggtcaggagttcaagaccagcgtgtgaccagcatggtgaaaccccgtctctactaaaaacacaaaaattagccagacatggtggtgctagcctgtaatcccagctactcaagaggctgaggcaggggaatcgattgaacctgggaggtgaaggttgcagtgaaccatgattacgccactgtactccagcctgggcgacagagagagactccttcttaaaaaaaggaaaagaaaagaaaagaataatcagtattcaaccttatcaaaagacagttaaattattttgccactttcaggaaaacttcttacccatgagaattggagttcctctttcagtttacatcaacactt

SEQ ID NO: 752877 - DNA, 588 bp, Homo sapiens
ttgtagtgagctgagatccaaccggggcactccagcctgggcgacagagagagactccatctcagaaaaaaaaaaaaaaagtaaaaatgtttagaccctggaggcgattgtccaacatttactagctacttaacctttctgtgcctcagtttcctcatgtgtagaatggggcaagaatagtgtttacctcatagatttattgagaagagcatataattatatatcgtaattatatatgtatatatatgtgtgagtatatatatatatatatgtatatatataaattggaataacacctggcgtgtactaattgctatgtaagcraaagctattggtgttgcgcttgtcatggcaggaggaacaagtcctttattcttattacttaacaaagattagtggtgactctggctttcctaggtctcaaagacctcaaaacttccagcttccttcaccctcccacctgcccagcttactgctgcctgcccttcctctgtggtctctacgcaccctgttgcttatcgtctgttactctgatttctcttagcttttctttccagctatcactacatgtctctcttcctccctgtg

SEQ ID NO: 752878 - DNA, 643 bp, Homo sapiens
tggccagtaagacttcctgaaaatgcagatgaagcttgattatgtataaaactctttgatatagaaatgcttaaaatttatcaagtaatgttgctgaagaatgccatgtattccattgctaatattcttctgcctaaaaaaaaatccaggaggcacttatctcaaatgcaacacattcccctttatataacatctttagaatgtagtcatttcatatcatctatcaccccgtcacaattttcttaagatttctaacctctcaaacttacttctcttattacagaccacatgatttatgagtactgagagttacagagacagctgtgagattaacattgtaacctatcccagatcacctgagaaactgtttcttctgaaatacactgtcacattgaaatggaattacaacatattttgggggcaattctggcatgtgcttttaaacttactcgttcaattgtaaagaaaaatagagtagaaatagaraaaattgtgctacatttatttgctttgacttcctgtaaaaataatgtggaggtttaatcaacgattcatcataataagatagaatttcacttatctaacatcttacaaattttctataaataatacatacttacagaagtcattaagaaaggaaaca

SEQ ID NO: 752879 - DNA, 618 bp, Homo sapiens
tgaaacacaattgcatgtggcccactcaaactgtttcgtctcattgttaactagaaattccttttgaaattcattgccttcaattacattttctaaaagaattttaattgcatggctctaaagaataaagatgctctaggctccatttgtttatcatggaggggcctaaaaaatgaggacagagcttcccagctcatgcaggggttgcagagagagggagatgacttttaattcgacaagttcagagagatttcttagtttgacgcgctcagcagggggtctttgagcgcctggcaatgcttcagcattctgagctttgaaagtctttccctgcagcagaaattgtatcaaaagccaatgataatattccctgcaaggtaaagcaccctattgaagatttcgagagctgtttatttattcatcacagttttccttttargacgtatcaggcatctaggtaataattcacatagatgatagaaaatgcaataaatcctcctcattaatctttcaccttttccttcttctacttctctgtaggccacgtgtagatataaaatggtctttctgcttgtcccaaacatgtatatctttatactgaatctcagtttcttcccc

SEQ ID NO: 752880 - DNA, 609 bp, Homo sapiens
cacccacaacatctgggctgacacttagagattctgattgacctctcttgtatcataagcattttctgagtcagtttctggagctggaagaagttggccaccctgattgaccagacctgggtcacatttcagaatgaggaatgctcaactcccaaaggaaaggtaaaatgcttctaagagttgttggagaaatggttattgggcagacaaaaagagtcttatgtagggtaagaacttaagtgttcattaagctgaagtataagatcacttaagtatcttggcagacagaacaccaagaagacatgttagcctacaaatagacactttggaaaatttagtcacaaatcgttatggtgttcattttgggataaggagtattttctaatatacgaggaaaatttttaatataaagatatggraagtaaagttttattcctgtgtgagtcactacttccttcagagtttttcttttttacccaaatggtattttatcaatgaggcctttcctaactactctctgtaaaataaaccatgccttacaagcccttcatgacagccccagcactttctatgccctttatcttgctttattatttttacatattttat

SEQ ID NO: 752881 - DNA, 597 bp, Homo sapiens
ccaccaggaaaacatttaaaaaggtgatggctttctgcccctaagccctaagtagcagtcctgagtagtaagttaaaattagaatttgttaaaagtatgcagtatgtttatgaagggtaagggatatttgaaagcaatatttaaatatttttaaaacatgtctgatgcagaagagaagatttcactttctctttagagttactgaggcgcaagataagagtaggaaagttcacccggccatgtatattttactgcaaacatgtcattttagacatctttcaaaatgtatctggaatatggaaaacagtcctactgagctattgtttggcatagctcattgacatatttatgtttgcaaaatcaatcagatcagggcaactgtgagttttgggttkttttttttttcctgtttgagagaatggagtcttggagatttcagtaaaagtaaaaataaaagaaatgtgcaatgcattttgcctattatgttgcccttaaaattaagaaaaaaaaagacagaaaaagggagaaattaggagaatgatttagggatccaaagataccgtaataagtggccaatgtgtaacaatataaggatac

SEQ ID NO: 752882 - DNA, 659 bp, Homo sapiens
tgtgtttgagcaaataggctttgctcatcctcagccaataaatatcccatatcctgaacaggctcccagttgacttcttggtacaatttgagttgatggtctgcgcagctgtgtagaaatgagggcttgggttacatcacagacaacctctctgactataattgccccattacaggagtgatcaactgagacgtcattgccaaaagtscctcattgtgaactccccgagaccggatacagactatttttgatggaaggccaattgctcagggatttactgccgttagcgattctacggaaggcaacgaggcttgctttcagggcgcaacgaagaagccatctgtttgctcagacctttgcctgagtgcaagcctcgtagtccccaggggctttgttgatgttattgttattgttattcttcattatttattgatcgtcccaaatacataatgtactgagggatgataatgttcatgagaaacatagtttatgtgtatgaaaaatgcttaatctaatatgctatacataatgtttggaagaatagtgcttcttatctggcaactgatagagttgactatttagaggtagaaggtttttctgtttttgtttgttttgcttttttaggtaggaatgagtgtttataaaaatcaaccaagaat

SEQ ID NO: 752883 - DNA, 567 bp, Homo sapiens
ctgtcctgttctctgtctcttctaggttgggggccgtcccgctcctaaggcaggaagatggtggccgcaaagaagacggtgagtgaggcgggccaggccgggaagacgattcacgtggagagatgtcttggccagggcgggcagatgtgagcccacgggggtgacagcatgcctgctggcatttggagggccccagaaggaatcccagtggccctctcaatgacttggggtcctcgacttcggaagtttaaggggctcggcttcaaaaagctgggtccggttttgaggcggytgcaggcgaggcccttaggtccgtatttaatgtttgctttgtagaaaaagtcgctggagtcgatcaactctaggctccaactcgttatgaaaagtgggaagtacgtcctggggtacaagcagactctgaagatgatcagacaaggcaaagcgaaattggtcattctcgctaacaactgcccagctttgaggtaatcgaagagactgaacgggcttcgcctaccgcgaattcatcgtgaacgaatatacaggagtgtaaacttgtaatctgagtac

SEQ ID NO: 752884 - DNA, 540 bp, Homo sapiens
cttgccaggctactggtatttgtgggtgcctcctcccctaaaatcattagacttgtgaggcggcaaggatgagttgtgtgtgcaggcactcagggacgagtcacagcctggcaagctggcctggacaggatgacttcacgggcctttcccacttctcatttttatgactagctttactgtttcattttggctttctctctctttcttgcagctgtggtgattaggatttagggcaagcatttgggatcccttttctaatmcctttcaaatcctgattcagctgcaaagtccgggaagggagtagagaatgggggaggagggactcaccctggtgaaaggcagtagctcagaatatccgagaaactcccaacaggaatgcccagcctccacccactaaagctggaggcctctcatctcatccaatatcaccctcgtactagaaacgcaaaagggatgagtttgtctatggactcaaacctttacagtcttcttgcttagcagcttaaggcataattatggtagtcatggtggtaagggact

SEQ ID NO: 752885 - DNA, 628 bp, Homo sapiens
cttcttttagagggtgccatacctgttctacttgatactcggcatctaacattctgaaaagaaaaaaatacacaaaaaaggctctacatcctaactagttaatctactttaatccttcagtggctgctctgatctgggaaaatctrtttttggcctaagaccatccaaaataaaggttctatccaagatagtatcatatttatccacagtagggtgatttctctcttcctcaaattgagccataaatgcaggttactctgttttacttgccagtaatacctgagagtacaagtgcttattaaaatagaaaatagcttgactgagtagatgtctggggtcaaaataatgtgttttagtgattcacattttcctactgccatgcatagggtgtatataattcctattaaacatgacattatacttttaaatagaaataacatttaatattctagtgtctttcccaaattttttaaaaaatgtttttattattttttaataatttttgtggatacatagtaggtgtatatatttatggggtacatgagctgttttgatacagacatgcaatgtgaaataatcatgtcatggtggcagaaatttaggtattgtgttcttcccaattgttgaa

SEQ ID NO: 752886 - DNA, 643 bp, Homo sapiens
taattttggaaaggtggtttcaagctggcacaactgcactccaccctaggagacagagcgagaccctgtcaaaaataaaaaaaaaaaacaagaagtgaagtcaagataggaggtaaattcggaagacaggaagtggtggtagaagacaagaagtgaagtcatacaggaagtaaagtcagaagacaggaagtgaagtaagaagacaggaagtggttgtagaagacagraagtgaggtcatacaggaagtaaaatcagaagacaggaagtgacgtcaaaccaggatttgcagtcggaggcaggcaagaagtgaaatcagaagacgggaagtggctgaggggaacgtcttttctctctcctgctcagcccgaagtgaacaggtagcatcaggtgtgccatttcagtgactgggcacagcccaggcacccacatctctctgcagcgcctattcttggaacaccagagacctctacactattttctgttgcttttttccttcattttcagagatgagatcctggattgaatgactactatggaaagtgattgaccaaggtaagtcacaactatcttgttctttaattttggtgttgtttgttatgacttgttagccgtctagcactcatagctttgcatttccactct

SEQ ID NO: 752887 - DNA, 415 bp, Homo sapiens; identical to SEQ ID NO: 742795

SEQ ID NO: 752888 - DNA, 659 bp, Homo sapiens
tcccagaacacccaggaagctaacaccttacacggtggtgctgcacggccccgcaggcgtggggaaaaccacgctggccaaaaagtgtatgctggactggacagactgcaacctcagcccgacgctcagatacgcgttctacctcagctgcaaggagctcagccgcatgggcccctgcagttttgcagagctgatctccaaagactggcctgaattgcaggatgacattccaagcatcctagcccaagcacagagaatcctgttcgtggtcgatggccttgatgagctgaaagtcccacctggggcgctgatccaggacatctgcggggactgggagaagaagaagccggtgcccgtcctcctggggagtttgctgaagaggaagatgttacccagggcagccttgctggtcaccacgcggcccagggcactgagggacctccagctcctggcgcagcagccgatctacrtaagggtggagggcttcctggaggaggacaggagggcctatttcctgagacactttggagacgaggaccaagccatgcgtgcctttgagctaatgaggagcaacgcggccctgttccagctgggctcggcccccgcggtgtgctggattgtgtgcacgactctgaagctgcagatggagaagggggagg

SEQ ID NO: 752889 - DNA, 622 bp, Homo sapiens
atggcccccagtgacctggacttcagcagcatgctgcttctggtgggatccagtaatcaggaagcagtgagcctgccccacctcataaacccagggaaccataggtgggataccacccccagaaaatgcaaagtctccacaaatggaatggcgagctcttcatcacttctctccccmaagtttgtcagttgcatctcttggatgcaacctattttccaactagaatctgcaatcctaatgcaaagagaatctgcacgtcattactacttagctttgctgtagagtaaagaaaaaaaacactagaacacagggtactttttttcttttttcagacagagtctcgctttgtcacccaggctggagtgcagtggtgcgatcttggctcactgcaacctcagcctccaaggttcaagcgattctcctgattgagctgagtagttgggattacaggcgtgcaccaccatacccagctaatttttgtatttttagtagagaccaggtttcaccatgttagccagactggtctcaaactcctgacctcaagtgatccacctgcctcaacctcccaaagtgctgggattacaggcatgagccaccattcctggcctcctgaagtttctta

SEQ ID NO: 752890 - DNA, 624 bp, Homo sapiens
tttggggttctaagacaaagaactggatccttgaagatactcaggtatgggttttttgttttgttttgttttgttttttgtttttgtttttttgagatggagtcgtgctctgtcattcaggctggagtgcagtggcgcaatcttggctcaccgcaacctctgcctcycaggttcaagcaattctcctgcctcagcctcatgagtagctgggcctagaggcatgccaacatgtccagctaatttttttctttttctttttttttttttgagacggagttttgttcttgtagcccaggctggagtgcagtggtgcgatcttggctcactgcaacccccacctcctgggttcaagcgattctcccaccttggcctcccaagtagctggaattacagatgcctgccaccatgcctggctaattttttagtagagaggggtttcaccatgttggccaggctagtcttgaactcctgacctcaggtgagccacctgcctcggcctcccaaagtggtgggattacagaggtgagccattgcacccggcctttttggtttttgctttttgggatggagtctcactgttgcccaggctggagtgcagtggcgcgatcttgactcactgcagcc

SEQ ID NO: 752891 - DNA, 624 bp, Homo sapiens
tttggggttctaagacaaagaactggatccttgaagatactcaggtatgggttttttgttttgttttgttttgttttttgtttttgtttttttgagatggagtcgtgctctgtcattcaggctggagtgcagtggcgcaatcttggctcaccgcaacctctgcctctcaggttcaagcaattctcmtgcctcagcctcatgagtagctgggcctagaggcatgccaacatgtccagctaatttttttctttttctttttttttttttgagacggagttttgttcttgtagcccaggctggagtgcagtggtgcgatcttggctcactgcaacccccacctcctgggttcaagcgattctcccaccttggcctcccaagtagctggaattacagatgcctgccaccatgcctggctaattttttagtagagaggggtttcaccatgttggccaggctagtcttgaactcctgacctcaggtgagccacctgcctcggcctcccaaagtggtgggattacagaggtgagccattgcacccggcctttttggtttttgctttttgggatggagtctcactgttgcccaggctggagtgcagtggcgcgatcttgactcactgcagcc

SEQ ID NO: 752892 - DNA, 624 bp, Homo sapiens
tttggggttctaagacaaagaactggatccttgaagatactcaggtatgggttttttgttttgttttgttttgttttttgtttttgtttttttgagatggagtcgtgctctgtcattcaggctggagtgcagtggcgcaatcttggctcaccgcaacctctgcctctcaggttcaagcaattctcctgcctcagcctcatgagtagctgggcctagaggcatgccaacatgtccagctaatttttttctttttctttttttttttttgagayggagttttgttcttgtagcccaggctggagtgcagtggtgcgatcttggctcactgcaacccccacctcctgggttcaagcgattctcccaccttggcctcccaagtagctggaattacagatgcctgccaccatgcctggctaattttttagtagagaggggtttcaccatgttggccaggctagtcttgaactcctgacctcaggtgagccacctgcctcggcctcccaaagtggtgggattacagaggtgagccattgcacccggcctttttggtttttgctttttgggatggagtctcactgttgcccaggctggagtgcagtggcgcgatcttgactcactgcagcc

SEQ ID NO: 752893 - DNA, 624 bp, Homo sapiens
tttggggttctaagacaaagaactggatccttgaagatactcaggtatgggttttttgttttgttttgttttgttttttgtttttgtttttttgagatggagtcgtgctctgtcattcaggctggagtgcagtggcgcaatcttggctcaccgcaacctctgcctctcaggttcaagcaattctcctgcctcagcctcatgagtagctgggcctagaggcatgccaacatgtccagctaatttttttctttttctttttttttttttgagacggagttttgttcttgtagcccaggctggagtgcagtggtgcgatcttggctcactgcaacccccacctcctgggttcaagcgattctcccaccttggcctcccaagtagctggaattacagatgcctgccaccaygcctggctaattttttagtagagaggggtttcaccatgttggccaggctagtcttgaactcctgacctcaggtgagccacctgcctcggcctcccaaagtggtgggattacagaggtgagccattgcacccggcctttttggtttttgctttttgggatggagtctcactgttgcccaggctggagtgcagtggcgcgatcttgactcactgcagcc

SEQ ID NO: 752894 - DNA, 587 bp, Homo sapiens
cgattctcctgtctcagcctcctgagtagctggtattacagttgtctgccaccatgcccagctaatttttgtatttttagtagagacggggtttcactatgttggccaggctggtctcgaattcctgacctcaggtgatctgcccgcctcggcctcccaaagtgctggaattataggcgtgagtcaccgtgcaccagcctgattatctattttttaaatttattttttaaaggcatgttttactctgttaccaggctggagtgcagtagggcaatctctagctcgttgyaacctccgcctcctgggctcaagtgatcctcctgcctccgcctcccgagtagctgggactataggcgtgcaccaccattcctggctaactttttctatttttggtagagacagggtttcaccgtgttgcccaggctggccttgaactgcggagctcaagcaatctgcctgccttggcctcccaaagtgctgggactacaggtgcgagacaccgtgcctggccataatcttttttttcttagacttataaggatccccattgtgtgggtctaaatttctttttagaaaacctttctgac

SEQ ID NO: 752895 - DNA, 587 bp, Homo sapiens
cgattctcctgtctcagcctcctgagtagctggtattacagttgtctgccaccatgcccagctaatttttgtatttttagtagagacggggtttcactatgttggccaggctggtctcgaattcctgacctcaggtgatctgcccgcctcggcctcccaaagtgctggaattataggcgtgagtcaccgtgcaccagcctgattatctattttttaaatttattttttaaaggcatgttttactctgttaccaggctggagtgcagtagggcaatctctagctcgttgcaacctccgcctcctgggctcaagtgatcctcytgcctccgcctcccgagtagctgggactataggcgtgcaccaccattcctggctaactttttctatttttggtagagacagggtttcaccgtgttgcccaggctggccttgaactgcggagctcaagcaatctgcctgccttggcctcccaaagtgctgggactacaggtgcgagacaccgtgcctggccataatcttttttttcttagacttataaggatccccattgtgtgggtctaaatttctttttagaaaacctttctgac

SEQ ID NO: 752896 - DNA, 587 bp, Homo sapiens
cgattctcctgtctcagcctcctgagtagctggtattacagttgtctgccaccatgcccagctaatttttgtatttttagtagagacggggtttcactatgttggccaggctggtctcgaattcctgacctcaggtgatctgcccgcctcggcctcccaaagtgctggaattataggcgtgagtcaccgtgcaccagcctgattatctattttttaaatttattttttaaaggcatgttttactctgttaccaggctggagtgcagtagggcaatctctagctcgttgcaacctccgcctcctgggctcaagtgatcctcctgcctccgcctcccgagtagctgggactataggcgtgcaccaccattcctggctaactttttctatttttggtagagacagggtttcaccgtgttgcccaggctggccttgaactgcrgagctcaagcaatctgcctgccttggcctcccaaagtgctgggactacaggtgcgagacaccgtgcctggccataatcttttttttcttagacttataaggatccccattgtgtgggtctaaatttctttttagaaaacctttctgac

SEQ ID NO: 752897 - DNA, 536 bp, Homo sapiens
ccacgcccagcctctctagaggattaagtaaagctgtgtctgtgacttttttagcaaatcaagtaccagcttcttggtgttttcctaagatcaacagccaggaataaagacagcagtggatttaaaaatagtgaagatsgtccattttatgtggtgtgtattctaccacactggggcaggccaggtgcagcggttcacgcctgtcatcccggcactttgggagacagaagttttgggaagatcagtttgtgagatgacactctgacaaagctggaagctgtggctcttcccagctcccgactagaaagaacacaaagcaaagagccccaggaagcaggtacccacagccttgtttatcagggagtttgagatcagcctgggcaacatagcaagacctcatctctacaaaaaatacaaaacaatcaggcaggcgtgcaggcgtggtggctcacgcctgtaatcccagcactttgggaggctgaggcgggcggatcacaaggtcaggagatcgagaccatcctggccaacacggtgaa

SEQ ID NO: 752898 - DNA, 536 bp, Homo sapiens
ccacgcccagcctctctagaggattaagtaaagctgtgtctgtgacttttttagcaaatcaagtaccagcttcttggtgttttcctaagatcaacagccaggaataaagacagcagtggatttaaaaatagtgaagatcgtccattttatgtggtgtgtattctaccacactggggcaggccaggtgcagcggttcacgcctgtcatcccggcactttgggagacagaagttttgggaagatcagtttgtgagatgacactctgacaaagctggaagctgtggctcttcccagctccmgactagaaagaacacaaagcaaagagccccaggaagcaggtacccacagccttgtttatcagggagtttgagatcagcctgggcaacatagcaagacctcatctctacaaaaaatacaaaacaatcaggcaggcgtgcaggcgtggtggctcacgcctgtaatcccagcactttgggaggctgaggcgggcggatcacaaggtcaggagatcgagaccatcctggccaacacggtgaa

SEQ ID NO: 752899 - DNA, 576 bp, Homo sapiens
tctatttatttttttgagactgggtctcactctgtggcctaggctggagtgagatggccagtcacagctcactgcagcctcaaactcctgagctcaggtgatcctcccacctcagcctcctgaatagctgggattacaggtgcagcccatcatgtatggctaatttttttgtttttgtttttgagacagtcttgctcttgtcacccaggctggagtgcaatggcgtgatcgtgcctcactcaccctccacctccctagttcaartgattgtcctgtctcagcctcccgagtagctgggattacaggcacctgccaccacacctggctaattttttgtatgtttagtagagacagagtttcaccacgttggccagtctggtctccaactcctgacctcaggtgatccacccgcctcggcttcccaaattgctgggactacaggcatgagctaccacgcccagcctatgcatggctaattattaaatatttttgaagagatggcatcttgctatgttgcctaggctggtatcaaactcctggcccctagggatccactggcctaggcctctcagcctg

SEQ ID NO: 752900 - DNA, 593 bp, Homo sapiens
cagccttgagcactctgcactgtgtaatcaggctttggctcttttcttataacagatattttgttccttaagggcagagatctatgttttcccactgcttaatgagtgctaagcaaatgggtgttgaatgtatgagtttagaaaatccccatgcatcarttttctcagaatatattatttttatttcaaatagaatggcttttgtatttttaaatattgtttcccttaaataattattttagtgttttgcaaaatcatttgctttccaataaacctcccagacaattttcccaattaattctggttttatggagattataccttttattggacagtatattttactggacatgatttacacgtctagttataaaatgtctgcccacaagcttcacaaaatgcatacacttgattaacaagagatattctacaaagatttagccagtgcagccttagctgtatacaaaatgggatacaatgagtaataaggacttaggcaaggattacaacaattgttcttttcttctctcacgttcagtttggctctactgttgctaaccttcccaaaagggtgaaatccaagtaggagtgct

SEQ ID NO: 752901 - DNA, 445 bp, Homo sapiens
tctttgttaagcaaggacctcatgttaatgatggctgccaaatagaaatatgatgggagaaagcatatggaagggaagaaaggacactccatcagaagatcaggaaatgaaatagttggtcttattgcatccaaaaagtagatgaaatagtgaagataaggctgccacttctaagtgcctgatactrcagaggactggctcttcaaaacaggccgctaataggtaattttcatccctccgtagagaagctggatgtatcttcacatccacatttcccccattttagagatgagaaaatagcccaaaaggatgcataaggatcctgtaatcatttaacaaactgggagactcaagagcagaaaaagtcaggctgcgtcattgctatcagtcaatcattaacttctaagctcaacgcagtcatttgaacttgtcactagatccttga

SEQ ID NO: 752902 - DNA, 445 bp, Homo sapiens
tctttgttaagcaaggacctcatgttaatgatggctgccaaatagaaatatgatgggagaaagcatatggaagggaagaaaggacactccatcagaagatcaggaaatgaaatagttggtcttattgcatccaaaaagtagatgaaatagtgaagataaggctgccacttctaagtgcctgatactacagaggactggctcttcaaaacaggccgctaataggtaattttcatccctccrtagagaagctggatgtatcttcacatccacatttcccccattttagagatgagaaaatagcccaaaaggatgcataaggatcctgtaatcatttaacaaactgggagactcaagagcagaaaaagtcaggctgcgtcattgctatcagtcaatcattaacttctaagctcaacgcagtcatttgaacttgtcactagatccttga

SEQ ID NO: 752903 - DNA, 579 bp, Homo sapiens
caatgctgtatggaataccatgacagtgggtaaggcattccttgagttcacaaatggtagtcttggcagaagcactgggtgcaggataatcaaacccatagccgtagtaagtgtgtattccagtgaggacaaacctctgccctttccatgatgaaagatgtccaatataatcaacttaacaccaggtagctggctgatcaccctgaggaatggtgctatatcgcgggctcagtgttggtctctgctgctggcaaactgggcactcagcagtggccatagccaggtcagccttggtgagtggaagtctatgttgctgagcccatgtgtaacctccatccctactaccatggccactttgttcatagrcccattgggcgatgacaagggtggctggggaaagaggctgagtgttgtccacagaacgggtcatcctatccacttgattattaaaatcctcctctgctaaggttgcccgttggtgagcactcatgtgggatacaaatatcttcatggtttttgaccactcagagaagtccatccacaaacctcttccccaaatttctttgtcaccaattttcc

SEQ ID NO: 752904 - DNA, 462 bp, Homo sapiens; identical to SEQ ID NO: 746906

SEQ ID NO: 752905 - DNA, 491 bp, Homo sapiens; identical to SEQ ID NO: 746908

SEQ ID NO: 752906 - DNA, 552 bp, Homo sapiens
ctcactgcagatctgatgggaaagtcaccaatccttagtacctaatgaatatgcttgcctaattttctaaaacacagctctttatacaaagagcttagttacacctattctgttaacatttatctactgctgacatctgaatatatttcttaaggatgcagggaactaaaccacatactttatatyctaagcactgatgtttgggtgttctgattccacccccagctacatgccttttgataaattacccactgatactttcatcttcccattcaaaaggagtatatataagaaagtgtttcccgaactaggatgaatttgtaagcatatactgagaacattctatttgaagataaaacaactaagaatcttaggggaatatggaaataaatagaacatccttgcactcaatagactgataatatagtatggtgaagcaaaccaaacacatatacataaaaatacaaagttaccaatgaaatgttaatcatgtaatagaaattaaaggtatgaggctgaagaggacccactacacaagcctgaatggctact

SEQ ID NO: 752907 - DNA, 602 bp, Homo sapiens
taaattcactttaatatgtgacataaagttgatatttttaaaagatttggtagacatgagcttgtgtttttggggcaataatgatcattattttgctgaattcctttccgttattctgtttctttctgtactgtacagttcaggaagttaatcctcaaaggtttggtatcattgttttattaatttttttggtcagagaataagactaattagtttttctagctggctgtgtcatgctaagaggttttagcttactttaggggttataatttgatctataggataaggaaatctatatggatgagtaattttgaaatgcacattctttccttcttttattgacttttgactctgtttttatgccacgattagttacaaggtgcacaaaaactttttctagcttgagtaaaaaatgcattttatttgaaaggcactaraaaatctgaggaacataaaccagagctctgccaggaacatgactcagctccccaaactccaatgtgtggagtcttatttgaaaattcaaaatattcagatggaggaatctgacagagaaagagagagaaggagtggtgactatgaggaggggtcagagagtagcc

SEQ ID NO: 752908 - DNA, 580 bp, Homo sapiens
gtttgataatttgagtccataaaacaaactgacaatagacaggttaacagccagaagggcatgtgaatttattaacatgcccatggacatgggagtcccacaaacatgagactcaaaaaagggtcagctgactgaagtttttagactatcttccattccaggcgatggaaggaacaggggctaggggttccccgggggaggaggcaacaaggttatgggagagtgaaggcaggtaagcctggtgagcaaacggtgtcttgttatgtggataaaactctcctataaccctggagctgccctcaggaagagcagatgggaatggggyaaaagtctctatcagaccttcagcagcgtcagactttagcctttttttcccatgagttaacctttcctagatccggatgaggaagacaagggtgcctcggagcctgtctgcatggtctgtctacctcccgaatgcagattttccctacagatgcaaatctgcctcacaaaggacagcttttcagagctattcctgtgttctccagcccctctgaataccgatctcgaaatatgccaaagaagcatattttagggt

SEQ ID NO: 752909 - DNA, 649 bp, Homo sapiens
attccattccagccctcaatggaatgactgatgtccgcccccattggagaaggtgatcttctttactcagccactaattcaaatgctaatctcttccagaagcaccctcccccacacagaaaaatgtttcaccagctatctgggcctcccttagtgcagtcaagttgacacataaagttcggcacacaatgtgttgcatccccacttgctcccagcaggtgcaagcttctttctttcatagcagccccacagctttctgtatcctaggttggcacaactgctttggcagggcgtatgttagaaacctctggttgggccatcatagtgtctcagtttgtgcttgtgtcaccgtttctgaacattaatccaattgccgtccatcctcacataaatggatgcctgctctatgayttatgtgttcctcatccttttgtggaattccactgtctgcttccatctttctctctttcattcttatggccttagctgctgcctggagatgcatgaccacctgggaagcagatcctgaaggtgtcaggaaccaggctggagacaacgctgcagtaagatttagacaaaatagaaatctggggtggtgagagggtcccaacttcattgcgattatgagaatttcaaagaagtgacgtct

SEQ ID NO: 752910 - DNA, 630 bp, Homo sapiens
ggtaggcctttgtgcctctgtctgtgttttaatctgtattctagcatgtgtcagaattcccttcctttttaaggctgaacagtgttccattgtacgtatctacattttatttatctattcatctgtcgctggacacttgggtgacttcctcctcttgggtatagtgaataatgctgctataaacatgggtgtgcagatatctgtttgagtccctggcaaattgtacttaaaaaaatatattttgaagaagatagcttagcttaaaaaaaaaaaaaagaagaaagaaaggtggtggctgrgcggcattcagctatcacctgaaacctaacgtcttatgtcactctttggggggaactttgtccaaatcatgcccatctttttagaccgctcaagctgtctgtcttctctggagctttctcggacctctgcagttcatagtgacctttctttatataaccctggagcactcattagacagtaaaataatcagactaatggctcatttagccaggaatcacatcctgtttcatctgttttaatgtctagagaagttaactcttaaattttatgtttctctatctaaaagactcacttcctaagctatattataaacttcccaggcacacagac

SEQ ID NO: 752911 - DNA, 582 bp, Homo sapiens
aaaaatttctggagctcacacaaggctaggcataatttatattctcaacagccagagtggaaaaagctctttatacttgatgaaagcagaaattagaaattgttaaattggataaaaaagcaagacccaattatatactacagacaagaaacacatttcaaatataaataaataagtaaaaagtaaaatattgggaaaatgatataycatgctcacactaatcatagacacctgcagtggctatataaatataaaacaaagtagacttcagagccaaaaatattaacagagataacaagggtcatttcataaaaataaaaggaaaatcatcaaaaggacaaaacaattataaatgtttatgcatctaataacagagcttcaaaatacatgcaatgaaatgtgaaagaactgaaagaagacagacaaatccaggattatagctgaagatttaaatattcctctgataatagattgaataaatgggaagaaaatcaggaatgatatagaagacttggataatactatcaaccaacttgacctcactgagattgcaaaaactcttcacccaacaggagcagagaa

SEQ ID NO: 752912 - DNA, 635 bp, Homo sapiens
gattcccaaacagcattgataaggaaaggctgagaagggagagatgagggaaataatcaaactataggttgagcatccctaatctgaaaatccaaaatcttaaatgatccaaatcagaaactttttgatcacaacatgacaccacaagtggaaaacaccactcctgacctccaaatgcagtcaaaatgcagtcatgcaacatagaattgattccgtgtccctaagagaaaggtaaaatttccttcaggctatgtatataaggtgtatattaaatataaatgaatttaatgtttagacttgggtcctatacccaagataattttgtatctgcaaatattcccaaatctgaaaaaatttgaaatctaaaacacttctactcccaaacatcttggttaagcgatactcagtygatacttaatctccttccacttagttgcaatagcactgtgacagtgcaccttcagatattttagttaccaaatccactggccttttgtgttgggtgattgccttttaaccttgcagcagttgatgcagtttatcaccaacagatggatcttctaaaatcagatcatgttactcaccttcctagaaaccttcatgggctccctattactcccagttcctttagtgta

SEQ ID NO: 752913 - DNA, 513 bp, Homo sapiens
ctgtgtcttctgaaatgtgtatttttcacttaactccctacctccctcctcctaccataatccccatttagtagagaaactaataaaaataggcactaaagagaattcagaaggaaagtggatactgctagaccagagasaaatgttacctaaaccccttatgagggaactcttctcccaactacatcaggggacccactgggggccccaggccatgtgtgacgcagttctcagagtttatgattgtattggaatttataccctggccaaacacgttacagatagttgcttagtatgtaagaaaactaatagacatactataaaaagattacctctagagggaaggaatccaggcttaaggccatcccaaagtatccaggttgattacacagaaatgcctctaataggtcgtctaaaatatttactagtgatagtagaccacctcactcactgggtcgaagctactccttttcaaatgcaacagcaaataatgtagttaagaccctaattgaa

SEQ ID NO: 752914 - DNA, 672 bp, Homo sapiens
gctccaaagtcagatggctcaggttggatcctggctccacacctcaccagccactgccttcttcacctgtctggaacttaatttcctggaacttaatttccttttctataaaatagaaacaataataaatggacctcacaggattcttgtgagggtgaaatgagatcatgcctatgaagcacttagcagagggcctggcaggcaggaagcactggcatatgcaagtaattttttattgttgagcctcttgggtttgtcatgtagattatcacatctgtaaattttataatccttcttaacaacattgacatctcctctctctctctctctctctctctctctctctctcyctctctctgtcaactaagattagtgggttctttttcttttcttgttgaactgaagtgtccaaaattttgaaaagagtgttaaataataatcatgttattgaatcccaagccttatgcctgtgactttattaggtaatgttttaccctttctctgtgaaatatgatgaccatcatcattttaagaaaggtattcctgatactatttgctttaaaagttttttatcttccttatttactaagatgtttttcaaggaataagtagaaggtagaaaattttctggaatccatcaagtgtaagtttttttctctttagactactgat

SEQ ID NO: 752915 - DNA, 643 bp, Homo sapiens
tacagtcattccaaataggagaaattggccaaaacaaaggggctacaggccccatgcaagtccaaaatccattggggcagtcaaatcttaaagctccaaaatgatctcctttgactccatgtctcatatccaggtcacactgatgtaagaggtaggttcccatggtcttgggcagctccacccctgtggctttgcagggtacagcctcccttccagctgctttcatgggctggtgttgagtgtctgcggctattccaggtgcatggtgcaagctgtcagtggatctaccatctagggcctggaggacagtggycctcctctcacagctccactaggcagtgccccaatagggactccgtgtgggggctccaaccccacatttcccttccacactgctttagcagaggttctccatgagagccctacccctgcagcaaacttctgcctggacattcaggtgtttccatacatcctctgaaatctaggcagagattcccaaacctcaattcttgacttttgtgcactcataggctcaacaccatgtggaagttgccaaggcttgaggcttgcaccctctgaagccacggccctgagctctacattggcccctttcagccatagctggagtggctgggacgcagtg

SEQ ID NO: 752916 - DNA, 649 bp, Homo sapiens
aagtcagtagcactgctgtacaccaacagtaaccaagctgagaatcaaatcaagaactcagcctcttttacaatagctgcaaaaaataaaataaaatactgaggaatatacctgttaccaaggaggtgaaagacctctacaatgaaaactataaaacactgctgaaagaaatcatagatgacacaaacaaatggaaacacatctcatgctcatggatgggtagaatcaatatcgtgaaaatgaccatactgcsaaaagcaatctacaaattcagtgcaattcccatcacagtatcaccaacattcttcacaaagctggaaaaagcaatcctaaaattcatatggaatgaaaaaagagcccgcatagccaaagcaatactaagcaaaaagaacaaatctagaggcgtcacattacccaacttcgaactatactataaggccatagtcaccaaaacagcatggtactggtataaaataggtacataaaccaatggaacagaatagagaacccagaaataaagctggatacttatagctaacgagtcttcaacaaagcaaacaaaataaagtggggaaaggacaccccattcaacaaatggtgctgggataattgtcaagccacatgtagaaaaaatgaaactggatcctca

SEQ ID NO: 752917 - DNA, 649 bp, Homo sapiens
aagtcagtagcactgctgtacaccaacagtaaccaagctgagaatcaaatcaagaactcagcctcttttacaatagctgcaaaaaataaaataaaatactgaggaatatacctgttaccaaggaggtgaaagacctctacaatgaaaactataaaacactgctgaaagaaatcatagatgacacaaacaaatggaaacacatctcatgctcatggatgggtagaatcaatatcgtgaaaatgaccatactgcgaaaagcaatctacaaattcagtgcaattcccatcacagtatcaccaacattcttcacaaagctggaaaaagcaatcctaaaattcatatggaatgaaaaaagagcccgcatagccaaagcaatactaagcaaaaagaacaaatctagaggcgtcacattacccaacttcraactatactataaggccatagtcaccaaaacagcatggtactggtataaaataggtacataaaccaatggaacagaatagagaacccagaaataaagctggatacttatagctaacgagtcttcaacaaagcaaacaaaataaagtggggaaaggacaccccattcaacaaatggtgctgggataattgtcaagccacatgtagaaaaaatgaaactggatcctca

SEQ ID NO: 752918 - DNA, 623 bp, Homo sapiens
actcaagaaggtatagaaataggcatatggtaggcatatagatgtagtaggcttggctttaatgtgtcaaaaaaaaaaaaaaaagtcctgggataggaatccatgtccgtctcatcacaaaacctggacccttaaatacaatcactaccacacacgatatggtacaaagacagaatttgtgagagacagtaagatacggtgttgaatagtattgygtttgcaatatactttatagttcaaaaacttgttctattttcaaacttgttaaataaatatgccaattaaaaatagtttgtaaagctcatttgggtaatacagccagaaagaggaaattactaattcagtgaacacatagaataactgatgtaattttaaaatccaagcaaagatgcccatcagtaacaagaaattttccaaactaaggaacacactgaaagtttaaaatttgtattatgaaattcacttacctagaagtagctgttgaatttttgaagccagcttgattatcagagaaaattacttcagtgtgaacattttttttaaaaaaagggaagggaagtaaatatgaagtaaagaaaggcctggaaataaaggaagaagagaatttttgagagactgaagga

SEQ ID NO: 752919 - DNA, 623 bp, Homo sapiens
actcaagaaggtatagaaataggcatatggtaggcatatagatgtagtaggcttggctttaatgtgtcaaaaaaaaaaaaaaaagtcctgggataggaatccatgtccgtctcatcacaaaacctggacccttaaatacaatcactaccacacacgatatggtacaaagacagaatttgtgagagacagtaagatacggtgttgaatagtattgcgtttgcaatatactttatagttcaaaaacttgttctrttttcaaacttgttaaataaatatgccaattaaaaatagtttgtaaagctcatttgggtaatacagccagaaagaggaaattactaattcagtgaacacatagaataactgatgtaattttaaaatccaagcaaagatgcccatcagtaacaagaaattttccaaactaaggaacacactgaaagtttaaaatttgtattatgaaattcacttacctagaagtagctgttgaatttttgaagccagcttgattatcagagaaaattacttcagtgtgaacattttttttaaaaaaagggaagggaagtaaatatgaagtaaagaaaggcctggaaataaaggaagaagagaatttttgagagactgaagga

SEQ ID NO: 752920 - DNA, 623 bp, Homo sapiens
actcaagaaggtatagaaataggcatatggtaggcatatagatgtagtaggcttggctttaatgtgtcaaaaaaaaaaaaaaaagtcctgggataggaatccatgtccgtctcatcacaaaacctggacccttaaatacaatcactaccacacacgatatggtacaaagacagaatttgtgagagacagtaagatacggtgttgaatagtattgcgtttgcaatatactttatagttcaaaaacttgttctattttcaaacttgttaaataaatatgccaattaaaaatagtttgtaaagctcatttgggtaatacagccagaaagaggaaattactaattcagtgaacacatagaataactgatgtaattttaaaatccaagcaaagatgcccatcagtaacaagaaattttccaaactaaggaacacactgaaagtttaaaatttgtrttatgaaattcacttacctagaagtagctgttgaatttttgaagccagcttgattatcagagaaaattacttcagtgtgaacattttttttaaaaaaagggaagggaagtaaatatgaagtaaagaaaggcctggaaataaaggaagaagagaatttttgagagactgaagga

SEQ ID NO: 752921 - DNA, 552 bp, Homo sapiens
taaattcatggggttaagagtggtcaaaggcattttctcatatcataaaagctttaaaaggcagtcccttactggcaaggtactttctgacttcagagacaaggcgctgatggaaccagtccagaaaaaaaaaaaaaaaattaatcgtcttgtttttcaggcctgcttgttgtatatctcaaagactgacagctaatgtttgttttgtcttctcaaggcttggggattagcagctttataaatgcagaaagtgctgctcacaaagctaatcgtgtttataccaaatagtagttagcctatcccttgctgccttaaactttagtgctcacatttttttcctcrctaataaatgttctttatgtctttttcccccagaatatgtcacatttatctgcattgaaaacctactcaggcagatattctttcttctcaatgatctttaaattgatcttgaaacttttctactgccgcttggtcagcaaacactatttctcctattatcttgacatttttgaagccaaatatctttctaaaattatcgaaccatccttt

SEQ ID NO: 752922 - DNA, 628 bp, Homo sapiens
tgatctttgatgaagttgaaaaaaataaacaaggaagaaaggagatacccttttcaataagtagtgctgggaaaactggctagccatatgcagaataattaaagtggaatcttatttctcattccatacaaaaattaactcaacatggattaaatatttaaacgtaagatcagaaattataaaaattctggaagaaaacctaggaaaaactcttcaagacatcagcctaaccaaaaatttatgacaaagaccacaaaagcaaatgcaacaaaaataaaaataaataaatgcgacttaattaaactaaaaagtttgtgactagcaaaagaaatagtcaacataataaacaggcaacctacagaatgggacaatatattcacaaattatgcctatgacaaacaactaatatctggaatctacaaggaactcaactcaacaagaaaaaaawcaacccaattaaaaactgggcaaagaacatgcacagacgtttgtcaaaagaataaaaatacaaaaggccaaaaaacatgaaaaaattctcagcatcactaatcaccacagaaaggcaaattaaaaccacactaagatactacattatactagtcagagtagcttttattaaaatgtcaaa

SEQ ID NO: 752923 - DNA, 557 bp, Homo sapiens
ttccttggatggaaagctgattctaagagtggggcaggggaaacacaagatgagcctggagtatcttgtagtaccaaaaagtaaggaagtactagaaagggggtgtgtgtgtgtgtgtgtgtgtgtgtgtgtgtgtgtgactgtgtgtgtaaagggcacaacagctaatccaaaagagcacccaatggccaatgtgtggacaatttgaacaayatattaactctagcattgaattgtgatctgaagaatgaaataaatctccatgagtccatactgatataagtaaattattgaataaataaataggggagaagtgacaaatattccttgcagaataattctaaatacataatcctttttccaagaggtagagattaactcttctcgctttgcgtgtgggctagacttagtattcacttccaaaatataaagaacaaaaaggggaaaatagtaatatagaaataaatacttgaatagtgttaacaggaaatttgaggaaaagagtacttcttttcacaacttcttcggtatgatctgagtagataaatacaagcata

SEQ ID NO: 752924 - DNA, 482 bp, Homo sapiens
atgagctgcaaaaatattcaggtgaaaattccaaggagagagcaaagatcatgaaaaagtgagaggaggttattgacagcggctcatgagtgagtgagggtgataagtagcatggaaaccatgggtgccagatgggccttaaatattcctagggaamattaaagagctctaattgacaaaggcatacaatccactctgtaattttctaagatcaccttgactacggggtgaagaatggattgtaaagggaaggtaggaagcaggaaaccagttgaaaggttactctagcaacccaggtgagagatgagggtggcttaaaccaatgtcttggggaagcttacattctagcagccattttgtaatgtttatttgtgcagctgtttctttctttcaaagattttcttcatgaaggtaagggttatgtatgtttcatttaaccagtgctccccaaactgaactgattacagaaatataatgtatat

SEQ ID NO: 752925 - DNA, 616 bp, Homo sapiens
ttcccgtctccttaaacacatcatgcatatatacatatctaggaaagttgctacagacagattaagtcccccgctgacttcaaaaacccatcaacgctgccccaagctcccaggtttaaattcaaataggggcaccataatagtcttggagcattaacagcaattagcttgacaatacattaatatttttatgaactgcagtatttaaaagttcaggaatttctgctcccagattcttgaggaatttcagaatcacagatcccactttcagcttcctygtcgcctcacttttactgccctgggtagacatgtcaaggccaaaaccactggcaagaaaaggcaagtcaaccacgtgccacactgtttcaataaccctgtagatcttaagtcagtggagtcaacagtgtccccaaatcaatgtcccagtttgagtaaaccattcattccttccatgagtacataagtggaaatgtcagagaacggtgtaattggcatactaagagaaaaacatgaatacttttgcaagataaaagcagtgccgggtgagggggtgggggagttatcttttgagtccctgtggttttaatgtggcgttgtcagctggtccctattaaaa

SEQ ID NO: 752926 - DNA, 552 bp, Homo sapiens
aatgtttcccagaatatatgtgtgtgttacatttagaggaaacagaagtagtattgacttgtttctatcaccagaggtctatttagtaactatattttgtggaaaatatcgatatattttatccattcaacagacatgatttgagagcataccatggagacccaaccctgccagtgtggcaggtggtataatagaagaaaatagcaaacttggtgtatctgtgtttgcgcacatgtatgtatgtgaggggcactaaggatgactttacagaggttggaacttttgagtasagttgccaagatagggagagttcactaggaaaacagaagggaagttgatttttttttttttttttttgaaatagagtcttgctgtgtcgcccaggctggagtgcagtggtacaatctcggctcactgcaacctccgcctcctgggttcaagtgattcttctgcctcagccttccaagtagctgggatcacaggtgcgcgccaccatgcccagctaatttttgtatttttagtagagacagggtttcaccatattggccgggc

SEQ ID NO: 752927 - DNA, 552 bp, Homo sapiens
aatgtttcccagaatatatgtgtgtgttacatttagaggaaacagaagtagtattgacttgtttctatcaccagaggtctatttagtaactatattttgtggaaaatatcgatatattttatccattcaacagacatgatttgagagcataccatggagacccaaccctgccagtgtggcaggtggtataatagaagaaaatagcaaacttggtgtatctgtgtttgcgcacatgtatgtatgtgaggggcactaaggatgactttacagaggttggaacttttgagtacagttgccaagatagggagagttcactaggaaaacagaagggaagttgatttttttttttttttttttgaaatrgagtcttgctgtgtcgcccaggctggagtgcagtggtacaatctcggctcactgcaacctccgcctcctgggttcaagtgattcttctgcctcagccttccaagtagctgggatcacaggtgcgcgccaccatgcccagctaatttttgtatttttagtagagacagggtttcaccatattggccgggc

SEQ ID NO: 752928 - DNA, 636 bp, Homo sapiens
actggtgacttcacttttgagtgcaactgccttccaggtaaggagctccctagtgtcccaggattaggggacaaacccctagcacaggaggtagtgggtgtggctcaattgctgtttttaggaagcccaaggaaaaagggaagtgagaattttgtgtggggtgggttgctagtgagggaggagttttatgggcccactgtggtccataaactgagcaggggataatttagcatgtcagggtttatgatgatgagtggctagaaaattgtttattgtcccttttgtagaaacagtgagaaataagaggaacagagctctgggaaagrgacaggcaagtctggaatggaaaagaacacgatgagaattagacactggaaaatatgtatgtgtggttaataaagtgctttaaactgaattgacattaacagtaggtgatcaactttcctatgtgcttgtgcttttgcttttgatggagtaattcattgttttcttatccacctaaatgcacccagctgcccttgattttctctgggctactggccttcacaaccctctcccatgtaccctctctgactttggggtaaccctcccctaacttaaagctagagaattctgaaactgaggaggggatcctct

SEQ ID NO: 752929 - DNA, 636 bp, Homo sapiens
actggtgacttcacttttgagtgcaactgccttccaggtaaggagctccctagtgtcccaggattaggggacaaacccctagcacaggaggtagtgggtgtggctcaattgctgtttttaggaagcccaaggaaaaagggaagtgagaattttgtgtggggtgggttgctagtgagggaggagttttatgggcccactgtggtccataaactgagcaggggataatttagcatgtcagggtttatgatgatgagtggctagaaaattgtttattgtcccttttgtagaaacagtgagaaataagaggaacagagctctgggaaagggacaggsaagtctggaatggaaaagaacacgatgagaattagacactggaaaatatgtatgtgtggttaataaagtgctttaaactgaattgacattaacagtaggtgatcaactttcctatgtgcttgtgcttttgcttttgatggagtaattcattgttttcttatccacctaaatgcacccagctgcccttgattttctctgggctactggccttcacaaccctctcccatgtaccctctctgactttggggtaaccctcccctaacttaaagctagagaattctgaaactgaggaggggatcctct

SEQ ID NO: 752930 - DNA, 606 bp, Homo sapiens
atgtgacacgcagtgttttccaacaaagtaagaaagttcagtatgctgccaggcatcacagatgcgccacacgtgcatcgggtaccaagggtgttctgttcgtcaaagttctgtttgacaaaataaaacttttatcattttgaaaatgtcattagctacaggagttttcaaaaggggccaacaaaattaaactttaaaaatctgtttggtgtgtacataacacacaaaacaagagctgactgcactgaaagataccagggattcatagagttgtatgctgaaaggaaatggcattkctgtgagtttatttatgacctacttcaatatattggaagaaatgtcagcaatttggaggttggtaacgtaatttaacagaaaaacagcttcaattttctaactctaccacaaaccccaaatcagcctgaccatttctagggcacacatctgctttgcttggtaacaatagcagcagcaacaataagtaatgacaaatgatcacatataaggaaccatgttaatgtatcactagatattaaacagggcattactttactggtatatgtgtccaatttgaataaacaaattagtatatgtgtcaaatttgga

SEQ ID NO: 752931 - DNA, 643 bp, Homo sapiens
caaaataaaacttttatcattttgaaaatgtcattagctacaggagttttcaaaaggggccaacaaaattaaactttaaaaatctgtttggtgtgtacataacacacaaaacaagagctgactgcactgaaagataccagggattcatagagttgtatgctgaaaggaaatggcatttctgtgagtttatttatgacctacttcaatatattggaagaaatgycagcaatttggaggttggtaacgtaatttaacagaaaaacagcttcaattttctaactctaccacaaaccccaaatcagcctgaccatttctagggcacacatctgctttgcttggtaacaatagcagcagcaacaataagtaatgacaaatgatcacatataaggaaccatgttaatgtatcactagatattaaacagggcattactttactggtatatgtgtccaatttgaataaacaaattagtatatgtgtcaaatttggatccagcagggcacttcaaaacttaagtaatcatgactcaactctaaatactcaattttaaagtagtttctaaacttcagcatattgacattccgggccagataattcttttttgaggaactcttctgtgtaggatgtttagcagtatccctggcc

SEQ ID NO: 752932 - DNA, 643 bp, Homo sapiens
caaaataaaacttttatcattttgaaaatgtcattagctacaggagttttcaaaaggggccaacaaaattaaactttaaaaatctgtttggtgtgtacataacacacaaaacaagagctgactgcactgaaagataccagggattcatagagttgtatgctgaaaggaaatggcatttctgtgagtttatttatgacctacttcaatatattggaagaaatgtcagcaatttggaggttggtaacgtaatttaacagaaaaacagcttcaattttctaactctaccacaaaccccaaatcagcctgrccatttctagggcacacatctgctttgcttggtaacaatagcagcagcaacaataagtaatgacaaatgatcacatataaggaaccatgttaatgtatcactagatattaaacagggcattactttactggtatatgtgtccaatttgaataaacaaattagtatatgtgtcaaatttggatccagcagggcacttcaaaacttaagtaatcatgactcaactctaaatactcaattttaaagtagtttctaaacttcagcatattgacattccgggccagataattcttttttgaggaactcttctgtgtaggatgtttagcagtatccctggcc

SEQ ID NO: 752933 - DNA, 616 bp, Homo sapiens
atatgtgtccaatttgaataaacaaattagtatatgtgtcaaatttggatccagcagggcacttcaaaacttaagtaatcatgactcaactctaaatactcaattttaaagtagtttctaaacttcagcatattgacattccgggccagataattcttttttgaggaactcttctgygtaggatgtttagcagtatccctggcctaacccattagatgccagtagcaccccacatttgtgacaaccaaaaatgtctctagacattgccaaaagtcccttgggtgacttcgtgctctaaagctatgaatctagtgggaagaaattagaaaccagaatactacatagaaaatatttttgagtagacaggactattgattcatctaattagttcaggtagttagctgatcatttttcttgtaattcaaacaaacccttccccaattcttagtaatagctgttgattgagtgccgattgtggacagtaaacataatttgcatagtcaatatagcttggagattaagcactcggctctgtagtctgggttgcaatcctggctctgccatctgctctctgtgtaacctggggtatgtttctttacctctctgccattgttcc

SEQ ID NO: 752934 - DNA, 616 bp, Homo sapiens
atatgtgtccaatttgaataaacaaattagtatatgtgtcaaatttggatccagcagggcacttcaaaacttaagtaatcatgactcaactctaaatactcaattttaaagtagtttctaaacttcagcatattgacattccgggccagataattcttttttgaggaactcttctgtgtaggatgtttagcagtatccctggcctaacccattagatgccagtagcaccccacatttgtgacaaccaaaaatgtctctagacattgccaaaagtcccttgggtgacttcgtgctctaaagctatgaatctagtgggaagaaattagaaaccagaatactacatagaaaatatttttgagtagacaggactattgattcatctaattagttcaggtagttagctgatcatttttcttgtaattcaaacaaacccttccccaattcttagtaatagctgttgattgagtgccgattgtggacagtaaacataatttgcatagtcaatatagcttggagattaagcactcggctctgtagtctgggttgcaatcctggctctgccatctgctckctgtgtaacctggggtatgtttctttacctctctgccattgttcc

SEQ ID NO: 752935 - DNA, 578 bp, Homo sapiens
ctgaaaatgacttaagtacaggcacctcctaggaattatacccctaataaatgattgtattgaacatttgtttaaactgatgtaaagtactttgaaggttaacatcctttccctccctcacaatattaagtagtgtagcttggaggttgaaagcagattctgggttcaaatccaggttctgtcagattctaccacttaccagctaaatgacgttggacaagtcacaatatctctaagcccttatttctttacttgtaatgtgggagtacaatctgcccccatgaagctcttaaaaggatacataaaaataaagtgtgacaaacgtcttgcattcaaatgactacttgatggtattttataagtgacaaaatagatgcccagagaagttaatctcctttcttgggtccccccgagtgttaacagcagtgcagggaagsagtcaagcatcctgtctctggcccatggcttttttatccatgtggagcaccagtcccacacagaaatcatgtttaggctacaagtgatttttcatatatatcttctttaatttgcatttgtctgccaaatccacacattag

SEQ ID NO: 752936 - DNA, 584 bp, Homo sapiens
tgtaaactcaggaaggtaatgcaaaaccaggaaagtaaatctgcttcttatacctctcaccccacatcagcctcctcctctctttttacttcattctcttcagctttaaaaaaacagaggtaaatgtattttcagttgtctttggcacagccctgttttggaaatcatagacagccagctggaccaggagtcaggaagccaggggctctcatctggatctgacattggttaactgtgggccttcaggaaagttagatcagtcctccaggcttttgttccttttctgtacaatgaaaagaagactagagtatttatgaagtgcytactgtgcaccatgtgacatcaattgtattactttatttaatccataagagaaagaactctactagctaggaatatagatctgtagtattcaaatttaaaaatgctcaagttgcccaaggccacagaggtggcaaagaggaagctgagttggaatttgaacctaggaccatcagattccaaattttatgcttgaatgagttatccagtacaatctataattttcttttctgttctaatattatgctgttatgtgagcacca

SEQ ID NO: 752937 - DNA, 552 bp, Homo sapiens
ctgtctgaaattccccttgtggttttgctcacatctggtgtttttcacttctctttctaaacacgtgctttgatcctattgctgctacagcagaaagatgtccatggttccaaggagcatagctaatttagtgagaggtgaaagatactcctctcaacaggacttctaaaaataaacagtatcatagcctcacaatgtcatgcttgaagcacttcccayaaaacccccaatttagtaacttctacagtatctctctacagccccaaaacctctaacatgcctggacttctagcccctcttctcaaatcctcaacccatttgaagtcttcctcatgttgttcttccttttagtcactcttgaagtagactgcaagggtgacaaatggttaaatgctttccataagagctctgtagtcgtgtttctccatcagctcacacacactaagctgggagctacgtatatttacttccataaaaccttatctaccagctttcctgttttatttattttagcaaactttgttcctcatttctgcccctactttattttag

SEQ ID NO: 752938 - DNA, 552 bp, Homo sapiens
ctgtctgaaattccccttgtggttttgctcacatctggtgtttttcacttctctttctaaacacgtgctttgatcctattgctgctacagcagaaagatgtccatggttccaaggagcatagctaatttagtgagaggtgaaagatactcctctcaacaggacttctaaaaataaacagtatcatagcctcacaatgtcatgcttgaagcacttcccacaaaacccccaatttagtaacttctacagtatctctctacagccccmaaacctctaacatgcctggacttctagcccctcttctcaaatcctcaacccatttgaagtcttcctcatgttgttcttccttttagtcactcttgaagtagactgcaagggtgacaaatggttaaatgctttccataagagctctgtagtcgtgtttctccatcagctcacacacactaagctgggagctacgtatatttacttccataaaaccttatctaccagctttcctgttttatttattttagcaaactttgttcctcatttctgcccctactttattttag

SEQ ID NO: 752939 - DNA, 552 bp, Homo sapiens
ctgtctgaaattccccttgtggttttgctcacatctggtgtttttcacttctctttctaaacacgtgctttgatcctattgctgctacagcagaaagatgtccatggttccaaggagcatagctaatttagtgagaggtgaaagatactcctctcaacaggacttctaaaaataaacagtatcatagcctcacaatgtcatgcttgaagcacttcccacaaaacccccaatttagtaacttctacagtatctctctacagccccaaaacctctaacatgcctggacttctagcccctcttctcaaatcctcaacmcatttgaagtcttcctcatgttgttcttccttttagtcactcttgaagtagactgcaagggtgacaaatggttaaatgctttccataagagctctgtagtcgtgtttctccatcagctcacacacactaagctgggagctacgtatatttacttccataaaaccttatctaccagctttcctgttttatttattttagcaaactttgttcctcatttctgcccctactttattttag

SEQ ID NO: 752940 - DNA, 578 bp, Homo sapiens
tattttgcttcctctggagttaataattgtctcatttttcatttgcctagtttttctatgcatatgccactaatttaatccatactcctctgtagttgtttaagtctcctctcaatatgtccaaacaaacttggtattccatcagtttcatctggaagagagctcttccagagcctactgatctgctcctctctgggctaactgacctctaggcctgctgtgcatctgtcatcttgggacttccctttacccacatcctggggactctcttcacctctgtgttgagtgctctggttcctgaattccrcctcttcctctttcttgactcacaacactgttttggtggagcacattcttcagtagtttcctaagagagagtgcagggaagatatagcatttgccatcagtgccctgcccaaattctcttggcacttaacatccaggccttcaaaactgccagcacatatgtctgtttgcctgagggctttttctagctactgaaagtttgctcaggaagtgttggggaattaacccccttttccctgggagagacccttaaccaatgactgatgagagtt

SEQ ID NO: 752941 - DNA, 578 bp, Homo sapiens
tattttgcttcctctggagttaataattgtctcatttttcatttgcctagtttttctatgcatatgccactaatttaatccatactcctctgtagttgtttaagtctcctctcaatatgtccaaacaaacttggtattccatcagtttcatctggaagagagctcttccagagcctactgatctgctcctctctgggctaactgacctctaggcctgctgtgcatctgtcatcttgggacttccctttacccacatcctggggactctcttcacctctgtgttgagtgctctggttcctgaattccacctcttcctctttcttgactcacaacactgttttggtggagcacattcttcagtagtttcctaagagagagtgcagggaagatatarcatttgccatcagtgccctgcccaaattctcttggcacttaacatccaggccttcaaaactgccagcacatatgtctgtttgcctgagggctttttctagctactgaaagtttgctcaggaagtgttggggaattaacccccttttccctgggagagacccttaaccaatgactgatgagagtt

SEQ ID NO: 752942 - DNA, 517 bp, Homo sapiens
cattattactacctccagagaagaaactgggaaaataagggatcaacaaagggaaggggagtttttttcccttaaaaacatatgtgtgtgtatatatatataatctccaagtgcatgatttttaaaaaaataataggtacattagtaaatgttttcggtcgcaagcaacagaaacaatttrtagttaatctaagcagtaaatgaatttattaaaaaatattaggtagttcacaagctctccaggaggactagaaacccaggtttagaggctacatagccagaagcaacacctaaaattgtactgcagaacaatatcatgaagtcatcaatgcccccactgcatggaaaccactgctcggtgaatgccccaagcctggatgctggtccctgctgctagaaccaccagaaccaccaccactgtagcatctaaaaaatgaatgttgttattacaactaatgccactccctgctgcagaacagattcagcagtctttgctatttgaggtcactagctcctg

SEQ ID NO: 752943 - DNA, 515 bp, Homo sapiens
ctccagagaagaaactgggaaaataagggatcaacaaagggaaggggagtttttttcccttaaaaacatatgtgtgtgtatatatatataatctccaagtgcatgatttttaaaaaaataataggtacattagtaaatgttttcggtcgcaagcaacagaaacaatttatagttaatctaagcrgtaaatgaatttattaaaaaatattaggtagttcacaagctctccaggaggactagaaacccaggtttagaggctacatagccagaagcaacacctaaaattgtactgcagaacaatatcatgaagtcatcaatgcccccactgcatggaaaccactgctcggtgaatgccccaagcctggatgctggtccctgctgctagaaccaccagaaccaccaccactgtagcatctaaaaaatgaatgttgttattacaactaatgccactccctgctgcagaacagattcagcagtctttgctatttgaggtcactagctcctgagtcaaaaag

SEQ ID NO: 752944 - DNA, 485 bp, Homo sapiens
atctggaatgcatggatattatttcacttacagaaaggatttgtacttagtttgaaaagcattcctgtaggtgactgtattttaaatttatatcttgttttgagtgcacaaatggctgtatcacttcccatacaccatgaacatttctatgaagttgaatctactacaagaaagacaaaaaaaaaaaaaaaaaaaarggtttaacccaaccctggattggaggcaacatccatgtggacagagtggaaatcacaattacaaaggaacaattaattgatttccaaaagctaactcaatgaggccaaagagggcccttggcaagggaaccttagctacttcatatttcagtacatgttttctatatattatgcctttctctaggatgcagtattagctagtcaatacatggcttcaccattctaagccacttcattgatcaaaacatgattcccttctagaaacctcccaaggtctaacacaatacc

SEQ ID NO: 752945 - DNA, 594 bp, Homo sapiens
ttggaaatataatatatttgaggataagctgatgactcagaatttttgttgtcaaattttacttgtacatttaggagaataactatatatttttttaaattatatgttactagaaaaataaaaattatggcaaatgtgagaggccaagtttccaaagagtacagaaacagagtttggcctcaacatattgcacattgcttttcgcttmacctttattccccaagggacatctgcttatttttggtggaagagggcagactgacacaaaagggaagcacagagcagtaatccaaacattacacgttttctcttgagacattttctgatagctaagctcgtcaggacaagcagctaaaattaagatgcctcaatctccccaaattcccatctttgtatccaaagtcagcaagcctgctatattttgcttaggtccccgttcctgaactgggtctggtaaatgctttcctataaacagcttaagtgatattaaaattttattcctttatttttttttaaccaaggatcacagcgctttctaatacctgaaaagcgttgtggtttttttttttttttgcattatttttcagtttcttt

SEQ ID NO: 752946 - DNA, 571 bp, Homo sapiens
acgttttaaaacttctttaaaaatatcaactatgtttaacagtaatcatactaaggcaaattagtattgagatataatttatatgtaagaaaatctcaatagattatgtttgaactttctataaaagatgtcagcatcaaagtcttttcacccatttctcttattattctcaaaaaatatcaataaaattttaaaacaaatgcaggctggtgcggtggcttacgcctgtaatcccagcactttgggaggccgaggcgggtggatcccttgaggtcaagagttcgagaccagcctggacaacaaggtgaaacaaattccagctactcaggagactgggacagcagaatcacttgaacttggsaggcagaggttgcagtgagccaagattgcgccactgcactctagcctgggcaagacagcaagactccatctcaaaataaataaataaataaaatgcaaataaaataatttaattatgcaacagatattacctgcaaataaaatgtgtaattttctaccacatggaatgaagtatgatataaatcaagtagaacaccaattctcacatata

SEQ ID NO: 752947 - DNA, 655 bp, Homo sapiens
attttttatatacatgttggctatgtgtatatcttcttttgagaaatgtctatacatgttctttgaccacttcttaatgggatcatttaattttttattgttgagtagttttatttatttgtatattctggatattagtcctttataggataattactttgcaagcattttctctaattctacaggttgtctcttcattctgttgattgtttcattttctgtatagaagctttttagtttaattagttccatttgactattttcactttttgtgcctgtgcttttgaggtattagcaataaaatctatgtctagatgtcctgtaatgttttccctaagtgtcctttgaatagctttatagttttaggtcttacttttaaatctycaatccatcttggttgatttttgtacatgttaagagacagagatccaatttcattttctgcatataaatatcaaagtttttcagcaccatttattgaagagggtatcctttcccaatgtatgttcttggtgcctttattgaaaaccagttggctgttaagtatgtggatttatttctgggttttctgttctcttccattggtctatgtgtctgtttttacaccaattatatgctgtttgggttagtattgtattgtaatatattttgaagt

SEQ ID NO: 752948 - DNA, 588 bp, Homo sapiens
ctgggtgataggattatagataacttattttccttatgtgagtctttgaatttaaaacaacgaacatgtagtgcttttcaaataagggggaaaacagtaatatgatttttaaaaaatgcatcttctttaattgacatattcaaatgaggwcaatgcaaatgaaaactttagaatcaggaactaatagtataattacttaaaagaagtagcacagaaagaaaagcaaaataactagatttccttcttctataaattgtttagataccattactactgactttttgttttctttcacatttcccccagcacaagtgcctgttatccgtctgtttctcttacaataaacatagataatagatacaatcttacagttaaaagaaaccttaaatttcagcagttctcatatatttattttacagatgatgatacttgatctccaagagtttatgttacagtgtggagttgtctcctgatttgtaggcaggctcatttgactgcaagagattgcactgtaatcaattacattgattacaggagatttagaaatcaggcactttagatagcacagtactctttttgtaatatggc

SEQ ID NO: 752949 - DNA, 523 bp, Homo sapiens
aataagaagcttaaagtttattatagtgatgaatgaactatgtcttgattgatgaaagtctactccaatgatatgactcaatggagaataattaactgagaagatactgaagattaaaatgaaaagaaagatataagactgttttccccaacagtggactccatcaccatctctctttggtgggccatttctttccttcctccttttcrtgagtcacagaagcaagctggtgagagcttgcttggatgaagaggctactgggctcaggggttcactagagcttattgtggtaggagacagaagttggccagctgcatcaggtggaccacctctatgggcaggacctgagctggaagcctggtcagaggaactgcaggctgagctttggtcacctacctgaaagaataccaggaaatgctgtgatgaggatctagagcaaatgctgccccttcatctacagcagttgaggtatttggaattgcacctttatgccttcaagctccatcaggaccttgatctgtac

SEQ ID NO: 752950 - DNA, 545 bp, Homo sapiens
atatagctggggaaggatgttccaggaactgggatcagcaaggaaaaaactctttttttagacggagtcttgctctgtcaccaggctggagtgcagtggcgcaatcttggctcactgcaacctccgcctcctgggttcaaacgattcccctgcctcagcctcccragtagctgggactacaggtgtgcgccaccatgcccagctaatttttttgtattttagtagagatggggtttcaccatgttggccaggatggtctcaatctcctgaccttgtgatccactggcctcagcctcccaaattgctgggattacaggcgtgagccaccacgcccggccagaaaaaaactcttaaattacgagtgggcctcatgtatttgagggacagcaaggatgccactgtggcttgggcagggagcacaagaaagaataccaacaggacacgacagagaaggggaagggctataatttagtgcatgtcgctttgcacaggcaaccaaaattttatacaacagttaaataaatattaaatgttaatgtaattca

SEQ ID NO: 752951 - DNA, 575 bp, Homo sapiens
gaggacagtaaagtccatcaggatggctactattaaaaaggctatggagaaaagggaacacttatacactgctggagggattgtaaattagctcagccactgtagaaagcagtttgaagatttctcaaagaacttaagacataactaccatttgacccagaaacccaattattgagtatataccaaaagaaaaataaattactccacaaaaaagacacatgcacttgtatattcattgcagtactatacacattcacaaaaacatggaatcaacctaggtgcccatcaatgttggattggataaagaaaatgtggtaagtatataccatggaataccacacagccatgaaaaaaaaaaacaaaatcatgtcctytgcagcagcatggatagagctggaggctattatcctaagcgaattattgcagaaacagaaaaccaaatattgcatgttctcttttataagtgggagctaaacattgggtactcatggacataaagatggcaacaacagatactggaactaccgcgagggggatgacgggagtgggcagagggttgaaaaattaactgttga

SEQ ID NO: 752952 - DNA, 634 bp, Homo sapiens
cactttaaatgggtgatgtatatatcaacgaagccattaaaaagcaaaatcaaataaaacagagctgagaccaaatgcatttaaatactaaaaattctacatacctcagaaaattatagtttctaaagaaaaggaaaataatgcactttttaaaagaaagcctggcttttgaaaaggaaatcagaagcacaaaccaagaggaaagcaaatgaaataatttttagtaatattcacctaacctggcaggtcrggttacaggtgctaccaatacaatagagagcaaaacagatgtggttccttctatcttggtttttaataaaatggggagcactagacaataaataatcaaacacatgagtgaacaaacaaggcaaaactcggttagtaaaataagccacacagccaattaaaaatagcactagctggacttctggcatagacttatttctccctgttcctcattgctgtgtacaattataaaccctggaaataatatccagaggcctccaaaggataactctaaaaaatgataagaaggtaaattgtttgggacagcagaaataaaggaacggcaaagcaatacggtaccttaggtccctcctcccaacagaaaaagcctacccaccctcagtat

SEQ ID NO: 752953 - DNA, 619 bp, Homo sapiens
attttcactgatgtcacctaaaagcatctgttatggggacttagctccacagcttaaattttgctttttataattagatgaattacgctgagtgtcgccttatactctgtttaagaagtcagggtattgtgctctaaaaattagaaagacttccaaccaattagttacaatattcacatacattcatttcaaaaataaattttggacatctgtagcaagacactgtgctagctggggacacaacagtgcagaaagccaagaccatggtctcatatgctggtggagcgaggtggggtgcagtgagagacagtgcagaggagtatgtgtggtaagtttaggacatarcacagtggccagcatgagtggagtgacgaggcagagtggggcgaagggtaaggccagatggcatcagagttgaggggaggcagggaatgctgaggacattggtttgggcacaaataggcctgacttgaatcatggtgcttcattcagctttgttcttcactagctgtgtggtcttgggcagcgagttacctgactcccctgaaccttaatttccttaaagatggggtgagggtaaaaattgtctacgttatagggtggttccaaggataaattg

SEQ ID NO: 752954 - DNA, 578 bp, Homo sapiens
ggcttttgtcctttgactgagagcaggggagcatggcagctgtacaactcctcttgttaataattttaaccctgcccgtcacggttatacagttgaatacatgagatccatttacacccataaactactgctttggtctattttatagactagcaatatgtgtcataaaagggagggggtcactattaactgtaaacttaaaaacccactggcatggaaagaggaagtccaggcagttagtggctgtctggatttatcyatcaggtccaaggggatgaggctagattaggccctaactttcatggcgttccccccttgtctgcagtctgcagcccccaaaactcctcaacccctgagatcccctctgaggcccatcaggtgccattccaatgactcagctttctggaaattccagccagaaatccttctgggggaatccattcatttagctccttgaaaaggcacctctcaaagtaaattaacaatttggcagttctgtttcaacactgaagtctgctgtgagtttgatcacatgagtcaggttccccaagtcttccaagagccatgggacatttgcc

SEQ ID NO: 752955 - DNA, 551 bp, Homo sapiens
cccaggccttatgaccctgctctccaccagccagggagagaggaaggccctgaggtgacccagactggaaaatgcagcattgatccagccccgagtgcgaggctctctccccaacgatcccattcatttttcccaactataaagcatagctctttccatttcacagctggggaaactgaggctcagagaaaagcgcttgttcaagactccccacatacgaccaggtctgccgagagtgcacgctcctccccaccccgcaaaatgccactggacgtgaaatgaacaaagtcaagttcacrgttggcaggcatccgcacccgcctgggaccaggcctctgggaccgggccgttctgctgcttggaactattcctcccattgttcagcctcgtccccactgctggaacccactgagcctcactcagtcctctgaccctcacccagaaaatggggacgcagttgttgagatgagatgaagcaatactgtgaaagcgcttagagtagtgcctgattccgaccaagccctctctaaggtgagctgttgattcggcat

SEQ ID NO: 752956 - DNA, 579 bp, Homo sapiens
aacccatagttagtcagtcagggagatgaactggagactgagctcccatctccttgtctgcagcaccaagttaaagccttcttccttggcagtactcatcatctcagtgattggctttctgtgcagtgagcagtagggcctagaccaaacccttggtattgcagtaacaatgggaccattacatattctatccctgcaacaaacactcacatrtaccccataaatatgtaaaatattatatatcaaggaaagaaaaataatgggtaactaggtaacatgaacaaattaatttgcatcactatggtaataattttactatctatagctatatcttaaaacatcatgttgtataccttacatatatacattcaaatttattttttaaaatggaagatatatttcaataacgttagaaaatgagaagggatcaaaatgataagacataaaaatcaatggaaatgaaaggaagtggcaattgagaaaatgaggaacaataatagtataagactaaaaatccatattagcaattactttaaatgtaaatggtttaaacactccaatccaaaggtagacattggc

SEQ ID NO: 752957 - DNA, 537 bp, Homo sapiens
gtaaagttattcccaccatcaccaaccctacctaagctgggctgattcttgttttgattaataaaatgcagttttagaaatgaccctggatggcttgcaaagctacgttttaagagatcttgtaacttctatttttgcagtcttggaagtgctgagagaagacagaaacgaggtactcagcaaacaacccagctaaccctaatcccagccaatcagctagctgattgaagccccaagtgagctcaggtacatgatatgtgccaacacaacacaaacacatacacacttccagagaacagaagaattgcccaaacagtccacagaatcatgagaaataakcattattgcttcaagacatacattttgaagggtcacaatgcagcaataaataactgaaagagtgatatgagaatgggtttgttgtaagtttagcatactttcactgtgaggtcaagttataggaaaattttcacaaagaaaaaaaatcttacctgttctgcatcatagtaaaactcaacatttaaaggttcttgaggt

SEQ ID NO: 752958 - DNA, 623 bp, Homo sapiens
ctgaatttggcatgagtagtgctgtgataatttcacaacaacaacaaaaaactcttgaaggaatttctcactgtgttctatgctagtagagaatttgttcaaatgctgctgagattgcccaggcacaaattgggcacagtcagaatcataggtttcataaagtttttaaattttttttttctaagtaagctaattggctgccctaattatcaaacccacagttttgtattgttcaggtatactcacttaaggagatatgttcccccaaacctgtttctcatagacttccgcatgattccaccatacatacactgacatccagaaccttagaaatcattacctctatatctaatctgtcagcctttggttctaactcaaaaatgcagccccaaatctgtcggatttcttcattccaycattgccaccttaatccaagtccctgtcatctgtcctttacactgttgcagacctcttcaatgagcttccttctccgttcctccccactataggcccatcctccagacagaagccagaggtggttttgtgtcagtttttatgtaaataataatatgtcactcctttgcttagaaccctccattgacttccttagtacttgaaagaaa

SEQ ID NO: 752959 - DNA, 679 bp, Homo sapiens
tacggagggcaatctgctttacacaaagtccaccaatttaaatgttactctcatccaaaataccctcacagaaacacccagaataatgtttgactaattatctgggcatcctatggtccagccaagttgacagatgaaattaaccatcacaagtccactccttgccaagatggcacccatatgcatctccttgaaccacacttaatcatcatataaagacaataacaaagtcatawatattaggctgttcttgtgttgctgtaaagaaataccggtaactgaataaaagaaaagaggtttaactggctcacagttctgcaggctgtacaagcatggcactaacatcacttggcttctggtgaggcctcaggcagcttttaatcatgatggaaggcaaagtaggagcaggcatttcacagggcaaaagcaggagcgagagagagaggtggggtaggagaggtgccacatacttttaaatgaccagatctcaagagaactcactcattatcgtgaaaacagtaccaagccatgagggatctgcttccatgacccaaacacctcccatcaggccccacctccagcactgaggattacaattcaacatgagatttaggtggagacagacatccaaactatatcatcatacttccacctaaaatgatacaactaccctatgtac

SEQ ID NO: 752960 - DNA, 613 bp, Homo sapiens
acagccattttggtagtttctttcaaagctaaacatgatcttaccatacaatccagcaatcatgctcctaagtatttacccaaatgcattgaaaaagcatgtccacacaaaaacctgcatgtgaatgtttatagcagctttattcataatcaccaaaaactggaagtaaccaagatgtccttctatatgtgaatggataaacaaactatggtacatgaatataaaggaatatttttcatcataagaaataagtaatctttaaaagacacagatgaatcttaaatgcatattgctaaatgaaagcagccaatccaaaaaggctacatactgtatgattccaattatatgacatctagaaaagacaaaactttagcaatagtgaaaagatcaggggctcagggagagagaaggagggttaaacaggtaaagcacaggggattttgtgggcagcaaaactattctrtatgatactataattacagatatgtaatttgtcaaaacccattaacttcacagcacaaagaataaacctcaatgtatgcaaacttaaaaaaaaaatcattcaggaggttgggagtcccagaatggaaagtagaatgtgataaaaccaatc

SEQ ID NO: 752961 - DNA, 551 bp, Homo sapiens
attacagatcctacttaactgatttgtccagctaggaaaagttgggcagaaccagtcttttataggcaaaggcatggaaggctctttccctcttgtaatgcagacatcaacccaactacgatatgagcagagggcatagagggagccaagttggagagatatgactggcttctcctgtcctgacctataatctgtactccactcctttatccaccactaacattgattatgggataggacccatagcatggcaagatagtgttcctgttgcaccaggaaccaattcaaatggatgggaaagcagggatatgggtactgtgttaaaaggagaagtgacagcattcctgaacactgaaaaggacatttccarcatccgaagagatgctacattttccagcttgctagagagaaaggctgaaagataaaaacttttgttgacttcctctgcaaacgagcatttaactgaaaagtgtaaatgaaattttaaataccaatgaaatgtgatgccttctcctggtatttggtccataaattatgttgcaccagagttt

SEQ ID NO: 752962 - DNA, 600 bp, Homo sapiens
gagattgggtaatttataaaagtaagaggtttaattgactcactgttcaacatggctagggaggcctcaggaaacttacgatcatggcagaagctgaaagggaagccaggcaacttcttcacaagaaggcaggaaaagtgccgagtaaagggggaagagccccttataaaccatcagatctcatgagaactcactgactatcatgagaacagcatggggaaaaccacccccgtgattcaattacctctacctggtctctcccttgccatgtggggattatgaggattacaatttaagatgakattttggtagggacataaggcctaaccatatcaattgtctactggtgggctttcaggaaaaaggaaaatggaaaacccacctggcccacttgatcatgtccattccaagtcctatcctttggcaacatcacgccaaagacatcaaggtggaatttctaccttttgaggcctaatatccaaaatcctttccttcctgttatttgcccccttgtttcaatcccacctcccttcctctccctctccctcaattctcctgccacccctcccccaatcctctagcatatggcttagtgtcatg

SEQ ID NO: 752963 - DNA, 657 bp, Homo sapiens
gtttagagtttttcctacgaaacttcagtctttatggaatcctaatacgacgttcttatttctatatgggatttagctactataaattgggagaaattaagagtgacatctatttatcttgacattctatatatagttttttcaaggtaaatctattaatactgctttattcaaaacataatatggcacaatcaaagttgtatcaaagtctgttaggtagattcatgacaagtcatcattactaaattgttcacagtggtagaaaggggtgatggaaagatgacttgagtaaaactgaggaatccttcagtttattttaagctcagctacaaacctgtctgatgatactgagcaggctacraaagctttccaggcatcagtttacttactagtaaaaatagaaatccccaacatgtaattagcaaattagatcatatgtgtgtaaacttcaagaatgtataaatgtaaaatattattgctattattattatttttctttgtctttcctaaggaagaaaattgtctgcttgtattctaagcactttgtaaacaaacactaggtattcaatgaacagggagcaaaatctagttctcagctagctgatagagtgagggagagagacagggtgggtggtttgtgattaaacactccaaatg

SEQ ID NO: 752964 - DNA, 604 bp, Homo sapiens
ctttaagatgaagatggccaaacatcatttcccgagcactgaattgaagaccccttccctttattatagcctcttacagggttagccagtgatatgcagaacaatattttggaagtccttaactaactgatatttatactttgaacaattggtttgcaccccataaaggtaaaagaaaatcatgaacctgtatgcaggttgtggaccaactgacttccctccctccctccctccctctctctcttctaccctaccttctttcttttctctgtgggcaggcagagaggtcacgcaaggaggtgcgggtttgccacccttttgcctgctgaagagcattgctgttaacatttttcttccacatcataaataaacrcttttgagtcctttccatgatttttcccatttattgtcaccatttctgaaagaagggcactaaaaatgtggtgaaaaagtaaaattgctcaaatttaaagagcaacacatctttattttggaataagctgatacaactgcagcactgaataacaggggggaaaacccagtttaagttgaacataattaagaaccctggagggagcctggtacgagccagggcaccagctct

SEQ ID NO: 752965 - DNA, 646 bp, Homo sapiens
gtcaaccaaccttgagagcctaatgatataattggtcttctgctgggggattgcatatgatggagctgggaaggaaagtttgcatgagtggattaacatgggtcccactcaggttgttgctttggaatgagtctattcacaggagtgggtgttcagcatgactttttaaaccgtagaatgagtacaggtagtgaacaaaaagagttagagagttgaactttgcacactcgagtatttgtaatctcctgtgtgaggtagaactataaactaacttggataaatstgatgtattgggcaacttggagttgatcattttatattttcaggtgtcatgtactgatttctcctttgactctgggcactcactccatcatgcaatatatgtttggggactgatctgatgccttcttatggcttaacatggagctgtggaaggaagcagaggccctgagtaatttcagagtctctccaactcttcagacctttccattgatttctggcatctgtgtacccaaatctgccaaaccgccatgtctggtttgagaactccagagacttgattaggaggatagaaaaagttaaaggctgtgaggaacccatatatttataagtcggttggaggcacagaaagagaacccagccaaga

SEQ ID NO: 752966 - DNA, 595 bp, Homo sapiens
aagcaaaccttcctgctacagagaatcaatgtttcaaaaatagagaactgctgagatttattctgtctgttcccttaatccatctacaccctgctaacctcctgaaaaatattttgagaacataagaaaaaagacgctaaatgatggggccaaatgtcccatctcgcatcctggagaatccagcatctgttcacaggcaaatgtgtagagtaagagaatgggctatggcaatggccttaatatcagggaaaaagaaaatcacccctgaactcaggactggaacaaagaaatgaaaatgaatctgaaaagcattcttccctcccacatgccacaaaacctcctgaggtttcyaattctagaactgacatctcaacagaagtgagtaatctaaaagctaaatgcaatttccaagaaatgaaaaattgcagcaatttttggaaattagaattgaccaacaataaaagcattgcatatcaaacattttaagacacacctaaagttacacccagagggaaatttgtaaatctaaataaaattattaggaagatgtaatttcttcccaaactaatctataactccaatgtaatatcaataa

SEQ ID NO: 752967 - DNA, 308 bp, Homo sapiens
cacttgtatggaatcaagaatttggcacaggtaactgtgcacttcccagccccactttccccgggctacagcagaacagagcaaaaggagatggaggtatttatttccttctttaacatgtcagtccagtatgttttttaagatcamctttatgttttagtgacagagattttgaaaatcactagttgggattagtacagaattttgttggaattgacacagtactaaaatttaaggactttattgtagcaccgtgtgtggtgggttttttttttttttttggtatatacaggaaaaaaaacattcta

SEQ ID NO: 752968 - DNA, 531 bp, Homo sapiens
caactggaagaaagagtatcagtgattgaagatcaaatgaatgaaatgaagcgagaagggaagtttagagaaaaaagaataaaaagaaatgaacaaagcctccaagaaataagggactatgtgaaaagaccaaatctatgtctgattggtgtacctaaaagtgacggggagaatggaaccaacttggaaaacactctgcagtatattatccaggagaacttccccaatctagcaaagcaggccaacattcaaattgaggaaatacagagaaygccacaaagatactcctcaagaagagcaaccccaagacacataattgtcagattcaccaaagttgaaatgaaggaaaaaatgttaagggcggtcagagagaaaggtcaggttgcccacaaagggaagcccatcagactaacagctgatctcttggcagaaactatacaagccagaagagagtgggggccaattttcaacattcttaaagaaaagaattctcaacccagaatttcatatccagccaaactaagcttcgta

SEQ ID NO: 752969 - DNA, 531 bp, Homo sapiens
caactggaagaaagagtatcagtgattgaagatcaaatgaatgaaatgaagcgagaagggaagtttagagaaaaaagaataaaaagaaatgaacaaagcctccaagaaataagggactatgtgaaaagaccaaatctatgtctgattggtgtacctaaaagtgacggggagaatggaaccaacttggaaaacactctgcagtatattatccaggagaacttccccaatctagcaaagcaggccaacattcaaattgaggaaatacagagaacgccacaaagatactcctcaagaagagcaaccccaagacacataattgtcagattcaccaaagttgaaatgaaggaaaaaatgttaagggcrgtcagagagaaaggtcaggttgcccacaaagggaagcccatcagactaacagctgatctcttggcagaaactatacaagccagaagagagtgggggccaattttcaacattcttaaagaaaagaattctcaacccagaatttcatatccagccaaactaagcttcgta

SEQ ID NO: 752970 - DNA, 623 bp, Homo sapiens
ggcaagcattttcctttcatcaattcttgggcatattttttcatccctggaattctccagtgtaaataaaggattgctggaaatggaataactggggatcagaaagaaatgaggtatccttttaatgagaaaaagcaagaatagagtgtaccttccagttgctgttaaataaaagtattctggctattacatgttgtgagagtgcctaatacagcaatgacaataattcctatttattatacggtatacactacctagttataaaaatggaaggggacacagatccacaaagtgtaataaaaagagtatgggaacaagcrtggattctgaggagagggcctaaaagtctgactctggcttgctgaacaaaatctgggtgtcttggtttctaggtgggcataatttcttcagtgacacctacatggggagcatgtctttatttcataaataaagacaaataagtaaagacaaataaaaggcatgcttcctgttgtgtgtgtcttggagaaagatgttatgtcatctcaaagacaagccaacagaaatagtgttgatgatactacacagacagagaactgagttattcctttttctgtccactaaggaggcaaaaggaaccacct

SEQ ID NO: 752971 - DNA, 626 bp, Homo sapiens
tgtttaaatgatgtcactacaaaatctttataatgttgaatgtcattactacattaatgtcaaactatgtttacagaaaaattttcttcatctaggtattggacctatcaaaaatcttccttgtaccagccaggcacggtggctcacgcctgtaatcccagcactttgggaggctgaggcaggcagatcacgaggtcaggagattgaaaccatactggctaacacggtgaaaccctgtctctactaaaaacacaaaaaattagctgggcrtggtggcgggcgcctgtagtcccagctacttgggaggctgaggcaggagaatggcatgaacccgggaggcggagcttgcagtgagccgagatcgcaccactgcactccagcctggaagacagagtgagacattgtctcaaaaaaaaaaaaaaatcttccttgtattaatatctctatggaactaaataatgtgttatggttaattttaagtaaaatgagtcctttaccaaggcctggacagatggccatgtttttcaggtcttaatctttacaaatcaattatatggtcacataaagttgctttatgaaagcagggaagctagagttcttcaatagctagaactttggataaagcc

SEQ ID NO: 752972 - DNA, 514 bp, Homo sapiens
ggaagcaacttcttcatttcataggcagacaaactctacatttaggcaaattgatctgtagttgggtcctcttcaattcttgtctcatctctttgaccttaaggacatacgactgcctgggtggtgtttaagggaaatatgttttttcagctataaaagaaaattccagttgtcagggatccaagscttataaaaagaaggcttttgagaaagaagccactttccccaccctctgtgcattccaccgggtgaccgggaccatgttaatgacagaactcctgtgtgcagacatgtgtggagaacttcctacagtacagggttgctttgtacggagatcctgtgccccagaggctgacggcagctgtgtgcccttaggtcaacatgaacaaattcccctacagaaagggagccccaccagatagctaaatgaaaccaactcaactaggaaaggctagagctgctgtaaagagtcaagaagtttggaaatctacagaagataatcctagaagtaact

SEQ ID NO: 752973 - DNA, 615 bp, Homo sapiens
atatgcctataaaaatctggatttttcagacagttcagctctatttcatgttcttttcttattataactgaaaaaaaagtccttaagcacatgctaatgactaaatctagtctccaaagttttaaaaaattttcaaaaatcaacggaagcaaaacaaaaggcatttagatcatgcacatgtatacttgctgagatgttcaaaggtaaaagacaaaatataaccagcaccccaccattatgatactcaccagcaaaaggtttatcaagttgaacccagtctttgaagacgaaattgcagtagtcctttccatgccagaatctggtttccccatgcagctctcccacacctgtctgtaaactrcggatggacccggtatctgtgaatgcagcaagaccccctcagagactgtggttcaggtgagtcccagaaagggaggctcaactctcatttattaaacacctaaaagcttcttaatttcttaagacacaactagggtggcatctgtccattctattacaggctgtgggctaacaaggttttacagtccttacaagtttacttttagtgggcagttagggctacaacaagattcatcattaaacaatgaaatttga

SEQ ID NO: 752974 - DNA, 616 bp, Homo sapiens
ccaaggcatcctggagcactgtagcaaactcacatggacatcacaggatatttaaattctgtgtaggcaatgcaatgatgctctacatgtatctataatgaggattacttaagaaaaaattaaaatacttttccttcagtttatatgaattacatctttactggctactaagttgctaggatataaatgctcattatattgtttggacttcactatgtagtagagggaactgttaggcaattctttgtacctagggataacatgaacatattgagattctaaggattctgttaactgaggacgttttggaacytctggcctagaataaggaagggatatgggtggccagaaataaagctggagaggtaaaccgcagacaggtttgaggagtctaagttttgtcctgaaggtgacagggaacctctgaaggaacaggaagtaacacgttcaaagtctacagtcgagaatcaattaggacaagaaatgggggaagaaggggagggatctatggcacagacaggtggaggcagggagagccacatgaactctttaacagctttagcaataatatagctgtatgaattttcaattgctgctataacttccaccaacttgg

SEQ ID NO: 752975 - DNA, 608 bp, Homo sapiens
ttgaattgatagaaaaataaaagaaataagattaaaaagaaagcaaataaaaattaagaaatgaggttttaaaagggcataagagcacttttaatcttcatatgttttttcatgtggtggtatctattcctatggagatgatacctagcaaataaaaaaggggaaaaggagcatgaagaaggagtgggtccctctgtgatctccagaagaagcagggaaagaggtggtagtgagtgttatcagatagccctggagagttttataaaattacagagaccatcacacacacccaatcaccagaayattccagccatgattgttcttcccttagcaatgaatgacaatctagcttctactgagacaggcaggaaaaacgttagaaagaaatccagattaatagtggtcatcatatcatctactgcttgcaaaaatatgttaccaagccattaaataatatatttcattatgatcatattttattgtttctctaataagtaagaactttattttaggtattggccgggcacggtggctcatgcctgtaatcccagcactttgggaggccagggagggcggatcgagaccatcctggctaacatgatgaaacc

SEQ ID NO: 752976 - DNA, 625 bp, Homo sapiens
atttgttatagttgttctctttcaactgtcttggattgtttgcctgtgtcctaaagagtcctagactattctgcctggaaaaagcacccattgtctccctttgcatcacctgccactccaccttagtgattccctcatctgctggtttaacacacagtgaatttgaggctggtgtcatatacttccctrtagtatgtcagcgagacaaataattttcctcactatggaagcagatttcgttttcttctgaactttactatagtgtgttcgctaatactggaagctttaccactactaaaaatgacaccacatctgatttagccagggctctaagtaatactgatttttttttttaatattatataagctaaataggtttggtgcatttaaattaaacatagaacatgatctggaaactagcagacagcgtaaaataatacttcctaaaagaaaggaatctggccttaagtagaaaatattttactgatgagttttataaaaccatgtccatggccaggtatggtggctcacatttgtaatcccagcacttcgggaggctgagggcgggaggattgcttggggccaggagttcaagatctgtgtgggcaaggacgtagtgagactc

SEQ ID NO: 752977 - DNA, 625 bp, Homo sapiens
atttgttatagttgttctctttcaactgtcttggattgtttgcctgtgtcctaaagagtcctagactattctgcctggaaaaagcacccattgtctccctttgcatcacctgccactccaccttagtgattccctcatctgctggtttaacacacagtgaatttgaggctggtgtcatatacttccctgtagtatgtcagcgagacaaataattttcctcactatggaagcagatttcgttttcttctgaactttactatagtgtgttcgctaatactggaagctttaccactactaaaaatgacaccacatctgatttagccagggctctaagtaatactgatttytttttttaatattatataagctaaataggtttggtgcatttaaattaaacatagaacatgatctggaaactagcagacagcgtaaaataatacttcctaaaagaaaggaatctggccttaagtagaaaatattttactgatgagttttataaaaccatgtccatggccaggtatggtggctcacatttgtaatcccagcacttcgggaggctgagggcgggaggattgcttggggccaggagttcaagatctgtgtgggcaaggacgtagtgagactc

SEQ ID NO: 752978 - DNA, 603 bp, Homo sapiens
tcatatgcagaacaaaactgaacttctacctttcactatgtataaaaattaattcaagatggatttaagatttaaacgttaagacctcaaaatgtaagactcctagaagaaaacctacgaaacaccattctggacattggccatgggaaagaatttataactgttagctatttcaatgttatctttcgtctattaagtctcttgtccatttatttttctactgggctgtccatgtcttgtttatgtattgttacctcaactcttctatattttctggatacccacgtttgttacttatacatgttgcaaaaatcttttcccattctgtggtttgcctttttaatgtcttaacatgtcttttgatagcataagttattaatttagtcaatttatcaaatatttactttaaggctagtcytttttgtgtccattttaatgaagtctttccctgtttcaggtcatgaagatattcttccatgtaattgtttagcatctttattgttttacctttcatatttaggtttcattcctgttggtatttatttttgggtaaggtatgcggtagtggggaagatcccaacccccgggtcacagtaccagtcc

SEQ ID NO: 752979 - DNA, 572 bp, Homo sapiens
acaaaaaaatttaaaattatccagacattgtggtgtgcacctgtagtcccagctactgaggaagttgaggtgggagggtcacttaagcctaggagttagaggctgcagtgagctacgatcatgccactgcactccagcctgggtaacagagcaaaattctgtctctaaatgtaaaaataaaaataaaaaataaacactggataatgaagcaatgttcttttctcaaactctacaacaaataaaacctaagtattaaacatggactttgtayacttgtgtatatatcaatcaataaccattacttactacatgaaagttaccacactggtatagagaggacaaaaagaaagaaaatacatacacagctcctgttcttaaggatcctaagagttttgctggagaaacagggcatgacattctaatgtatatataagaatatgcagaaagattttaaatcataatgtatatcagaaaaattctgcattagtggtgaaaatatttcctaatcatagaacagatgaggagtttaaaatagccctaaaccaagtcaccccaaaatttagtagaaaaaa

SEQ ID NO: 752980 - DNA, 651 bp, Homo sapiens
ccacaacaaaacctcagagattttaatgttcagctttaaaacctttcgtgaaacaatcctatattaataccaggaacaactcaagccactgaagagagtgatatcagtgtactgttgcacagtgaatcaaagcactttacataacatgatacaagggctcgcgggttgtttatggaagagtctagtaygaaaggcattgtgagattgtgtcaaaagaacaaaacaatttaggagagaaattgatgagcttggtaacatgacaccataagcctcttcttttttctaatgtgttttttgacagtggataacctacattttaactttcatttttttatgaaatatacctcagaaatctatattactgcttaattttcagcatgatctacacatagaattaatgaaaaatctgatgatgactcatcggtcctattctaagaataagtttaaaagaaaaataatcttactgaaaaataggcacttagaaacccagagaccttacacacaaaaggaaagccaaatttctgtggttgttactgtggtcactactataaatagatttcatagcagcaaatcaaaggtaaccttaattatggaatgaaggtagtcgtgctgtaatgattgtgtcattacagagcagagggttagttcatt

SEQ ID NO: 752981 - DNA, 589 bp, Homo sapiens
ttcttatttgtgaaaaggaaaaaagcctttcaggatgctttctacctagacactgctcagctgagggtcatttctttttgactgttcacatgttcagtgacaggtgtacccatgtaccctgatgctggcgtctaggggtcccatgttattcttctctggacttatcactttggtcctgtttcactgtctttctacatcctaagtttcatgtgtataaaatttgctcatagaacttgttacatatgcaaatatcactctatagcaatttaaaaaattggccttgagttaaaagtatcaccaatgaaaacaatctccataacctaatactgaaaacaaaaggaagttgcaaaatgatgaataccatgtgatgtgatttgatataaaattcaaaaaacatataaaacatgcatataaaaratatatatacaaaacatataaaagatatatattttattgagtgcagacatacaaaatatggccactttggatgattcaggatggtggttacctatgaacttaaggagggaagtggaagcagagagattcccacctattctgcaccatctctgaaatgtttcatttcagaatc

SEQ ID NO: 752982 - DNA, 666 bp, Homo sapiens
gtggctcacgcctgtaatcccagcaatttgggaggccgaggcactggatcacgaggtcaggagatcgagaccatcctggctaacacggtgaaaccccatctctactaaaaatacgaaaaaattagccgggcgtggtggcgggcacctgtagtctcagctacytgggaggctgaggcaggagaatggcgtgaacccgggacgcggagcttgcagtgagcctagatcgcgccactgcactccagcgtgggcgacagagcaagactccacctcaaagaaaaaaagtttgtaactgtcttgcttttgcagaataaaataggcattacttttcaaatagtgttgcctagggataccttccagcattcacaaacatgctatgtaacatagtctgatttttaataactttgtcactgagtatatacctaaagagaaagtaaagaaaatggccatctctagtgcttgggttcaagtaacaggacaattttttctacacatctcttcttttccatttcctttatctttgttagcatttttttttggctccttccttagcagaaatgttatatttttgagggtactagaaaactttcgtgatggggttatttaagaaagacaaactttaatagataaaatgggaaaatattttaatgtatattttttaaaagaaaa

SEQ ID NO: 752983 - DNA, 666 bp, Homo sapiens
gtggctcacgcctgtaatcccagcaatttgggaggccgaggcactggatcacgaggtcaggagatcgagaccatcctggctaacacggtgaaaccccatctctactaaaaatacgaaaaaattagccgggcgtggtggcgggcacctgtagtctcagctacctgggaggctgaggcaggagaatggcgtgaacccgggacgcggagcttgcagtgagcctagatcgcgccactgcactccagcgtgggcgacagagcaagactccacctcaaagaaaaaaagtttgtaactgtcttgcttttgcagaataaaataggcattacttttcaaatagtgttgcctagggataccttccagcattcacaaacatgctatgtaacatagtctgatttttaataactttgtcactgagtatatacctaaagagaaagtaaasaaaatggccatctctagtgcttgggttcaagtaacaggacaattttttctacacatctcttcttttccatttcctttatctttgttagcatttttttttggctccttccttagcagaaatgttatatttttgagggtactagaaaactttcgtgatggggttatttaagaaagacaaactttaatagataaaatgggaaaatattttaatgtatattttttaaaagaaaa

SEQ ID NO: 752984 - DNA, 650 bp, Homo sapiens
gacaattcctaatttttaaagaatggctaagataaataatgcaaaaaggtagcttggaaagttttaatttaatgtaataggaagcagttactaaagtttgagagttacataggtaatggtagctacaaaaagttttcttataatggaaatgtcatgattaatgaaatggattaatgaaaagtccatgggattttaagttagacgtgagatagaatcttagctctgccatgtcctagtttgttagccttggctttcttatttgtaaggtgaggattatagtgcctctctcatagggtaattgtaagaatccattgtctggcacatagtaggtgccagacatgagaattgtgagaaaggcatgtagttactgtctgctgtggcctagcactataataagatctcctcctgggagcttttgatgtagttaggcaagcaaagccaccacrgatggagcaattagagactaacagaacaggaaataatcaaagactcaatggtatattaagatccacaggaaagatgcaggtcacaagctctgacagatctgtagtgaaactggaccactcctcacctttgacccttccccactccatctgccactccccacaccctggatctttaaggaaccttccagtcctaaaagctagtgc

SEQ ID NO: 752985 - DNA, 660 bp, Homo sapiens
tgagatgcctgtttgccaaattccattttttttttctttttccttcctccactgacatctctgcttttgattggcagggaaattacttgattccaccaaggtcattacagtggaaatcttaaagccaactggcatatttattgggcatctctcatggcagtctctcctgctagcccagagggagattaccgggagattctggtctgtcctgcttctacccaacagaggtcatggaaaaggggcagtctaaaatttgacatwcaggcaatggagccaagaattaactgaggcatccatttctttcaatcccaaatctagtaatttcctttctgactttgtcaacattcatccacatggtataagcaacaaggaaccactgccaagtgcccagagagagcctccaggctcttgttctgaagtaacttttgatcagcccctccctttccaaacccttaataaaagaattcttgctcttccactttttgtctaagctcagggtggaccccttagataatagtccagattcaatgttgaggcaacactgggcttggctgtcttacaattaccctcctcaccatggtcagaggaaaatcttctgaagccacagaagttcatcttttcagatttaagaccttcaatacatattccccaagggaaaat

SEQ ID NO: 752986 - DNA, 598 bp, Homo sapiens
ttttatatatattacctaatgtacttttcaagtttcaagctattctaagctttgtctcagatttgtggtaaacatggtgtgcatttgtgactggctgaaatgcctcattttggcttggttcatacaaagtgctgatatttcccagaaaccttattgggtcaggaaaccttcctttttgttcattttattagttcctgtgtaaactgtgaatttctataaacacgagagatcattttgttggacatgttctcctctgatagttctcactgcagtacctaatcatgagtctcctgacatggctttaggcttctaggaaaaggaaaataatgtcttataaattgaaaacacaatgtgaggatgtacatttaaaaatatgtcctctaagagttcaaggatttgaaattygtgtaaactatttattttaaactcccattgaactctttagagaaaaaaatctgagactcctatatgaactggaggtaatgacctgagttttaaagctatgattagaatttttgcatcaaaatggcagttttctctcagagtgctgacttgaagatggtgcatttattgtgatgatttggcccctgtgcaaaaa

SEQ ID NO: 752987 - DNA, 566 bp, Homo sapiens
atatatatattcatgtagcattttaaaatcatgtcatagtttctgaatgtgtagagctaggattctaaatgaaagaataaaggaaaccatggacttggatggttttaaagtatgcttctttgtaattttgagaggaaagtcagaaaagaactgcaaaaatgatgtatgaatgtaatcactctgtcttttgtagccttgttttctgttctttttttcttgaccttgagccagttttcattctgttgtatacaactctttccagtagaacggatttacattgcttgcagcctggacttggcccctgaagagatattagaggaacagtttartggttaacgagttatgttgggagctgaggttgctgaggcagaacagttgtccagactagttgcttggggagcaaggttgtctggatggtgtaagtttaacttaatggctttggcagtggctgaaggtggaggttaaagcatgtcttagagtgggacagagtaaaggggctgctgctctgaagttcagttgctcacaatttccattttattttcaatgaacttaggatcctcttgtag

SEQ ID NO: 752988 - DNA, 566 bp, Homo sapiens
ccccttgcttctttctccccaataaggagaacttcctttgcagtaaatgagcttataatgtccagggaggagttttggctgtaaaattgtatgacttgcctttgcttttattcaccataaatatttatatttcaagatgcactccaaaccccataacaaaagattttaaaacagtcaggccctaaaggaaatacatgtgaagataatggaaaccaggctggtaagcctaaaaagaattccacgtccttgatctagcttkggttgtgattgcagaaaaaggagagttagtatatgaaaaggtagcattctgtctagtgatacgctgctactatgagaggtgggtggtggggcttgggttttgagaatctatttgttcatttaataaaaatattagacaccctgtaaaggttagttatattcgttagaggaaaggtacatttatggccatagactatgacctgaatttaaggccagataaattaaaagggcttgttactaagcctaggaagagcccaggtgaacgcatttggaaggattaggaaaactcatcatctcaacaagggaaa

SEQ ID NO: 752989 - DNA, 594 bp, Homo sapiens
gggaaaaggggaaaaatgaaaatacattttgttttcaacaccaagttaactttttcacagaaacataattctgtattaaggttttgaagtgggagatttatataacccattgtggatcactgaagattgctattactatatctatagttaaaggaggtgtgacaataatttaaaaggcactatatagaagtgagttcctgaaggagctagagtcctaacatatcttaatcttctatrtaccacacattttctacatacattatattcatgtttgtgtataaaaataaacacacccatttagaactgtatgttttatgtaacaattcagaggtatattgcttttactattgttttagtgtgcagtgaatagcttccacacaatgtaccatttgggaagtaagttaactttttggtttcatgacattcattatttggggaatattcattactttgtggttattccatctgacatttttttccatgccattttttttttttttttttttttgtctcttcatttcccagagttttactgtgttgcccaggctggagtgcagtggtgcaatcatagctcactatggcctcaaactcctg

SEQ ID NO: 752990 - DNA, 606 bp, Homo sapiens
gctgccaagtacgtgcattgtaattagccaccatctatggaaactacacatggacggtctgcagcgctgcttagatccctgtggcataggctggggccaaatttccaaatgatacttaatcaccatagttccacagtttgactttgggaccccggaacaatgtcatgtatatatactctaggtcttctttaagtcttctccaaataaacctacctccaggaactagggtattygtacattggagaaagagaaactcctcagttttggggggattattaaatgcttgaaacaagttgatgttagttcctggtgatccaaggtcaaattaggggataatggggatcaaagacaaatggaattttgattcaagtctgtgggtctcagtgatcacacagcaggtaaaaagtgatatctcatcccgagcagccacaggtgtgggtcaacgcgatgttacttcacactatgggatacatgagttgcatttccagcagcaagaagccaggaaccacattaaagaccaaggacatttgacctggtgcagtggcgcacacctgtaagcacagcactttgggaggccaagacaggtggatcacttgaggccaggag

SEQ ID NO: 752991 - DNA, 606 bp, Homo sapiens
gctgccaagtacgtgcattgtaattagccaccatctatggaaactacacatggacggtctgcagcgctgcttagatccctgtggcataggctggggccaaatttccaaatgatacttaatcaccatagttccacagtttgactttgggaccccggaacaatgtcatgtatatatactctaggtcttctttaagtcttctccaaataaacctacctccaggaactagggtattcgtacattggagaaagagaaactcctcagttttggggggattaktaaatgcttgaaacaagttgatgttagttcctggtgatccaaggtcaaattaggggataatggggatcaaagacaaatggaattttgattcaagtctgtgggtctcagtgatcacacagcaggtaaaaagtgatatctcatcccgagcagccacaggtgtgggtcaacgcgatgttacttcacactatgggatacatgagttgcatttccagcagcaagaagccaggaaccacattaaagaccaaggacatttgacctggtgcagtggcgcacacctgtaagcacagcactttgggaggccaagacaggtggatcacttgaggccaggag

SEQ ID NO: 752992 - DNA, 606 bp, Homo sapiens
gctgccaagtacgtgcattgtaattagccaccatctatggaaactacacatggacggtctgcagcgctgcttagatccctgtggcataggctggggccaaatttccaaatgatacttaatcaccatagttccacagtttgactttgggaccccggaacaatgtcatgtatatatactctaggtcttctttaagtcttctccaaataaacctacctccaggaactagggtattcgtacattggagaaagagaaactcctcagttttggggggattattaaatgcttgaaacaagttgatgttagttcctggtgayccaaggtcaaattaggggataatggggatcaaagacaaatggaattttgattcaagtctgtgggtctcagtgatcacacagcaggtaaaaagtgatatctcatcccgagcagccacaggtgtgggtcaacgcgatgttacttcacactatgggatacatgagttgcatttccagcagcaagaagccaggaaccacattaaagaccaaggacatttgacctggtgcagtggcgcacacctgtaagcacagcactttgggaggccaagacaggtggatcacttgaggccaggag

SEQ ID NO: 752993 - DNA, 542 bp, Homo sapiens
aacagactttttttttttttttttttttttgagatggagtctcaatctgtcgcccaggctggagtacagtggcacagtctcagttcactgcaacctctgcctcctgagttcaagcaattctcctgcctcagcctcccaagtagctgggattacaggtgtgcgccaccacaccyggctaatttttgtatttttagtagagatggggtttcagcatgttggccaggctggtctcaaactcctgacctcaagtgatctgcatgcctcagcctcccaaaatgctgggattataggcatgaaccactgcgccaggccgtaacagagtatttttaagttgaattctattttccttaatgaagagacctgtgtggcttatttttcacagatgcacatatttgttttaacctgatttttatttgttttcttatttgtgagcccaaatgaaattattgtgtctttactgtgagataagtcttctttttgaaattctgcagacatacatagtatgctaaatagttagtaactgctgatgataagaaataagc

SEQ ID NO: 752994 - DNA, 392 bp, Homo sapiens
ggttgcatcagaaacattcgaggtttgtttgtttgagaaacaagcagccctcagatgaaactgaaggtcactgagcctgcttactgatgcacaatgcagccttcccctccctccacgtgccttcttctctctcctcctaccctgacctcagctgtgccgtggaggaagatgactggcgaggggtgtgaagcccctatgcacccaaccaagggtgctgggggagtccagagagagatggacacaaacytttttttttttttttttttttgagacagagtctgactctggtcacccaggctggagtgcaatggtgagatctcggctcactgcaacctccacctcccggttcacacaattctcctgcctcagcccccagagtagctgggattaca

SEQ ID NO: 752995 - DNA, 577 bp, Homo sapiens
tcagctaattcaggcatgaagtcccaactgtccctgggaaaacagaactaaaaatggaggcatcactcctaagtgagcagcgaagcttaagcaaagacaagaaggatacataactgtgtatgagagttggctaatggcatcagaagactgagataacactgaagcagactttgtacccagatgtctaatcagctgggtgrgtgacattgatgggcattccaaaggtccagtctcagaatcagggatgtagcagacacaggctcccacaggaggcatttggccctggaatgacagactcaacacaatagaaaggagacagagctctgaacctggaagggaggctacagttccatgcaggcaggtcattagagctaaaaaatgaaaaaaaattcctagctaccactagcacacacttgttagaagctacataggcatcaaaatctcatttaaggatgagagattgttaatgcggttatctcaaaagtaattcacaaaatacaaaggaacccaacaattttataggcacaaaagtgtgtgggtcacaagaatatcttgttcaaaatgtcaccagatgaaa

SEQ ID NO: 752996 - DNA, 612 bp, Homo sapiens
aggcataatctaattgcagtgtgggtcatcttaatataaatcagtaatctaaaaacattttaaacaactaatttggtgacatcctagaaaagtatgcatagtaacacaaatcccagaatatatgactctgatttatataacaaaatttaaccaattagcttttctatttaatgctttaaaataaaatgaggaataatttgaaaattgaataaacctagagaaattgtggcattctatatgtaatcctaatttacaaaaaatgtgagtaaaacagtttttacttttattaaccatgctaccatacctaaataaaatccatacaaccattttgagagtatttatattgaggyttatgaagtatctatatcaagaaaatgagaaattatcaccaattttgactagtatgctttaacaaaaaaaacctttttttagcctaagtggctataatattcctttatattcatatcatagattttattaggtcaagaagctaactagtttgttcaaagtgatgatgaaaaggttagtgaaataaaagagagttatcaatagcagcttttaaagaagcttctctttgttcaaggaaacattttaatgtccaatgtaatgaga

SEQ ID NO: 752997 - DNA, 612 bp, Homo sapiens
aggcataatctaattgcagtgtgggtcatcttaatataaatcagtaatctaaaaacattttaaacaactaatttggtgacatcctagaaaagtatgcatagtaacacaaatcccagaatatatgactctgatttatataacaaaatttaaccaattagcttttctatttaatgctttaaaataaaatgaggaataatttgaaaattgaataaacctagagaaattgtggcattctatatgtaatcctaatttacaaaaaatgtgagtaaaacagtttttacttttattaaccatgctaccatacctaaataaaatccatacaaccattttgagagtatttatattgaggcttatgaagtatctatatcaagaaaatgagaaattatcaccaattttgactagtatgctttaacaaaaaaaacctttttttagcctaagtggctataatattcctttatattcatatcatarattttattaggtcaagaagctaactagtttgttcaaagtgatgatgaaaaggttagtgaaataaaagagagttatcaatagcagcttttaaagaagcttctctttgttcaaggaaacattttaatgtccaatgtaatgaga

SEQ ID NO: 752998 - DNA, 643 bp, Homo sapiens
gaaaaataaaattttagattaactcttaacagtttcatataactttatggaggttaattcaaaatgtgtttttagtttcataaccaagaaacctggaatttctttacaaatagcaaatctaatatctaaatattttagctccgtcttaccacttccatatcatcataacttggacttaacaaagatcagtgccttttccactgtgagtcgggcctgatgtcactaagaagaacctttcattgactaattttactttggctatgggaaacgatttgcagtaatgacgcacactcttttcctaagcatgactgttttatcaaggaaggtgtctatatggagaaaacrttgacttgggtgggtaggagtgaacaaagtagtggtgggtacaagaagcctcagaagagaaatggaatatatgaaagaaggcagtcttccaccagtcagtaattcacttgggctaataaagttccaaaatacctccttctttttcagtaattctataatttctctaatcccttactcatttcttaatctttaaagcaaatttatgaacacctactttatacttaatattttacttcaatatagtgggatagcaaaaagcacttcattttaaaaatggttatgattagtaatatttgct

SEQ ID NO: 752999 - DNA, 540 bp, Homo sapiens
ggtacaagtacagccttcttacatgcatatattgcatagtggtgatgtctgggcttttagtgcacccatcacccgaacagtgaacactgtactcaaaaggtaatttttcaaccctcccccgacaagcacacataaaaggatttataatttccctcacaagctcacataaaaggatttataatttcaagggtaaaaayaagtttcagaaatgaaccttcccattaataaagaaaacaacagggagtcagaagaaaactatttttatatggagctgaccaatcagtgtgactgcattttttccaaaggattgactaaatcagtattttgatcccctatgggcagtttttctttccttttttttttttttttgagacggggtgtcactctgtcacccaggctaggaggctggagtgtagtggtgcagtcatggctagccttgacctgctgggctcaaaccatcctcccacctcagcctcctgagtagctgggaccgcaggcacaggccaccaagcctggctaatttggcaaaactctgtctct

SEQ ID NO: 753000 - DNA, 540 bp, Homo sapiens
ggtacaagtacagccttcttacatgcatatattgcatagtggtgatgtctgggcttttagtgcacccatcacccgaacagtgaacactgtactcaaaaggtaatttttcaaccctcccccgacaagcacacataaaaggatttataatttccctcacaagctcacataaaaggatttataatttcaagggtaaaaacaagtttcagaaatgaaccttcccattaataaagaaaacaacagggagtcagaagaaaactatttttatatggagctgaccaatcartgtgactgcattttttccaaaggattgactaaatcagtattttgatcccctatgggcagtttttctttccttttttttttttttttgagacggggtgtcactctgtcacccaggctaggaggctggagtgtagtggtgcagtcatggctagccttgacctgctgggctcaaaccatcctcccacctcagcctcctgagtagctgggaccgcaggcacaggccaccaagcctggctaatttggcaaaactctgtctct

SEQ ID NO: 753001 - DNA, 559 bp, Homo sapiens
acaatggaatacacaaaacaatatggatgatgcatctccaaataattatgctgtgtgaaagaagccatacccactgattccattcttataaaattccggaaaatgtaaacaaatctatagtggcaggcagcagatctgtggttgccttgagacagaaaaataggaaggaaggattacaaaaggatgtaagaggaaacttttggggatgacagatgtgttcatgctatgttcrtgtcttgattgcggtggtggttttacaggtgtatttataatatgggtagtttattgtatgtcaattatacctaaggaaatctgctaaaaatagatttaacaagagagacaatagcttagagattattttaaaaaagattcttttaaagggttttaagtgactgaagatgaattcctgaaatggaggtaattttgtcgaataaatatataaatataaatgcttactctttattatagaatgtatataatatatgtatttttattacattgccagctcatgaacagcaaactcagttatgacaataattaaattctcatcattgatata

SEQ ID NO: 753002 - DNA, 683 bp, Homo sapiens
caaagcacatgataaagagaaaaataaacaatgaatgggagaaaacagttgcaaatcatatatttgatatgagtctacaagtatgcagaatacgtaaagaattcttacaactcaacagaaaaaaaataaaaatgagcaaaggactttaacagacatttttctaaagatatacaaatggccaataaacacatgaaaagatgctaaacatgattagtcaattagggaaatgcaaatcaaaaccataatgaagtactgcttcacacaattaggatagctataatttttttaaraaagaaaaacaaacaaaaacaagtgttagtaaggatgcagagaatatcagagccctcaaacattgctggtgagaatgtaaaatgggtcagccactgtgaaaaacaatttggtgattccttaataaggtaacatatcattaccatatgatcaagcaattccactcctaggtatatatccaaaagaattaaaaacaggtattccaacaaatacttgtacacaaatgttcacagaaacactattaacaattgccaaaaggtagaaaccacccaagtgtctatcaactgaagaatggataaacaaactgtgatatgtccatatgatagaacattattcaaagctgggcgcggtggcacatgcctgtaatcccagctactcaagatgctgaggaggaa

SEQ ID NO: 753003 - DNA, 635 bp, Homo sapiens
acctggtttcttttctaaaaccttgtttaactgccttgtttatggaccagaaaatacccagccaattttagatgatgtttcagactttgatgtggcacagattataatcagggtaagcaatgtatctgtttattaaaatgcacactacattctaggtatcttttaatgtaaatgactgatctgcaataaaataatagtattatctatgaaggagttagggattgtaaacatrtatttctgtttaccagtggagttctgaaccagttaaaagatagttttaaaagtcagatggctggagattaaagtgccacgtttaatgttggtaaaaccagttggataatgtgattttggtctgtgttcaccatggcttgtgaatactcctcagaaatacatggatttgcctgccttgctagagacaacgtgaggcagattccctattgcaagctagaaagcagatgaaagtgcactttgatggaggccgatgggtctgaagagaggaaggatttggcttaccagttagaatacttttccttccttctatagggaggtatgaatgatagatggagagaaagactaggctgaatttcttccaaagggaaacaagtggtagggatcggggaggacttaatgcgtcc

SEQ ID NO: 753004 - DNA, 444 bp, Homo sapiens
agaagatataaaatatgctttgacctataaataatgttacataagaggatcaggaatgaatctaaaaataaaaacctttttttgttcttgagacgcagtcttgctctttcgcccaggctggagtacagtggtgcaatctcaggtcactgcaacctccgcctgccgggttcaagcgattctccctgcctcagcctcccaagtagctgggattacaggggcctgccaccatgcccggctggtttttgtattttttagtagagacagggtttcgccatgttggcmaggctggtcttgaactcctgaccttgggtgatctgcccgcctcggcctcccaaagtgaggggagggattacaggcgtgagccaccatgcctggcctaaaataaaaacttttatatacttaggagaataataaaacttgtccttttcaggattctctttaaga

SEQ ID NO: 753005 - DNA, 560 bp, Homo sapiens
gggatcctttccaattcttgaactttaagagtccctgggctccctcttcattcccctggatggaggaaattaaagtacagggtgctttgagtacaggagataagacacatgtacaaataattgcaacataaaaagggtagactcagtctccattgtcagaagaggaaattgggaaatataacttagggcagagattccctaaaaccaaacaaggataatactggtccttgatgaggttttcactgtttcagaatgagatgagaataaaaaggactatgaaatgtgtttttatactggcctttatacaatttttatttcctactatttgaagtgaaaatatccttttaaaaataaaaggtggtgaaagtaratggtagagtttttttgtttaatcttcacataaaaagttgggaatctttgaagaggttggttataattaactatgcaacttaaaatgacttaattctgtttattaatcttaatgcagtttctggatatgaacaaacaataactgagatgtcataaattataatcacaaaaatttttgttgattgctaaac

SEQ ID NO: 753006 - DNA, 577 bp, Homo sapiens
caatgatagagatgacaaggacagcagcagcagcattaatgaagcagtggctctgcaccgggcactaggctaagcactgcatgcacattattaaactgccatatcccattatagaaactgagtccaggccgggtgtagtggctcatgcctgtaatcccagtattttggaaggccaaggcaggaggatcacttgrgcccagttcaagaccagcctgggccacacagggagaccctgtctctgcaagaattttaaaaactagccggtgtggtggtgcatgccagtagtcccacctcaggcatgcatcctacccaggaggcggaggtgggaggatcacttgagtccagaaggtcaaggctgcagtgagccatgattgcaccactgcactccagcctaggtgacagagcaagaccctgtcaataaataaataaaatgaataaatgaataaatacataataaactgagtcttaggttgaaaaacctctacctggcccaggtcgtcccagctgtaaatgtcagagcaggagctgaatccaggcagcccaggctgaccaccgccccgcaactacaggctcgagg

SEQ ID NO: 753007 - DNA, 643 bp, Homo sapiens
gaaactacacatgtacctctgaacttaaaataaaagttaaaaaagtatctctttaagtgacatattcaggagttacatatgtgtttatttcaaacaaattaaggaaattcaacaactaaactcataggcttctaccttaagatgcttactgttagatgggaaagacagatagatgatagatagatagatagatagatagatagatagatagatagatagatagatagatggtagaatgatagatagatagatagataggtaggtagatagatagaaggtagaaagatagagagatragtagaaaatttcatacaaaaaataaaagatacaaatctgctttatcctggggaaatctaatctctcttacctacaatttttttatccttttcactttatcaccgtatgggagaaaaagttccaatacattgatatgcttcctagcctttaaaaacacagtgctaggcttcatgagaaacacgtaacagaaacagaatccattatcccacatatgctcagagagctctaacaagtgcctgcaaactggccaacacatgtgctttacattaagtccagcccactcagtctcacttatatctaaaaaacaactgtcttaaaaacaaaataaataaatataactagaaaa

SEQ ID NO: 753008 - DNA, 603 bp, Homo sapiens
gacatattcaggagttacatatgtgtttatttcaaacaaattaaggaaattcaacaactaaactcataggcttctaccttaagatgcttactgttagatgggaaagacagatagatgatagatagatagatagatagatagatagatagatagatagatagatagatagatggtagaatgatagatagatagatagataggtaggtagatagatagaaggtagaaagatagagagatgagtagaaaatttcatacaaaaaataaaagatacaaatctgctttatcctggggaaatctaatctctcttacctacaatttttttatccttttcactttatcacygtatgggagaaaaagttccaatacattgatatgcttcctagcctttaaaaacacagtgctaggcttcatgagaaacacgtaacagaaacagaatccattatcccacatatgctcagagagctctaacaagtgcctgcaaactggccaacacatgtgctttacattaagtccagcccactcagtctcacttatatctaaaaaacaactgtcttaaaaacaaaataaataaatataactagaaaagtgtttccatagttccca

SEQ ID NO: 753009 - DNA, 625 bp, Homo sapiens
gatgctccacaaccaaaaaatatggtttagtttatatatgaaaaatactagtttttgattgacaagaatgttctaaaactgtttttggctaaaaacaaacaactacgtcagttttttcagaacaagctagaaataatctatatataatcagaaaatatattcttatttgcaagtttatcttaaaatgatataaatgggataaattctaaatagtaaaaatgataaatattgtgtttcagtaactgccttacaatttccatctgactttgtccaaaataatatgtacaccttattgttttgactccatttatagttactctattttataggtcatatttatgataatcccagcaaacgtcaataagaatcaagcacctagttcccagtgcaatcactggaggcaatataatgagcctgaaaaaagaaatacctcccaatgacaacaatgtctttttaaccrtgtcaataaaaagagccatgggaggttttgaaaaatataaattgaatcttgactcagtatgaacttcagaggttcacatgatcttctgaaaatggttcactcattgtatagcctgccactactatgaaagatacatgtcacttttatatgtcctcaaatgtcata

SEQ ID NO: 753010 - DNA, 647 bp, Homo sapiens
aaaataatatagtcactctggaaaactatttgacagtctcttataaaactaaacatgtaactggcatttgatccagtaattgtatgcttggacatttattgtagagaaataaaaatttatattcacacaacaaatttacataaatgtttatagtggctttgttaataatagtgcaaaaccagaaacaacccaaatgtccttcagccggtgaatgtttaaacaaactatggtacatctataccatggaaaatgggttagcaaaaaaaakaataaaccatagatacacatcataacctgcatgaatctccagagtattatgttcagtgaaaaaagcctaaccacaaaagattacatataattttattctgcttatatagcaatcttgaaaagataaattatagaaatggaaaacagattagtgattgtccggggctaggaagtctatgtcaacagtagagaagtgggtatagctgtaaaagggcaataggagagatccttgtggcaatggtgctgttctgtaacttgcctatatcaatgtcaatattctgatcatgatcttattctgtagtttttcaagatgttaccactggaggaaattgggtaaagagaaatgggatctctctgcatcatttcttataactgcatga

SEQ ID NO: 753011 - DNA, 605 bp, Homo sapiens
tttgttcgcattttaaatgagcagttaagcactcctaatttacaattataatgaaatattaattaacttgctaaacatttatattttatgtcttagtccatttagaagagtggatttaaaagtatttccctatgttttatataataattgagcttttgtaaataattgtgaaatgcttttctttaaaatgttttgcatgattccagaaaaattattaggataaatattgatcatcctgtttcagacattttattaatgaaatattataaaaagaccatatawgtaattaggtatacttttccgcacgtttcttagacgcattttggttaatggcaaatgccaacattaagcagacattgacgtgattatctacatgtttacaacatatgctgtttgttcttgcaatgtatttgctgaagttctcttaaatggaagcaatgacgtattgtgcacagaatagagtaaaacacagtgaactgttcataatgagttactagtgggacttgcagatgttggtgtaaattatgcctagatttagttattttttttttattattatactttaagttttagggtacatgtgcacaacgtgcaggttagttaca

SEQ ID NO: 753012 - DNA, 605 bp, Homo sapiens
tttgttcgcattttaaatgagcagttaagcactcctaatttacaattataatgaaatattaattaacttgctaaacatttatattttatgtcttagtccatttagaagagtggatttaaaagtatttccctatgttttatataataattgagcttttgtaaataattgtgaaatgcttttctttaaaatgttttgcatgattccagaaaaattattaggataaatattgatcatcctgtttcagacattttattaatgaaatattataaaaagaccatataagtaattaggtatacttttccgcacgtttcttagacgcattttggttaatggcaaatgccaacattaagcagacattgacrtgattatctacatgtttacaacatatgctgtttgttcttgcaatgtatttgctgaagttctcttaaatggaagcaatgacgtattgtgcacagaatagagtaaaacacagtgaactgttcataatgagttactagtgggacttgcagatgttggtgtaaattatgcctagatttagttattttttttttattattatactttaagttttagggtacatgtgcacaacgtgcaggttagttaca

SEQ ID NO: 753013 - DNA, 565 bp, Homo sapiens
attaattatatacacatggatgacagaaaacacttctgttaaattataactaaattataacatttgactgcaaaatactaattaaaaataataatctaatgaatagagtatgcaggcattatttaattatcatacagtattaattttatggttaaaacatttaacaagaccaacaatcaaaaacaaaaactgtcawattttctaatcatatttcactttaaatctacaacgaatactcctgacattattaaaaaaattagacattcataaaattataatgctgaagcagaaaagcaaaaaatggcaaacactattttctctattttaatacttcagaaggaaattacatatctctgtatccacctccactctcccaaaaaaaaaattttatcaaaaaaaaaaaaaaaaaagaaaagaaagaaaaagaaatccatagaaagtggcctaagggcctatagaagagaatatagattttcctcttgaactgtgttcttcatatcgagacactaaagaatggtggtagaagtgtggtttctataatcagactcattagctatgtaatccc

SEQ ID NO: 753014 - DNA, 540 bp, Homo sapiens
taatgtataatttataatgtatagagttctaaggacaccatgaaatgcagatacactgtacatctttcataaacgaataaggattatatccctttataaaaaacatttatatactctctaatataatgattttgacaaatgaagaaagagggatatatggaatatacatatatattctcttagaattatgtgaaaatcgacracttgttataaaaggatatatacagtacaattattttttatttatttatttattctttttttggagatggtgtctcgcactctcacccaggctggagtgcagtggcacgatctcggctcactgcaacctccacctcccaggttcaagggattctcctgcctcagcctcccgagtagctgggattacaggcgcccaccaccacacccggctaatattttgcatttttagtagagacggtgtttcactatgttggccaggctggtctcaaactcctgaccttgtgatctgcccacctcggcctcccaaagtgctgggattacaggcgtgagacaccacac

SEQ ID NO: 753015 - DNA, 540 bp, Homo sapiens
taatgtataatttataatgtatagagttctaaggacaccatgaaatgcagatacactgtacatctttcataaacgaataaggattatatccctttataaaaaacatttatatactctctaatataatgattttgacaaatgaagaaagagggatatatggaatatacatatatattctcttagaattatgtgaaaatcgacgrcttgttataaaaggatatatacagtacaattattttttatttatttatttattctttttttggagatggtgtctcgcactctcacccaggctggagtgcagtggcacgatctcggctcactgcaacctccacctcccaggttcaagggattctcctgcctcagcctcccgagtagctgggattacaggcgcccaccaccacacccggctaatattttgcatttttagtagagacggtgtttcactatgttggccaggctggtctcaaactcctgaccttgtgatctgcccacctcggcctcccaaagtgctgggattacaggcgtgagacaccacac

SEQ ID NO: 753016 - DNA, 601 bp, Homo sapiens
ggaatttcaacgttagaccatcacctttcccccgactgcacatcagagcagaaggctttctgactgcctgtccttgaacataacactaacacaacatatgaaactgattaggaggactgaggtgtttgaaagaaaaaaactttgatttttataaagattggcatgaagatcattcttctcagttgaaatttactttgataaaatacacccccttctcaactgcagttgccaagtataaaaacaaatgcctactttcttctgaatcacttttttatatttgtctcatgtatttttcagattttcacatcagtgtaacacaggtaagaataaaagcayagaattaaatccgaatatttacctatgaagaaacacttaacaggccagtactaaaacttggagctcataaaaggggaaacatgtctttctgtcgttgagtataatttagtttcaaaagatggttttttgggtttgctatgcaaaatcctctagcaacagtcacagtttctcagtactggtgttttaaagttctttgctttgggtagtgcctcgttgcaggtttaggagaaaaaaatgttaaaaggtattcctgacagctggcagc

SEQ ID NO: 753017 - DNA, 552 bp, Homo sapiens
cccaagaagaaatgtaagctctacggcccttcccctgtacctcgtcctatgcatctcttcatctgtatcctttgtaccattgtgtccggaattggtgtgttcttggtctcactgacttcaagaatgaagctgcggacccttgccatgactgttacggttcttaaaggtggcgtgtccggmgtttgttccctctgatgttcggatgtgttcggagtttctcccttctggtgggctggtggtctcgctggcttcagtgaagctgcataccttcgcggttgagtgttacagctcttaaggcagcacgtctggagttgttcgatcctccggtgggttcgtagtctcactggctcaggagtgaagctgcagaccttcctggtgagtgttacagctcataaagacaatgtgggcccaaaggagtgagcagcagcaagatttattgcagagttaaagaacaaagcttccaccatgcggaagaggacctgagcgggttaccactgctggctccggcagcctgcttttattctcttacctggccccacccgcatcctgctc

SEQ ID NO: 753018 - DNA, 645 bp, Homo sapiens
atggaggatgttaggcagtgaattatataagtttaggtttgcaaactacattttgtggtgtattggcattccatagagatacatgcacatgtatttacattttctcagaattcatgtgatttcttcttgtggaaagtcagaagcagttttagaaaatttytgcaaattcacaacacactatatcattattttgatgcaaaagtctttgcaaattaacaacaattttctttctaggaacacgaaaaacagtattatttctcttccgtactgccactccatcacccataacctaaactagatgaagaacaggcatttgaatgcgaggtcaatctgaactttattcttagttcaaacactaatttgctacatggtcctgagtatgcttcataaccattgtttgctctagtggttcttcctttgaggcaatattaatctttgtgttccttctgtctcatcaagagagtacaaatgttgtttgctagataatagttaatctctagtaaatgtgggtgaagcacagttcagaaattaatgtttatttattggaatcactgcaaaacatttgttaaatatctcattccacgtatctataaattttgatccctgaagtggactccgtaagtttattgaggtgcaaggagcaaa

SEQ ID NO: 753019 - DNA, 509 bp, Homo sapiens
cagctgatcccacatccctcccccagccccacactgggaccctccacaggatcttgcccagggtgaaagctgaataggggctcatggctgggattggctatcaccccacatgtctgccatggctgaggaccctcctgcctggaggcagaaggatgaatgagatgagggcgttggggggtgcctttcargacctctaagtctgccgagagtcagtaaataaagatctgaggggcaggaatggggctcagggcaaaggggttacataaaggccataaatgtagcccagcctgcgctgccaagagccacttctgaaagccgctccccaccacctggcagcaccctggctccctggcctggaagaaggaagaggggcttaacagataaatgaatgaatgaacgaacagataaacttaagctggcgggacctggcaaccaccaagcaggcagaaccaagaagcaaagctctgcaccgcacgggacggttgatgacaaccacgatgatgaacggc

SEQ ID NO: 753020 - DNA, 560 bp, Homo sapiens
acaactcctcaccagcaagggaccaaactggatggagaatgagtttgacgaattgacagaagtaggcttcagtaggtaggtaataacaaactcctccaagctaaaggagcatgttctaacccaatgcaaggaagctaagaaccttgaaaaaaggttagatgaatttctaactagaataacaagtttacagaagaaaataaatgacctgatggagctgaagaacacagcatgagaacttcatgaagcatacacaagtatcaatgctcaaatcaatcaaccggaagaaaggatatcagagattgaagatcaactcaatgaaataaagagagaagacaagattagagaaacaagaataaaaagaaatgaacaaagcctccaagaaacatrggactatgtgaaaagaccaaatctatgtttcattggtgtacctgaaagtgatggggagaatggaaccaagttggaaaacactcttcaggagattatctagaacttctacaacctagcaagataggccaacattcaaattcaggaaatacagagaatgccacaaagatattact

SEQ ID NO: 753021 - DNA, 638 bp, Homo sapiens
cataattaatgagaaaatattcaaactcttttttaaaaattatactttaagttctggtgcagaacgtgcaggtttgttacataggtatacacatgccatggtggtttgctgcattcatcaacctgtcatctacattaggyatttctcctaatgctatccctcccctagtccccacctccgacaggtcctggtgagtgatgttcccctccctgtgtccgtgtgttctcattgttcatctcccacttatgagtgagaacatgcagtatttggttttctgttcttgtgttagtttgctgagaatgatggtttctagcgtcatccatgtccctgcaaaggacaaaaactcatccttttttatggctggatagtattccatggtgtatatgtgccgcattttctttatctagtctatcattgatgggcatttgggttggttccaagtctttgctactgtgaacagtgccgcaataaacataagtgtgtatgtgtcttcatagtagaatgatatataatcctttgagtatatacccagtaatgggattgctgggtcaaatggtatttctggttctagatccttgaggaattgccacactgtcttccagaatggttgaactaattaacactcccaccaacagtgt

SEQ ID NO: 753022 - DNA, 531 bp, Homo sapiens
atccttgggctatgatttggctaaatcttaggttttgaagctttcatatgtactgcttttttttttttttttttaaatcaatggcaacatcatctaggcactaacatccattcctgttggttggtagtatattctccatcacttggcagatttgatgtattttaatccagcctttagctttctctaatctcacttcatcaatcctcctctgcttagacacrtccgccttcatttggcagacatggcaggtttttcatttcccccatgtaaatgacttgtttattacagtaggggtccctggtcttttgaaacagcttacagatatcctcagatagagctcagaaagggcttcatgaataataatgcccaagtaaacccgagatgagcttggacattgcctctttgaaattcatgcatcatcctaagtgctgtcatttaaacagaaagtgtagaaggcttcctgtgaaggctgagtctgaaatatgctttcattacaaaacttatcatttcagcacaaaacaaacggtggaa

SEQ ID NO: 753023 - DNA, 531 bp, Homo sapiens
atccttgggctatgatttggctaaatcttaggttttgaagctttcatatgtactgcttttttttttttttttttaaatcaatggcaacatcatctaggcactaacatccattcctgttggttggtagtatattctccatcacttggcagatttgatgtattttaatccagcctttagctttctctaatctcacttcatcaatcctcctctgcttagacacgtccgccttcatttggcagacatggcaggtttttcatttcccccatgtaaatgacttgtttattacagtaggggtccctggtcttttgaaacagcttacagatatcctcagatagagctcaraaagggcttcatgaataataatgcccaagtaaacccgagatgagcttggacattgcctctttgaaattcatgcatcatcctaagtgctgtcatttaaacagaaagtgtagaaggcttcctgtgaaggctgagtctgaaatatgctttcattacaaaacttatcatttcagcacaaaacaaacggtggaa

SEQ ID NO: 753024 - DNA, 622 bp, Homo sapiens
aaggaggggagagagttatcactaccgtgaacctcaggtgtgatgtgctcctggaaagaggtgtttcctactatccctgaaaaaaaaaaataccgtttgtatttgtacccaccccccaccatcgagctgtcaacccccctcattaagacacttgtaccagggaaaaggagtaatgggaataaaagacaagagcaacttgagtcttcatttcattgctcacatcgctctgtcctgctgctttcttcaccgaagtactgggtttctattccaaaccagctacaatgaacagtcttcattcggagttgggactatggtctcaacatgggactactggggaccctctaatagccttgtcctagacacacatgactttggccacctcagtagcaagagggatctgaagggatatgctcgagatccctggartcctcagaaatgtctacaggcaggtgtcctggggtcctgcatagaagggcactggccaggccttgagtgagctcagcggggcctctagactcacctgagatcacagccaggtcgctctcctgctctcctggtgctgattccagctcctttctgttattctgtagccctcaggatttgggtgtccttcggactgtcc

SEQ ID NO: 753025 - DNA, 617 bp, Homo sapiens
caagaaagtgaaaagaccaaccacgggtgtgggaatggtatttccaacagttatcactacaaaagaccagtgcccagcacacatgtacaactccttcaccaagtaagaaaaaggcaaacaatacaaaagaaatactggcaaaggaatctaatacattcatcacaaaatgaaaatataaatggccaagaaatatgtgaggatgtgtttaacttcattagtcattgaggaaatgcaaaataaaaccaccgaggaaatgcaaaataaaaccgccaaggaatatggctaaaattaaacactctgaaatacsctgtgttggtgaggatgcagaagaatagaaatgctcagtcacactggtaggaacataagatggtgcaaacgctgcagaaaactcagttgaagattttcacactttatgaagaacacccagggcattctttgctgagtctatgcctggaaaaatatatgtacaagtggacacatggaaaaaacaaacaatgttcatagcagctttgtttataattgccccaaactggatgcaacataacacgcatacaacaaaatactatccagcagtgtaaaggaatgcactatagctacacacaatgacatgcatggat

SEQ ID NO: 753026 - DNA, 593 bp, Homo sapiens
aacagttcgggacaacatttcaggatccactcatcctccacggtcagctatcttgcaatgtgttcttgtaagtgtcttgcataggggtagagggaccttcttgatgacctacagactgactaagtagggggcgtactggaagaagagctaaggactattgtctcttctgcygccatcaagctcatggtgccacgttaacttgtgccaacagatgcttatagaagccagtcaggctcatggtgccacattaacttgtaccaacggatgcttatagaagccactcggatttgccacagcagggaggaaggcatgggagaagaggaggagggactcaatgtcctgtgatggagtgtagaggctgctgactggaaaaaaccaggaacaatgaaaatgaggtatcttctttaggatgccatgccaagcagaaagcctccgaaaaatcccccagtcactagaacatttttcttcacaaatgacaccacctcctcagctttgctcctgacctggttaggtatctgagtgctcttagggatcttcagctgctctttggctttcttcatgtccttctccactcgttgccaatcaactttgat

SEQ ID NO: 753027 - DNA, 631 bp, Homo sapiens
tttagttcatgttgttacatattaacatcccttgacgtattcctcagtactgctggggaagcaacctgaaagcatggtactggaccaagtttccatgacctcacagaacaaactcccttcactggcgtggaggggagacagggccccaaagctgcagcaaggccatggagcagctgtccctcggtgccaggtgagtgtgtggcccctacctgagtggtcagagagggcggcctgcaccacagtccttcagggtctccacgttcagcacccctaggcacaagcttcccctcccaggtcatccttcagccacagcrgaaaacctgcccatgacgggtctccccatgtgttggtgccgcacggtgacgactgccaaagattgccttcccatgccatacaaaacaggtaaaggtctttattggtcagccactactgcccgggcaagcagtggtgtgagaggtacagaacggtgcaggttggggaacactctacagaatctaaacctaccgtgacatcagctgagaacgtcttgttccttacagagggagcgatccatctctcacagactgtaatgtaccattaccacttaacacagcatatagatatatgcatatacggatagattatatttatt

SEQ ID NO: 753028 - DNA, 507 bp, Homo sapiens
atatttatttattacaaataaactgtagtttcacatctctcaaaaatggacccagttttcacatggatgttcaggttctgaatgtacaagaaaaggtcaatgtgcttatttaattcgtccatgcaaagcttatacgtgtatcactaagtactttaaaaaatagaatggtctccttttgagcaaatctgtttagactyaggattagtaaaacagtatgaaataatgagatacactgatagaaattaggaagtgacatactgatgattctgggtatgtaaagggtgaggggtacaatcttcccttaagacctgccaggaaaggagagacttggaaccaggagtggcagggccacccaagctggaggaggtgggtctgctcagtcctatgcagcgcaggctcagagcaccaccgaagacctttctgccaaagatctcatcctacccatgagaaccatcatactccagagactaaaaaacgccagtcccagctggagacggggaaggaggt

SEQ ID NO: 753029 - DNA, 567 bp, Homo sapiens
ataagtcaccccaactgtgatctgtatggagaagttaatatgccaggggccttgcttggggagagaggactggcacttgccttacctagtccagtcctgacctgcctctccaatcttttctccctctactaccctgcacaccagccaacatgatgactctttttactctaaagcagtcatctacattcctacatctatcctttttctctcacagtgaaggccctactacctctccttccttccctccctccctcacttccttccttccttctttmcttccttccttcctgttttctctcccttcctccctacaagcttccttcctttttttctttcatctttctctctctcccctccaactgcctctcttctcccaccgtctcatttaagttttgttctccctcaatccaagttacagtgtcatttcattccaaaacaatttccctgtaaatcatagaccaatatttttaaaactatgttcctcaaactatctggttcagaatgaaatgccagtttctgagctcccaccctagacccacagagtaagactctgttgttataagagcc

SEQ ID NO: 753030 - DNA, 634 bp, Homo sapiens
agcaggaaggtgatggggttggaagggtgtttggcaccgtctctctgcaggcctgacactaaagtttaaaatgctattactgttgctttctggttgcgcctcccacgaggagacctgaaagtgtctctaatacatacatacactcatactaataccccaaatctacctcttcttcacgaactctctaatccaaagcaaatcttaagtatgcaatttcctgttcttggcaaagaattgccaactcggaagaatgatgaagaaagagaaggatgagatcacagaagttcctgctccatttagaatttagtcagtgcagtagggagagaaagggcacacatcaccttcttagttccattggaaaggatacgttccccggggctagaaagaaaaytcccctgcctcagggctgtctttggatttttttatttctagagaactgcttcccatagtccaaggagaacagctcactgattcttcaagctgtcctttctgccatgtgacagcttagcaaaggctttctgtttcctgattgccagcaggcaaaaggagtgttctggataagaggtatgttggtggcatcaaaagaaagagactgttggacagcaagttgaggaaacagccttaaaattaggca

SEQ ID NO: 753031 - DNA, 634 bp, Homo sapiens
agcaggaaggtgatggggttggaagggtgtttggcaccgtctctctgcaggcctgacactaaagtttaaaatgctattactgttgctttctggttgcgcctcccacgaggagacctgaaagtgtctctaatacatacatacactcatactaataccccaaatctacctcttcttcacgaactctctaatccaaagcaaatcttaagtatgcaatttcctgttcttggcaaagaattgccaactcggaagaatgatgaagaaagagaaggatgagatcacagaagttcctgctccatttagaatttagtcagtgcagtagggagagaaagggcacacatcaccttcttagttccattggaaaggatacgttccccggggctagaaagaaaattcccctgcctcagggctgtctttggattttttkatttctagagaactgcttcccatagtccaaggagaacagctcactgattcttcaagctgtcctttctgccatgtgacagcttagcaaaggctttctgtttcctgattgccagcaggcaaaaggagtgttctggataagaggtatgttggtggcatcaaaagaaagagactgttggacagcaagttgaggaaacagccttaaaattaggca

SEQ ID NO: 753032 - DNA, 660 bp, Homo sapiens
gtgagcagtggccaagttggctacaaatgctagaataatgtgctaagaaatgtcttgatggaggtgagaattgaatagagacttgtaaaaaaaaaaaaaaagaggattttctaatttagtgttcaggaccatttagcaatacttcctgcaatcccagttggtgctagctggaatgcctagccgtaacattttaagcctttaagtgtgcttctatattcaacaaagtaaataaatttttgcactyttacaaaggcaagcaaatgtctgggctctggaggaacgtacaaatgtgaataagataaggtccagctcacaaactggtgaaaacacataggtagggaattctgatggaaagaggcaaagtttaggaacacaatgaaaggaaagcctttggcagcagcctgacagagatggtatctcagcatgttgcctaggctggtctggaactcctggcctcaagcaatcctcctgcctcggcctcccaaagtgttggttttacaggcgtgagccatcgcagccagacaggcttatcttcgtggaacaagctggattgagtttggcataaaggagtggtcaggattttggcggggagatagggggaaggagatttcagggctgagatctgaatgggctgcctcttcacctcattggcttagctcc

SEQ ID NO: 753033 - DNA, 658 bp, Homo sapiens
aagattgccatttggttgtagtatcagatcaaaaactcagagtgccaaggtcattggcccctggatgcacacatcttataatctatggctgccatataagacagaagaaagaaatgtgcgctgtgcctgctgaacccttttatatcactattttatttaattttctcaacaatatgcttggatcatctcatgagctctattatacagatgaaaaactaaaatttgaagagattaagtagtccaagttcatgcagctggtaagtgtcatcagctaccatttaagctcaggtctgtctggcatcaaagtttgtaccatacctttacctcctaattcaagagaggacatacaacaattttcattatagtccaccctgatttatttgcaagtatattatccttttttcagtgactatggatcttaggggccatccagtttataagctcttraagtgatgatatcagtggtatcagttttaaaaggaaacttggaaaaaatacagaaaagtgaaatgtgtatggggtgttatattagtcagggttctctagagggacagaactaataggatagacatacatataaaggggagtttattaaggagtattgactcacacaatcacaagtaaggtgccacaataggccatctgcaagctaaggagt

SEQ ID NO: 753034 - DNA, 630 bp, Homo sapiens
aaaaataaaaatatcttaatttcatatatcttgcgtttcttaaatgaaacataatcattcctttgaacataatgacaattgtactcatgtcgcaggttttttcttaagctggcaaaattttcttcattttagaaaaactaacaatactttccctaattagtgaatgtactaattcctcctccctatttaagtaactcatgtttcatggttaccatamctccttcctgtgctctattaaaataagggaaaattatctgagatataaccttgagagggtagcagaatcaagctcctatgtgtgataaactcagcattttttaaagatggacattctattctttctatattcaaccttttaaaagtcaaacttgaagcaatttcatacattgatgggaaagtaagtcggcatgcaaatgcaaacctattcttggaaagtttcattttctaggtttcatgcgtttaaaatttggaagaagtcaacactaggtcttttctgatagaagttgtatctggttcagaaaagttttcccctttgtttttcaatcagccttgtaaactaaggagaaatcaccatgcattattaccaatctattctttacttttttgctcagtgacacaaattacaggcct

SEQ ID NO: 753035 - DNA, 526 bp, Homo sapiens
ataaatgctccttttgtttgtaaccatatagacataaaggatcttttcaaaatccttcttctttctcagagtccacacccaaaacatgctttaattttggctgatgttctttcctaagaaaattttctacttgctacatctccacattccctgccctgactgaggctctgacctctcccgagctttctcagcagcttcctgtttaccttcctgaccctaactagtctctctcccttctttcatattgctgtcagggtgatttttctaaggtgaaaatctgatcccttcactgttaygcttacattctccagtgggtccctggagcctcctccttcaatatttcagcattcccttctctgtgacactgtccctgattcgtgaaaggtcatctctgtgggccctgtgttatcttaggtgtacccaacccaacctgacaaccttgactataaaaaataatctctctatatttaggtgtgtagatagagatatttcttcccagaagtctgtgagattcttgagtgtaagg

SEQ ID NO: 753036 - DNA, 685 bp, Homo sapiens
gatccagaaaatgcccgtgattccacaagtctcttatgaaagactgtccctcaagtgctgctatggattgagctttgtcctccccaaattcataggttgaagttctgacccccagtgcctcagaatgtcaccatccttggaactatatttgaagatgatcacatcaagatgaagttggccttaatccagtatgactggtgtctttttaagaagggaaaatttgggcacagacacacacacacacagagggaagacaatgtaaagacacagggagaagacagccacccacaagctaaggcaaggtctggaacagatccttccctcatggccctcaagaggaaccaacccagccaacaacttgattttggacttctggtctccagtactgtaagacaatacattaaagccacccagtctgtagtactttgttatgacagctctggcagactaacacaggtgcaaatattgagtgtgacagttccacgagacaataagattgggggcagtgggcccaaggcaaycatcaaaaggcaaagaggtcaaggcagaagacaggaacccttggtatgggctcccctgagcatcaggagttctgtgacccctctcatcagctttcccacaaacaaggcacagtgttagattcaggcacaccttgtctcaaatctggaatgctccactttccagc

SEQ ID NO: 753037 - DNA, 590 bp, Homo sapiens
taataatgcctcccactttaataaagaatattctgggcactgtggactgttctatataccttatatatgttaactaattgaggccctaaagcatttcatgaggtaggtattcatcttctttttttttttttttttttttgagacggagtctcaytctgtcgcctaggctggagtgcagtggtgcgatctcggctcactgcaagctttcctcccggattcatgccattctcctgcctcagcctcccatgtagctgggactacaggcacccgccaccatgcccggctaaatttttgtattttttagtagagacggggtttcaccattagccaggatggtctcgatctcctgacctcttgatccgcccgcctcggcctcctaaagtgctgggattacaggcatgagccaccgtgcctggctgtattcgtctttttactgttactttatagtcacagaacacacagggattatggaacttgcccaaggtcacacagctagtaaacactgtgccaaagcagtctcattccaaagtttatgctaccacctggctcattgttttcctgcctgtgtcactgatggctgcactgagatc

SEQ ID NO: 753038 - DNA, 457 bp, Homo sapiens
aaaagtttacagaataaggacataaagaaaatattttgtacaatttatttatgttttaatccaagtgttattacaaagagtaaaaaacagattaaaaagttaattagtaataaagtaaaaaagttacagtaagctaagtttaatttattatttaaggaagattttttttttataaatttagtgcagctaaaacataccatgtttataatctacattagtgtacagtaatgtcctaggcctttgtwttcactcaacattcactcactgattcacccaaaacaatttccagtcctgtaagctccaaccatgctaagtgcactttaaaggtgtatcatttgtatctttttaattgtatttttactgtactttttctatggttagatatgtttagatacccaaatatttaccattgttacaattccctacagtattcagtatagtaatatgctgtacaggt

SEQ ID NO: 753039 - DNA, 457 bp, Homo sapiens
aaaagtttacagaataaggacataaagaaaatattttgtacaatttatttatgttttaatccaagtgttattacaaagagtaaaaaacagattaaaaagttaattagtaataaagtaaaaaagttacagtaagctaagtttaatttattatttaaggaagattttttttttataaatttagtgcagctaaaacataccatgtttataatctacattagtgtacagtaatgtcctaggcctttgtattcactcaacattcactcactgattcacccaaaacaayttccagtcctgtaagctccaaccatgctaagtgcactttaaaggtgtatcatttgtatctttttaattgtatttttactgtactttttctatggttagatatgtttagatacccaaatatttaccattgttacaattccctacagtattcagtatagtaatatgctgtacaggt

SEQ ID NO: 753040 - DNA, 636 bp, Homo sapiens
atagcatttaccttgtatttgggtattataagtaatctggagactaaagtttatgcaaggatatgcattggttatatgcaaatactatactatcttatattaatggacttgagaatctgtggattttgatttgagggggatttctggaaacaatcccccactgataatgagagatgactgtagtagtagtcagtagtagtaatagtagaagtagtaacacaggtagttatagaagtaataggaatagtaaagatcataataatgaaagaagaaaatatttgctgaatgcttaccaggtgctggatactgtgttatttgcctgaattattttattcaatctccatagtaaccttggaaaataggaattgatattttttrtcttcactttataggtgaggaaacagacacagagaaattcagtaacattcaaaatcacagagctagtaacagggctggatttctaccaggcagtagtaattacagttattgggccaggtgtggtggctcacacctgtaatcccagcaatttgggaggccaaggcaggcaaatcacttaaggtcaggagttcaagaccagcctgggcaacatggcaaaatcttgtctctactaaaatacaaaaattagctgggcttcct

SEQ ID NO: 753041 - DNA, 634 bp, Homo sapiens
gcagcaagtaacaacagcagggaatatgcgctgaatgtgggtaccatagcttctcagccttctgtaacacaagcagctgtggcaagtgtcattgatgaaagtaccacggcatccatattagagtcacaggcactgaatgtggagattaagagtaatcatgacaaaaatgttattccagatgaggtactgcagactctgttggatcattattcccacaaagctaatggacagcatgagatatccttcagtgttgcagatactgaagtgacttctagcatatcaataaattcttcagaagtaccagaggtcaccccrtcagagaatgttggatcaagctcccaagcatcctcatcagataaagccaacatgttgcaggaatactccaagtttctgcagcaggctttggacagaactagccaaaatgatgcctatttgaatagcccgagccttaactttgtgactgataaccagaccctcccaaatcagccagcattctcttccatagacaagcaggtctatgccaccatgcccatcaatagctttcgatcaggaatgaattctccactaagaacaactccagataagtcccactttggactaatagttggtgattcacagcactcatttccctttt

SEQ ID NO: 753042 - DNA, 638 bp, Homo sapiens
agcctagctacatcagtttcagagaggtctactttggtgtttttatatttgcattttattataaaaggactacatagtcattgtaaatattaaaacaaggtagaagaaataataaagtgaaaagtaaaatttccttctttccaatgtctgtctactactctaattccaaagaaatagctactaatattgatacctttctggaagttttacatttataaagaaacatattgtgtgcatgcatttatgtctaatacattttggatatataatacatacatttggctgggtgcagtggctcacgcctgtaatcccagcactttgggaggccgaggcggacggatcacgaggtcaggagattgagaccatcctggctaacatggtgaaaccctgtctctactaaaaatacaaaaaaaaattagctgggcatggtggcacgcgcctgtagtcccagctacttrggaggctgaggcaggagaatggcatgaacctgggaggtggggcttgcagtgagctgagatcacgccactgcactccagcctgggcgacagagtgagactctgtctcaaaaaaaaaaaaaaaaaaaaaaattttaatataaatgtacaatattttgttttattacataaattggataatgc

SEQ ID NO: 753043 - DNA, 546 bp, Homo sapiens
ctgaagtccagggtgcttggtggcctgtgcaaggtgagatgaacacagggctgggggagccccagaccttggccttgctgtcctgtaacgccagcactgtcagcctccagaaaccactcatgcagccaagtaaggcagtactcctgcttcgcggcaaggacamcaccaggcctgctggctgtttctgggcctcagaagttctttctcacccagtcctgggcagcatcccctcctgtctgcctgtgctgcagaagaggttacatccacatagctccacttagagacctttcatgggcagccctagccatggctgacctagtcccagggtctagaggatctgttggccccaatctgtgaattgagggcttgccctggataatctctgttcaccccccagcttacctgactctgaaccgcctcaggtgctcactgagaaacttaaagggggaattgccctgggggctatgtacatttttaaatgagacgctttaaatccagggtagtggtgggttgatgaggtgccacatgctgctgctgggccctgtc

SEQ ID NO: 753044 - DNA, 608 bp, Homo sapiens
gcaaaactacagatatggtaaaaagatcaggggtttgggggtggtggcagggaaggaggtataggtggagcaatggggatttctggtagtgaaactactctgtatgatacagtaaaggtagatacacgtaattatacatgtcaaaacccacagaatgttcaacacatacagtaaaccctaacataaactgcgaactttagttaataataatctatgaatattaattcaycaatcccaacaagtgtaatcagactaatagaagatgcactaataggggaaactaagaaggggaggaaagaaggcgtatgctggagctctgtactttccaaacaattttcccataagcctaaaactgctctaaaaacatggtcttaaataaagtctttaactgctcttaaaaaaaaggggggaggaaaaaaatgctctgatctacaggggaatatttactacaagaaaaaaaaaaaaagaataataaaattaccatttggcaaccacatcatgtgagaacttatttaataattattttaacatttttttgttttagttttttaaatgggaaataaatcaccacttttaatttttagaaaaagagctaccaagtcatgaaa

SEQ ID NO: 753045 - DNA, 560 bp, Homo sapiens
ggaagaaggccacaaaagtatcaagaaaggtagttttggggtgaggagaaactgacagagaaatcaatgtcacataaacctcttggtgggcacatctggcaggtagaccccaccactactgcaatttcagactacctaattttaactcgtttttaaatactaatcttgccataattgatcatctgacttttattcctgttctgagawatttttagaaaaagtattgaatgagaaagcagcagcaagattaaaaacatgaataaaaagcatatcttttcatgtaaatcaagcttgtccaactcatggctcgtgggccgcatgcaacccaggagcactttgaatgaagccttacacaaattcataaactttcttaaaacattatgagtttttttttgcattttttttttttagctcatcacctatcttagtgttagtgtattttatgtgtggcttgagataattcttcttctgatgtggcccagggaagccaaaagattggacacccctgatgtaaacgaaagtgaactgtaaaacagtaacactagcctctaagaaagcca

SEQ ID NO: 753046 - DNA, 524 bp, Homo sapiens
ttttagctgttaaaaatggataaacttgcagttttatacttctacttttcctctcccttccctccctcacttttttgggctatatcatttcttgattgtaaaggtttataagatatgaacactgttatataactgcaattcccacatttattgaaatcttcacactgaatttaataataactagttttttttctatgttmaataaggtaggtctgatttttcattcttttatcactgtttgtctgactgtaagattcttaagtcactgcttatttccttgagaaatgtttaaaagctattgttctactgtctgctggcagtgtatgctgtagtggataaatctgaggctgaaggtaattattttaaatcaaacgataatttgatttttttctcacatttgaaaagggattatgtctttttttttaaaaaatcacgtaacttattaagataactgaaatcattcagttttttcttatggcatatgtgcttttccaaactgtaaattgaagcatttatttatttct

SEQ ID NO: 753047 - DNA, 529 bp, Homo sapiens
actcacatttaatctttttctgttgtcttgttatcactcacctgactttctctgtctttgtatagtgttctagcttcagagtcaaattgactaaatttttttaattcatggaaggcattttataataacttttgtctggcctgtaacaaccattttctggtgagtattctttgyctgccatttatttttgctttttcaaaccccatctcttcctgtagtatcttggtttagaagttattttgacttcttttaaaattatttatcagtttttaaaatcagtttttctttaaacaaatctttaccaggagtttgcatgaaagaagagtctaaggttgtattccagactggcaggaactgcaatcatgacttactatttattctcttatgctttacttctttgctagtggatggagatagccaattctatagttgttcataatgtaaagtctctctctccctccagttgtatcaatagaccacctcctgcgaatatcacttgtctaaaagagcctttgtctgtgccctgaaa

SEQ ID NO: 753048 - DNA, 529 bp, Homo sapiens
actcacatttaatctttttctgttgtcttgttatcactcacctgactttctctgtctttgtatagtgttctagcttcagagtcaaattgactaaatttttttaattcatggaaggcattttataataacttttgtctggcctgtaacaaccattttctggtgagtattctttgtctgccatttatttttgctttttcaaaccccatctcttcctgtagtatcttggtttagaagttattttgacttcttttaaaattatttatcagtttttaaaatcagtttttctttaaacaaatctttaccaggagtttgcatgaaagaagagtctaaggttgtattccagactggcaggaactgcaakcatgacttactatttattctcttatgctttacttctttgctagtggatggagatagccaattctatagttgttcataatgtaaagtctctctctccctccagttgtatcaatagaccacctcctgcgaatatcacttgtctaaaagagcctttgtctgtgccctgaaa

SEQ ID NO: 753049 - DNA, 513 bp, Homo sapiens
cctaatggtgaggtttaagcttctagtgtacccatcacctgaatagtaaatatcatactcaataatttttcaaccctgatcccccttccaccttcctccctttggagtcccccttgtgtattatttccctctgtatgtcttgtgtacccattattgagctctcatttataagttagagtatgcagtatttaattttctgtttttaagttatttcacttaggataagggcctccacctctacctgtgtwgctacataagacagaatttcattcttttctatggctgcatagtattccatggtatatacacatcacattttttaatgcagtcatccatcgataaacacctagattgattacatgaccttgctactgtgaatagtgctgcaataaatatacaagtgcaggtgtctttttggattaaagacataaatgtaagatctgaaactataaaaattcccagaagaaaacctaggaaatcctcttctggacattggctgatgcaaaggattta

SEQ ID NO: 753050 - DNA, 602 bp, Homo sapiens
aatatccagaatctgcgaagaactctaacaacaggaaaaaaaaaacctaacaacctctttacaaagtgggcagaggacatgaacagacatttctcaaaagaagacatacgagcagccaacaaacattaaaaaatgctccacatcactaatcataagagaaatgcaaattaaaaccacagtgagacaccatctcacaccagscagaatggctattattaaaaagccagaaaaaaatagatattggttgagtgtgcagagaaaagggaatacttacacactgctggtgggaatataaattaatacaatgtctgcaaaacaatattgagatttctcaaagaactaaaattaaaactattagacccagcctccccactactgggtatctacccaaaggaaaagaaataattatatctaaaacaacttctaaattaattaaatattaaatagttttaagaaaacagaactagagaaaattagaaaaactcactggaaaatgtttcataatctcagaattaaagatattttaaatatgacacaaaactcaggagtataaaagaaaagattgataaactaataaaaaattaaaattttgcatagcaaaa

SEQ ID NO: 753051 - DNA, 568 bp, Homo sapiens
ggcaaagacttatttgaccccttcagtttattcaagcaacctattttatttgcttactgtgttttaggcactgcatcaagtggtggtatatagtgattacggtatggtggggaaaagggatggaaaatgtttgaagcacttggaattctcaagaaactcaaagacttcctcgtttgtaaaatcaggattagcaatactgaccacacgggatttctgtgtgaagaaatgagatagcacacattaagcatccaataatcacaaaaggctagttggtgtattcctctgttttcccttctttcttactctgaactttggtggccacagataataagcataaatacgtatatatgggttgattccttagtgatatggtttggctctgtgtcccyacctaaatctcaccttgaattgtaataatccccacttgtcatgggagggatccagtgggaggtaattgaattttgggggtgggtttttcccatgatgttctcatgataatgagtaagtctcatgagatctgatggtattataaaggggcattcccctgcacatgctgtctctttcctgc

SEQ ID NO: 753052 - DNA, 564 bp, Homo sapiens
tgagaaaaggaagtctttgtgtatatgtttatagacatatctactcctctctattaaaaaataagggcaaagctgtatttactctcgacttactatttaaagatattcaggaagcaaaacatgttaacattaaagcaaatggatagaaacataaagcatttgttgcaggtaagtttttaactcatttatttaaatattatagcttctttttgtttttktttttttcctaacttgtttcaatccatgatgtagcatcttagcagtatactttatctggataaagtgatgactatcgaaacacatcaggaataccgagctgaaggatgaaaagctgtgttgagatcatccttttattgtatggcaggaattctccaaggtttaatttcatggatcattgacatcaagctgagatttaggattcaaataaatttcacaagcagtgtgaatgttttcatatagatcttagcagtgatacataaaagaattaaaagtctgtattctctttatgctaatagtcattatttgttgcttcatttttcctgtgttttttattttagacatatc

SEQ ID NO: 753053 - DNA, 585 bp, Homo sapiens
gtttcaggcatctacagggggggtcttggaatgtatccacctcaaataggtgtaacaccaaagcagcaaaaaactaacataactaacttcatttttgtttaagggacctttacctattcccacagataggcaaggataattatagagcagtgagatcatacacaaaaacagcaatcatgtagtttttcagaaagaactctgagtttaaaggacaagtaactatgttttgttaaagatttatggaaatactgtgacctgaccagggaaaagaagttcccaacatcctcacaccctcrctggtgcccagatatctgcagtcatcagttacctcttgccctgagccctccatcttcctcctgccgttgacataaaaagagccaaaaatttggaatgacttaagatggtactttagcatgatagtgtgccatcatctgggtttgctggctttctgaataaacgtgcttttcctcccaccaacccttgtctcttgagtttggcctttcaagcagtgaggagccaaacttgggtttagttacaggggtactactgtacatactatacaaaatagctataattatatatata

SEQ ID NO: 753054 - DNA, 526 bp, Homo sapiens
aaaaccatggcacgagaactacgtgacaaatgcacaagcttcagtagctgatttgatcaactggaagaaagggtatcagtgattgaagatcaaatgaatgaaatgaagtgaaaagagaagtttagagaaaaaagaataaaaagaaatgaacaaagcttccaagaaatatggggctatgtgaaaagaccaaatctacgtctgattggtgtacctgaaagtgtcagggagaatgaaaccaagttggaaaacactctgcagtatattatccaggagaacttcccgaacctagcaaggcaggccagcattcaaattcaggaaacacagagaacgccacaaagayactcctcgagaagagcaactccaagacacataattgtcagattcacctaagttgaaatgaaggaaaaaatgttaagggcagccagagagaaaggtcgggttgctcacaaagtgaagcccatcagactaacagctgatctctcagcagaaactctacaagccagaagagagtgggtgccaatattca

SEQ ID NO: 753055 - DNA, 653 bp, Homo sapiens
atatgtaaaaattgtaaagtgcagacatttataagtacatttttaagttgctgctagtgtgactccaccttgacttgaagtttaaatctacaacctacaaaagaaaagaaaagtagatccagataatacagtcattataaataaatctgacttgggtgtcagattttgcaatgaaaaaatgactgcttaagaggaatttttattctttcagcattatatcaattatcatatttactttatggaaatacagtaacatatataaawgtatggaataaatgttagattaactatatttgtaatttatagtttctgtgcaattttagtgctagcttaaaaatgaactcctgcccatcagtttttaattgctgataaatttctatattgctattcagatcaaatttattttatattcaatgcagactccccatttattttttattaaaactattatttgaaacttatactatgaaattatttcttttcatattgttctttcacatcattgttttgcttgtctatccatactagaagcctgaataaaatagaaacaattatgttctagctgtatgtttcagtgctatattgtaatgattatgagtcttcacaaaatgttctaagccctgatgagcaatttgttgcctgtcagccacaac

SEQ ID NO: 753056 - DNA, 601 bp, Homo sapiens
cattctaattccagtaagttatttcaaaatatacaataaatgattgtaaactatagttgccttattatactactgaacactaaatttttttcctacaatctgactgcatttttgtacccatcaaccatcccctttttatctcctcctagccactgcccttactagcctctggtamccatcattctattttctatcaccgtgaggtttttcttctgttttgttttgttttgtttttattcatgaaaagatgagatatttgtctttgtatgcctgacttacttcacttttatctatgctgttgaaaatgacaggattttgttttttatggctgaataatagttcattgtgcatatgtagcacattttctttagctttggatttatttattctgaatatttcatataaatgaactcataaaatgtgtgactttttgtgtttcgcttctttcttctttcacttagcatagtgtttcaaagtttgtcaacattttagaagtgccaatacttcactctttttgttgattaatattccattatatttgaaatttatccaaaatgtctccaaaatgtacttatttgtttatggacatttgggttatttc

SEQ ID NO: 753057 - DNA, 615 bp, Homo sapiens
cctccccaagtctagcttggaaaagagcaaggctctcatatggctcctgagtgattattctaatttagaaaaattaatgggttttattaccgcctttttcattcctttcaacaaacaagttatcatatcatcttatctgccctgcctctgtttggattggcattgagaggcgacagcatgctgcagccctcacttgctctcagcacctccttggcctgggtgcccactctggccatgcttgaggggcctttcagcccgcggctgcacagtgggagcccttctctgggctggcggaggcctgagccggctccctcagcttggtttgtaaatgtaccaatcagcrctctgtgtttagctgatttggtggggacttggagaacctttatttctagctaagggattgtgaatgcaccaatcagcactctgtgtctagctcaaggtttgtaaatgcaccaataagcaccctgtgtctagctcagggtttgtgaatgcaccaatcagtgctctgtgtctagctaatctagtggggacttggagaacttttgtgtctagctcagggattataaacacaccaatcagcaccctgtgaaaatggaccaatcagctctctgtaaa

SEQ ID NO: 753058 - DNA, 561 bp, Homo sapiens
gaaaagagcaaggctctcatatggctcctgagtgattattctaatttagaaaaattaatgggttttattaccgcctttttcattcctttcaacaaacaagttatcatatcatcttatctgccctgcctctgtttggattggcattgagaggcgacagcatgctgcagccctcacttgctctcagcacctccttggcctgggtgcccactctggccatgcttgaggggcctttcagcccgcggctgcacagtgggagcccttctctgggctggcggaggcctgagccggctccctcagcttggtttgtaaatgtaccaatcagcgctctgtgtttagctgatttggkggggacttggagaacctttatttctagctaagggattgtgaatgcaccaatcagcactctgtgtctagctcaaggtttgtaaatgcaccaataagcaccctgtgtctagctcagggtttgtgaatgcaccaatcagtgctctgtgtctagctaatctagtggggacttggagaacttttgtgtctagctcagggattataaacacaccaatcagc

SEQ ID NO: 753059 - DNA, 663 bp, Homo sapiens
caccaaagagttaaagctgcagatgcacagaaaggagtttgtcttaaaaacatttttaatttcagttaagagttttaatatttgcctcaatgggcatttcttgtgactgttttttcctacaaaactattaactctgcaaaatagcaagcctgattctgtgcacttatttaaagcatacatattattaaaaaaaagcacccacattttctcatatctttgccagttgatctttaatatttaagaagtcatactggctaccccaattttacaggtatttagtaaatgttcatttgttgaaaaatcaytgtgaagattttattaattagaatttaccagtcttaccagtaattttacacaatatattcatttgttaagtttctttttcttttccattctactctattacatttttaagagatgcaagttccataatttctatgtatgaggtacctatttggtggattgattcctcaaactatatcctttttatttaaatcaataaaaagatataacagagtacctattatttatgacacattttacttcatgccagtgaaatgaatgattttttataaagttaatccatttttgctgagttattttcaaaaactttttccaaaaatacatcttaaatactgatttttcatttttctgaatgtatat

SEQ ID NO: 753060 - DNA, 659 bp, Homo sapiens
taaaggaaaacagtgattaattttaaaatgacagatttcaaatagatctagaattttcaaagtggaatttcatttcagatatcgcataaatgtgttttactccttgggctcaaaccttgaagagttgctagagtcgttcaattttcctttgttgatctctaagtttagaaaactgttgtaaaaatattaatattttcaagactcgaatctgtagcagtaattagcagagggtgttctaagtgacaacagtaggttcattcctttctttaagaactagatgctcattggccataaagctcatgaaatcagttgtagtcagttaaaactaacctagtgcacagcagtgttattgaacaatacatctattaaaagaccattatagagatctcatggttcattactttttcaacatcattcctrcttatccttactttgcgctgtgtttttcatatagctactccttaatgtgtttcattcatctgtcctcagccaaggtcctccttcatgtgggtgggattagcttggacatgcttatataatggaccatgaatgacccctccttgcacatgccaaattacccttggatgcctgacaccagtatcctagcccagccaagaaagtctcaggttcttcacatctacactaattattgttccttt

SEQ ID NO: 753061 - DNA, 656 bp, Homo sapiens
gcagtaaatacgtaacagaatgccccaccatattttaaggtagattattatagtactaattgaattagggcagatttgtaaattgttctaaaaaatcattaagtctacataaagctattcagtgtgtcaaatgtgaatcccctgcacaattttattgatattactttactgccttcctatcaccagttccttttactgttcctcaaatcaataggctaaagcagcccaagcatcttcctataagatagattcaaataycatgtttgtacaactgaaacaatgtagaatgcacactagtcccattatatgaccataaaaagactagttcagctcactgcatcattgatccatttaattgtatagcagcttcctattgataagaggaaatgtccctgacccaaccatgctgaaaatgaaactggccagttttccacaaccataaatttcaataaggattctacctaatacccagggactagatatcatagccagagtttattagttttttctttgttttactgacctatttaccttgtatgtgacccaatttctcttatgcttcctggatttcattagtcattaagtgttagcctatacttatgttcatgactatttatttatttatttatttatttatttatttatttattttgaga

SEQ ID NO: 753062 - DNA, 635 bp, Homo sapiens
ctcttctgcattatctacttagcccaggtggcattcaaatggaatctagagattccatttctccccgctgcctgctggactctaatcatcaccttagctaccagcaccaccagcttccatgtagccatccactttcagggggaaaaataaaagatcaacaggtggttttcctctcattgagtccctagagctctcataataaaactctgtactaggctcccaagaccaaccaaaggccacaggactaccctgaaggatgcaatgcatgctggcaaggctctgggtttgacatctcctaactctgccagggcacagaaagccagtccccgcagaggccagttcaatgtgcactgactgaaaagatttttgttgttgttattactgaactattatccctatattttatawccatatgtgcatattttatatatatcttttatacacattttatgcatgtataataggcctacatgattttgctatattacagtagaaaatttagatatgttactggtctgtggttcagttgataggaagcccttgcctagagtatactgggcttgtttcccaacatctcagttttcttttcaacttgaaaagtaacctgtgtagatgctcatagtaatattaatctt

SEQ ID NO: 753063 - DNA, 606 bp, Homo sapiens
atcacacatataatgcagaatcatagagtacagacctgaaggaatgaagcgttgactaggaatactgtgccccaaatcaaatgacatctcatcatctggaaagacccccagagttttcttcaggtgaacttccccccggcctggcacctccagccaggtacatgtgctcagatggagcccagcacctccactccagtctagactcgggactcagccaggcccgatcagagcgccagagacacttggcctcagtgactgaaggaggcatggcacgtgacccagtcagagcacygaggtgaggtgcaacccaaggtggacaggactattaagagagagacatgcgctcttttttacccctctactctccctgaacctggaagaaaatgggtttgggattgcagcttgccatttgccatcacaggaacctgggagagtaaagccacacgaaggacagtgaagctgagaactggcaagatattgtgtccttatgacactttttggaggcccaggatccagctgtgtgtctgaattttcaggttatgttagccaatagatcccatttttcttagatttaagttttctttcacttgtaatcaatagtcctaa

SEQ ID NO: 753064 - DNA, 584 bp, Homo sapiens
acggatctctaataagtatttcaacaaaatagttcaacactaaacttttgatattctccctccaacttccagaccctcactcactgctgatatctgttcttcttacagcttttccagtgaatggcagaatctcagtgaatgtcaactccatttttctagttgcttaggtcaaaatccttgactttcctctctccttttcactctaaatctcgttggctttgctcttacaatatatctagaattgamttctcactattaacctggtccaagttaccaacactttgcctaaaatgccttctcatggtctccctccttctacccttccaccctttcgtctaattgcaacacagtagccagaatgagcctgtcaaaacccaagtcagggcacgccgttctttccaatggtctcccatcccatttgaagactaaagtccttacaacgatgtaaaagatcatctgtgttctcatttcctactcttttctctttcgttcactcactaaaattacccctaccctggccagccatactgtccctgatgctccttagctaaagctagcaagcccccatcagctagcatgctctg

SEQ ID NO: 753065 - DNA, 623 bp, Homo sapiens
taaaaatttaaataaaaaattaatgcctctgaatcattccaatctagctaatctaagccacatcaaaatgctactgtatatccagagtagctcatgaatcctctaaatgtatgtgtgcaggctcgcggcaagcctcccgcagcacttacctgtgatccacctcctcggtctgtgatgactcctctgtctccctctctgctcccgtaccccgaagcgctgctacgattcccagggggagcrcctctcacactgtgccctgatacttctctcccagatcgttctggcctttcaactctgttaaacaaaacataaaaacatacatgatcaaaactgtaatcttaactttttttaaccccaatgcatgagaccactaggaaagcattacatagtacacagctaccttgtttcccgtttgtcagtggacatgcttccttcacttttccagctggtgggtctggaaggattgggccctgcctctcgaggatgtctaggatgagtgatatcaggcctgtcatgaataatcaccgttctcctttcgtctcgctcccctcgtacttctcgcctgtctgattctctaagttcatttcttggtggtggaggctcatttcttctggagtcactga

SEQ ID NO: 753066 - DNA, 616 bp, Homo sapiens
ccattctgatgtaaactttattgcctctcgcacttaatttaatctgccctctgtgctgatgttttctgtttagaatattacttttttttttggttaaatgtatccatatagtgtacctgtctgtacattgttgaattcacttctgtaacatttttgtaaattcmatagtagtgtacattttttaagtatctgtattaattttacatgctaaattgttagatgaagtgccaactagaaccacaagtcttttcacaaaaaactaatacatatatatatatatatatatatactactctatgtacatgttcaaactagatatatatagtttaagcactcatgatcctgtattgaaaaattgtttaagtaaagacattttatggtaaaacaattgcataagaaatataacataggaaccaaagtcaggatgagccaaattcaggtaaataatttcaagtattatgatgatgagctaagtgcattagcttgctataattagattatctaaattaagcaatatgtaggccatgtcctgttaaatatttaataaggtattttgcttccatagatgtttttctttaaagctaatggccaattaagttttcctgtggttaatcta

SEQ ID NO: 753067 - DNA, 567 bp, Homo sapiens
tcaggaaatcacattgttacaatccattgacctaatacagatttcaccagttatgcatgtactcatttgtggaagtgtgtgcatgtatatttagttctaccaattttatcacatgtgtagagtcatgtgactactgtcacagtcaagatataggacagtttcatcacaaggatctcttgtatagtagtctactggttttgacaatttaccactatttgtgaaacatagggaacttacttctatttaggtctctttaacctccccatgttaacactataattaactatttcctctacatacattgagcaccrcatcagatgacattttaatctttgcttcaaccgtcaaatatgatttaagacactcataaggatattctatttactcctatttttgcctcatgcagatgtacttttttcctttctgaagttccaagccgtcttaagttatcatttcctttctttaaaaaaacaaaaaacaaaaaaaaaaacttccttaagctgctctgtaatggtagatttgcttgatttttttttcctgaacattatttttgctagacatggaact

SEQ ID NO: 753068 - DNA, 688 bp, Homo sapiens
atggaacagtagagctacttttagttctttgagaaatctccacatggctttccatagaggctgtactaattcacattcccaccagcagtgtataggtattctttttcaccacatccacaccaacatctatttgttttctgacttttaaaaaaatgactattctgactagggtaaggtggtatctcactgtggttttaatttacatttccctgataactagtgatgttgagcattttttcacatgtttgttggccattkgtacatcttcttttgagaactgtctgttcatgatgtttgcctacttttaatgagattatctgttttttgttgttattgttgctgatttgtttgagttccttataggttctggatattagtcttttttcagaagtatagttcataaatattttatctcactctgtacattgtctatttactctgttgattatttattttgctgtgcggaagctttttagtttatctcatttattcatttttgtttttgttgcattttctttcaaggtctcagtcataaactctttgcctaggcctatgtccagaatagtgtttcctagggtttctcctagaatttttatggtttccagccttacatgtaagtctttaatccaccttgagttaatttgtctatggtgagagaaatggatccagtttaattcttctgcctatg

SEQ ID NO: 753069 - DNA, 612 bp, Homo sapiens
ttcaaaataggtgcaatagttctgcataccgtttccttgacacctcccattgtatccgaagttgttctttaatcggcacacaagcacttgatacttactaaataacggcagacacaacggactgtaaactttggcaaggcytgaggcttaaacgctcaataagtaatttactgaatgaataaacagatgaataggttcagttatgaactagttgtcacttgcctgcaagttaggtgagatctagggcgagactattcaacctgcaaccatcattactaactgaatgtcctgttacctaaaaaaagatagaaataaagcccatctttagggcagaattcaactgccggacttgggactggacgccaccaagtggataaaatatggagctcggaaaagattggattcccggccctgaactgaccacacagttgagaggaagttgaggcctagaagagcgcgcaacagtaagccgtgtcggcaccagactctgttggtcctactgacacctccagcgttagaatgactaaggctccactcctgacccaccggccttgaggaaagcgcaaacgtaaaaaaagattgaaaccggagaggcgaatgcatctgtttacg

SEQ ID NO: 753070 - DNA, 613 bp, Homo sapiens
ttgacaggaatctccctgactcaacaaccataaatatggttggaatgtggtatttgctcttcctggaaacaatgcttcccacttacagagtttgtattcaatatggtgttaatacatagacctcatccaactatctctctgtggaatctgagctcctactcaagtcaatatcctataatatgctaaacagaaaacctcctgtattagtttcctgaggccaccataacaaagtaccacaaactgggtggcttaaacaacaagaatgtattctctcactgttgtgaaggtcagaagtccaaaatcaaggtgtgttagtagggacacccttccwtggaaagctgcaatccttccttgcctctttcagcttctgatgggtcttggcatttcttggtctgtggcagcataactccagtctctgctagagtttacaaatggccttatcccctgtgtctttgtatttttccatcttctcatacggacacctggcattagatttttgtgtgcaccgtaaatccagggtggttttattccagaatcctttttatatcccaaatatatctacaaagattctgttttcaagtaaggtcacattctgatgttccaggttggaatg

SEQ ID NO: 753071 - DNA, 528 bp, Homo sapiens
ctgtatacttcacttattcaggatgttcattgaccactgcttgacctctgccaggatggaagctccctatggacaaggatcttggtctcttctgtttaatgatgtatcccaagcacttaaaacagtgccttctatttagcaagtgatcagtgaataattttggaaagaatggatgagtgaatgaatttacaagtatagattgcatgcctactgtgtcccaggatgttcagcacaaagtgaatcatataatttcaggaacaagagaaggtctacactagagttatgagtgtgtgtctgtagcaagtagatcatgtttgaagttgtggcrtgatttccatagggaaatcattttaagtgaggtaagaacagggctcgggactgagcatagaaattaacaacaattagggaaggtgtgagaagagaaatttggatggaaaatgagtaggagtggccaagaaaataagcagaaccaggaaaggatactgttgtagaaactgagggggattagaagttttttttaagaaggga

SEQ ID NO: 753072 - DNA, 578 bp, Homo sapiens
ccagctacttgagaggctgaggcaggagaatcacttaaacctgggaggcaggagttgcaatgagctgagatcgcaccactgcactccggtctgggtgacagagtgagactctatctcaaaaaaagaaatagtattctcatctcattagtggaaataacatgagtgaaggtcacaaggcagaagcttctagtgatataggaatggaccaaagtaccagaagcatcagatgcatagtatatcagagggagagatcattggagagtgcattggagtcaggggcctaatgccacagtggctctgagatcttggccttggttttgaaattagttataaaggcaataagaagacattaaagtatttggagccaccagatttgtgtttaaaaaataataatcctggcttttctgaggtcaatgtattgytgatgagtaaggtggacatagaggcatgtgttggaagcattttacttgttgaaataagacgtggtagtagcttggcctagagatagtgccagaagacagacaggggcgggtcccccatgaaaccctaccttcaagccgagacagtttaaagcctgg

SEQ ID NO: 753073 - DNA, 605 bp, Homo sapiens
agttctggagatggatagtagtgatgtttgcataaaattatgaatatacttagaagcactgaattgtactactcaaaatggttaaaaaggtaaattttattttatgtttattttaccacaattttttaaaaagataatgtgggcagagtacctaataggatgcctgatacctrgaagacaattttaaaggtttcaaaagctccttgttaggccagcagtgctctttggaattacttaggatgcaatttgggaacattccctactctcaggagtatgagagtagagcccatctcctactctggaaaggatgggagtagaggatgagtcagtatttgctcccgattggtggatatggtggctgtaaatggcccctagcttcctgagaaaaagaaagaagaaaagccgaaaaggagatgagatggtggtttggaagaactgcagaaggtgttctgagcacagagcactgtgcctgatataagttctcaggaattgaggaagggaaagaaaggaaagatgaaaggggactggatgttggtgtggcaggagaaggaggtaatgaaatagggggtgatggaagaagaattactttagacccagctgatccc

SEQ ID NO: 753074 - DNA, 583 bp, Homo sapiens
attaacattattttgatgagaatttcagctgaaggatgaacagaatggttgtccagtaataataaaagcttgcagttgtcatctagtctggcttccctgcagtgaacatgagccactggtacaaaatgtctgtgaaaccaaacagaaaagatgttcttggaagtatatgcctttttgttagcataatacaataatgaactggtatgaaattcactcttkgaaaacagggaggatctaagttttcgcccgacacagcaagtttacacttcggtgtgcctgttgcattagcacactccagcacagtcattctatctttggtatcattagttcacgtcggggctgtctcatcagatatagtctatgtctttttggggcagttacaacaacagagtgatgtttcattcacatcatatacttgttctggcatcatttacatcagtgataatcttggcaaacccatcaatgaatttgtccactttgtgatcagcagttgctttatcacaagtctttacagatttaatgctacgtcttttcttaaatttctgcaaccagcctgttgaatagtcaccgttcccttcaattt

SEQ ID NO: 753075 - DNA, 606 bp, Homo sapiens
agtttctattcaaagtctacgatgggtaaacattatctaaattcctatagcctagctggtgcttgtgtgctagactagcccaaagcagtattgtgaaacagagcttcttgtcttcgtgccttgccagctctctacctatatttttccttttgagtctcctttttcaaagctcagtgatgtccttagagatttgaaatgaggaaaacttctcattacagtaatttatcctttttaccaccaaacttaaagatcttgcatcacaaccctacrggacttcgcagtatggttgtcactgaatctgaaagcaaattggagctcaagttttgattatgcacagtggtgtcatgcattattccttcaagataaggtgtgtagtacaacagctgcctgcgatgtgtatctcgaaatgaggacagttgaaattgtattcagatcacccacaagaaagtgcccttctcatttaactaagttgtgtccaggagaaaagaaaaattatgttctgagcacctcctacattctgcagtttggatttttcactaagtccattcacaggcatggtctcacttgaatcacacaatcgccctgtggaggtaggttgttttagca

SEQ ID NO: 753076 - DNA, 622 bp, Homo sapiens
aaagggtgtctgcaaattgtcaataaaataatattttgcagtctcaagatatggttttcttttttcagttagtgcttcaataatctttcacacaatcaaaactactctttctttatacagaggttgaaacacaacaaatttgaacaggagaaaccattaataattcctgaaaatatcccctgttatgtttccaaatctgtcawcctaggttaccttcttaacttgaacatcacagtgttgcttatttgtctagataggggaccgatactctttcatgtccatgacaactgttaatctctacaagggtactttccgatgttaatgatagatttactattacaataaaaccttacacatttgcacaacttggaggcaaaaaatgattagatttagggggaagaaaaccccctcatctagaaggtttgttttttacaactatcatttattacttcaaatttataaggtatatatagatgataacaaaaataatagacggtggttctgctgaaagtagttaatagcatgcaaaaagggtgtgttattttaagaagactaagcacttgctttctaactttatttacattattaattaacttagcagttcctttgcttttctgaaaca

SEQ ID NO: 753077 - DNA, 591 bp, Homo sapiens
ttattttaagaagactaagcacttgctttctaactttatttacattattaattaacttagcagttcctttgcttttctgaaacacaaaagcatatctagtgtctgtctaatgatcacagatatcaatttactgggattccaattaaagaaatttaactacatttctaggaaaaaaatgattttaacaattaacttacaagagtgggtttgtatgcaattaagactatctatcaaatccccctgactgagcatttttctaactcacagggaaagggtcaaattccttccatatacacaccctcggctggcattgtgctaacacttctcaaggaagaaaaaaaaaatctcaagtaacaagaagactatagagcatttcccaacataaaagtgttaaatcccyataaaccatgaaagaatgcaagatttctaagtagaagccacggtgacctgaaacccttgccatggggttcaatcacttgaaatacgttgagtctcaaactgcccttaaatttgttataaagggccctcaaatgaatcaggaacccatctcaataccaatgaaacactcaaaaagccaagatcagctcaaca

SEQ ID NO: 753078 - DNA, 602 bp, Homo sapiens
agcacttgactggcgttcaggcatatgctcagtgttttctgctcattctataatcctcgtcacagtccagtgaggtattatccttatttaagatgaagaaacttaggttaagtgatttgcctagacacattgctattaatagctaaggctaagattctaattcaggtctatcygtctcacattgtgtatgctttgctttgttctgttaataaccacactgacaatgtctctataaagtgcccgatttctgatgaggctgagggaatcagaatttctgttgtccagctgttcccgaacttttcccagctctaaaattctccagggagagagacaaagagacaagattgaactcaccattcacatggggcttctcattcttttcagtgtccctgtgaaagctcatttaccctgatttcattgattagcttatcctccgtgccttgaccctggaaatactgcccaagagatgaatggtgagccaacacctcttcccatgttccagccaccaagcaataatgtcatttgtcaggatctcaacattactctagcactacttatacgtgaattcacagtgtgtgggtaataccggttcccccttttct

SEQ ID NO: 753079 - DNA, 494 bp, Homo sapiens
ttcagcaactacaacaaaataaataggagaactcacatttctacactgaagcaggaaaaaaaaaagttagctgtgttttcatagtatctctatgacctttattattccattagattttggaatagtatataaaacaccaagctccatgctgacaaacaccagttttgaaactattgccacagtcaatccaaacagccttctcccctgrgtaaaattattatttggaatacaagcagaattgtggttccctgagctagctgagcataaatgaggttagtgattcataaggtgactctagtgagtttgcaaatatgcaacttgtatggaagctgacgcacacaacagaagctcagccttgcctttctgaactggtaagcattttcaggcctcaccacctctttggaggactgtggtaggtacaggcttctgaggacaagagttaacctgacagaatgctgatttaccagaaataaacccttcaaatcagatcacac

SEQ ID NO: 753080 - DNA, 601 bp, Homo sapiens
gttcacgccagtggcaatcaggcccgtcagcctgtcaggctctggccttcagctccttgcctcacactgttaggaaatgcaccaaagtactacctccagggctctcccttgcaaaacctcttgcccaccttccctcaacagcctatgctctgtaggaaaacctacccccaacctgagaggcagcactgcaggatttggtaaagggaagcgattggggtttgcaaacrgcaccggcatctttgccttttgctctgcttccaacttcagtgagtgccgagtggaaatcaaacctcagattcaggagggcatgggccctacagggttcccagattcccagagctggggcttcgtcaatgttcctcccacccccagttcatgttctgctgagagagttcaggacacccactaggcgcagaccccagatgaaaccccacctctgaataccccacacaggtcccgcgacccactcccgctctaatgagtctggctgcccgcagagctgcataatacattgcgcctttgaccttattagaagacaactacacaaatactgccttttcctggcctgggtgtctgtccgcaggtatccccagcacgttta

SEQ ID NO: 753081 - DNA, 646 bp, Homo sapiens
ttccactcccctgcatatcgaatgctgctctttcccagataccctgtttttcactcagccatgtctttgcacagattattcctttccttctactttttatgacaaaccttgtctatccttcacctgtacagggaagagtcctcctcctcctcctcgtctagtcactttcctgcctttgctcatacaaagggaaaatacccagcacactcctgcagacacttttcaaatggccctgcaccttctcttcactcctgacctatgccctctcaaagacagagaaggcagcagcaggtggtctgaataggaggagccaaatgtgcacaggatctcttctgttagtgggtgggatttttgtgtgcaaaatgagccatctcttctttttttcccctcccttcccttttcacacattaaaaaacaaacraaacacaggatagcactctcccaggctggaatgcattggcacgatcttaaacttcccaagctcaagtgatgctcctggctcagtctcctgagtagctggggctacaggcatgtgccaccatatctggctaatttttttttttagatacggggttttgccatgttggtcaatctggtctcaatctcctggcctcaagcaatcctcccatctcagcctcgcaaagtg

SEQ ID NO: 753082 - DNA, 616 bp, Homo sapiens
ctttccaaattactgactcacataaaccttgcaaaataataaaatgattcttgttaagtcactaagtttctgggtgatttaatatgcatcaatagatcactgaaacacatggctcttcagaatttgggcaaaagatctctattttatgtgcctacatctacccatcattgaataaggactgatctgaaattcaggagtgacgttgggcaaggtggctttcttcaacctagggcaattctcaaaaagtgttgatatctgaggactgtcaatcagcaaaattcccagaaacttagggtgtttcagtgttgaggcaggatctggatggcatatcacagcctccatcacagtccaccacttgtaccacttagatcacttctttttacaagttctgcgagcacttcaagatgctagcrggcctctttcctgtgagaaacttagatgaggaaggtaagtggcatgacccacagcctctgctgctgcagtttgtcttaaggccccagctgattttcatccctctccttctttatcatttattctagactccccacaccttcagttagcacatctcctggtctaagtgacttatctgatggggtgacccagatcctcatcactg

SEQ ID NO: 753083 - DNA, 651 bp, Homo sapiens
gatcctgcagttactttaatctatagttactaatcttggaattacactttaaaaaaataaagaagaaccccgctattagacactcgtgaccgaccacagggctgtcttgccttcgcattgtcactgcagaatctttttctaagagcagtgaaagtggtcacaaggatgaagaatctttgctatcaatattagtgaaaagaacccccttttaaggtgctgtataatcactcattatttctattcttctagcacttatatacttcatgcagtgaggggattgtagcttttgtggaaagggacatttggccttgagtgtcaggctttacaatgcatctctggtgcaatattatcaggtgacaccaattcatcccagcgcattttacagcttaacagaaggttttgatttcctggtggagtcttrattgattctgaattctttagcattcaaccttccttgtggtgattgttataagatttaatacaggaaatattaagtttaaacaaagaaggcccagaagggatacttctgtggactgtcaggtatatttttcactgtgaagtggaagtgccaagctagccaaggagacttggggtttgctttagaccaccttatggatttctacagctgccccagagggacaggatccaaac

SEQ ID NO: 753084 - DNA, 515 bp, Homo sapiens
cagtttgcaagaacattggcccattcttcatactttatgtaaaaattaactaaaaatagatcacagatctaaatgtaaaacaaaattctcaaatttctggactaaaacgtaagaaaatcttggtaatcttggtttargcaaaaagttcttaaattaggtgacaaaagcttgatccagaagaaaaaaaatcgataaattggactttattgaggttaaaaattgtcactccaaaaatcatgtaaagaaaataaaaatacatgctagatccttttttacaaaccatgtatctcacaaaagcttgtgtacataatatattttttaaaaaaactcttggccaggctcagcgactcacgcctgcactttgggaggcagaggcaggtggatcacttgaggtcaggagttcaagaccagcctggccaacgtggtgaaacgcctcctctactaaaaatacaaaaattagctgggcatgatgacaggtgcctgtaatccaagctactcaggagactgaggcagga

SEQ ID NO: 753085 - DNA, 515 bp, Homo sapiens
cagtttgcaagaacattggcccattcttcatactttatgtaaaaattaactaaaaatagatcacagatctaaatgtaaaacaaaattctcaaatttctggactaaaacgtaagaaaatcttggtaatcttggtttaggcaaaaagttcttaaattaggtgacaaaagyttgatccagaagaaaaaaaatcgataaattggactttattgaggttaaaaattgtcactccaaaaatcatgtaaagaaaataaaaatacatgctagatccttttttacaaaccatgtatctcacaaaagcttgtgtacataatatattttttaaaaaaactcttggccaggctcagcgactcacgcctgcactttgggaggcagaggcaggtggatcacttgaggtcaggagttcaagaccagcctggccaacgtggtgaaacgcctcctctactaaaaatacaaaaattagctgggcatgatgacaggtgcctgtaatccaagctactcaggagactgaggcagga

SEQ ID NO: 753086 - DNA, 599 bp, Homo sapiens
cccatagtcaattgtgatggtttgtacaggtttcagtttgaaaagcagtcactaatgagctgcttggtcacattttgtcaattatttagatgtagagatcaaagtcagattataggttgggtacagtggctcacatctgtartcccagcactttgagaggctgaggtggaagaattgcttgagccctgtagttcaagactggcctgagcaacacagcaagaccccatctgtacaaaaaataaattagccaagtgtggtggcctgtgcctataggcccagctacttgggaggctaaggcaggaggatctcttgagcccgggagttcaaggctgcagtgagctatgattgcatcactgtgctctagcctgggtaacagagtaagactttgtctctaaaaaaaattttaaatgaaaaagaaaaaaaagtcactttatacatttgatgcatgacagaaagttgaaagggatagataacactctccagaaatgaggttcaaatggttttggctgattacaatcaacaagatttaatttaatgaggatgagggaaagccctaaagttatgtccaaaattccaatggtgaagcacaggattgttgt

SEQ ID NO: 753087 - DNA, 608 bp, Homo sapiens
caaacttgagctagcatcggaatcacctacaggacttattaaagctgaagctgctcatccccagaggtttgtttttgtttttgttttttcttttttgagactgggtctcattcttttacctaggctggagggcagtggtgtgatcaaagcttactgcaggctggacctcccaggctcaggcaatctttccacctcagcctcccaagaagctgggactacaggcacgtaccaccawgcctggctaatttttaaaaatttgttgtagaaatgtggtctcactatgtggcccacgctggtctcaaactcatggcctcaagttatccttccacctcaacctctgaaagtgctgggattataggcatgagacaccgtgctcagcccacagtttctaattaagtcagtctgggatgggcccaagaatttgcagctctaacaagttcccaggtgagatggatgctgctggtctcggaccaggctttgggagccactgctctagaactaggcgcagctctcccctctgcgagaacctttagtgtaacccagccccgcagaatcctaactctgtctcctaagctatcacagccccagccatcactccagtacccaaa

SEQ ID NO: 753088 - DNA, 525 bp, Homo sapiens
agctgggattcaggggtaggggtgggggcgccctggtgacaaccacagcctcttggaaggctagggagaaaacagaaaccccactgagtggacacaatcagtctggatccttatcaggtgtcattacacatgtggcctgcagagtaggggttttgatggggttccggggagcccagggtggaaggcagggatcatagagacttctgaggctccgtccacaagggatgctggcctcgcctgggctctgtgactcgwgtgtggcctttatgagccgtgaccaatggctcaaggcctgggctggcagccgtgagccttcatcctaggcaggaattctaattaaactggggctcctgggtctcacttacaaagagctcagccccagaccctgcttttcggggccccacccacctggacatactctttcacgcaacctgcagtgatatgcagctcagggaatccctgcttcatgctgctgcgggctgcggagggccggggcctatgctgatgcttggggtgggccctgag

SEQ ID NO: 753089 - DNA, 567 bp, Homo sapiens
tctttgtcaaaacaaaaatatcttaaaattttacttagggctagatatttttatatctaatgagaaattttaaacctcaattttttcttcctcactatatcccaattaatgttgatgtatgcatattaaaaatgaaacattttatacaaaattagcaaggcatggtggtgcatgcctgtaatcccagctactcgggaggctgaggcaagagaattgcttgggcccgggaggcggaggttgcggtgagccaaratcacgccattgcgctccagcctgggcaacaagagcaaaactgtctcaaaaaaagaaaataaataaaataaaataaatcacaccaataatactttcaaatgtataaacctttaaggtatgaagtaaaacaaaccttaccttagacacagggtcttattcctttgtggaagcttatttttctaatctggaaaacaagatgagtattgaatattttatacatatgatgataaaatatgaaacagtactttttcatattttatcatatttttaagatgtagattgaaactaatgtacattttatactatattagtaaa

SEQ ID NO: 753090 - DNA, 647 bp, Homo sapiens
atggcctacttggtcaaggtgaattagctttttgatgtgctgctagattcgatttgctagtattgtgttgaggatttttacatcaatattcatcaagaatattggcctgaagttttcttttcttttttttttttcttgtgtctctgccagattttggtatgaagctgatgctggcctcatagaatgaattatagatgatcycccctccttaaggttttggagtagtttcaataggaatggaagcagcttttttttttttttttttcatgtatctggtagaattcagctgtgaatctgagtggttttacttcttggaaggctttttactactgattaaatttcagaactcattattggtctgttcagggattcagtttcttcctggttcagtcttgggaggttgtatgtgtcgaagaatttatctgtttcttctatattttctagtttgtatgcacagaggtgttcatagtagtctctgaaggtttttagtatttctgtagggtcaatgataatgtaccctttgtcatttctaactgggtttacttggatcttctgtctttttttctttagtaagttagactgcaaactagactaacaatttttttcaaataacctatttctagattcattgatcttttgtacagctt

SEQ ID NO: 753091 - DNA, 360 bp, Homo sapiens
cctgggtcttgagggtaaaggggatccacaacagtttgatggtcagcagattgttgcaggggtgagcagaacagaggagctctcccaactgtcctttccactggactctgagttcctcaggtgtcaatctctgccagactcttgctgctttccctttctgcactccagattyttcccatgggcactccaacagttcctggctttcttccctcagtttttcattcagaacatgttcaatcactagtaaccttgatcttctttctgagaagaactggcttccaatgtccctagtcagccttcttgaaaacaatctttcataatatttaaaaaatatatttaggtactccaattttgagggca

SEQ ID NO: 753092 - DNA, 518 bp, Homo sapiens
caagtcggagcttttgaagcttctccgaagtttgctcgaattgcagcccgaactacatcttttccacaagggctggacatatttcaggaatctagtatttccttggggaatgttttcctccccctgcgctggaagctgctctccatgttttcccccyctttcattcccatgggttgaaactgacccgccctgtgtggaggaagtcctctgtaggactctggagatccgaccaggacatccacctgggcattttggaccccaacgccttgcttctgtatctgatctgcatttgcctttctggacaccctcttctgtgctccaagacaccctatacttttctaccttgacagggaacttgacatttttaaacttacctatttatttgtccgtctcccctattagattatgaattccttaggtcagagacattctttccttatgtcagtacctgacacattgaaccgtggttgtggagagaataagttccctcagccgttatgaagggaaacctccccagc

SEQ ID NO: 753093 - DNA, 590 bp, Homo sapiens
aatggaaaccaaaagagagcagaggaagctaaagttttatcagatagggcagactttacatcaaaaactgtaaaaagagtcagagaaagtaattatataatgagaaaggggccaattccacaagaggatacagtatctgtaaatatatatatgtacccaacatcagaccacctaaataaacagagaaaatattaacagatctgaagacattaatagatagtaacacaataatactagaagacttcaaaaatcctactttcaataatggatgggtcatccagacagaaaatcagtaaggaaatattggacttcaactatacactgggtctaatggayctaacatacaggttgaatattccttatctgaaatgcttgggactagaagtgttttgaattttacattttttagatttgggaatacctgccttatgtttaccagctgagcatccctaatccaaaaatgcaaaaccaaaaatgttccaaagagcatttcctttcagcatcatgttggtactcaaaaagttttaaattttggaacattttggattttggatttttggattggggatactcaacctttatacagaaca

SEQ ID NO: 753094 - DNA, 628 bp, Homo sapiens
ggttttccttacagagaactaaggtccttgctatcactcatcctggaagatgctgatgctgagaagggaaacaaggacctgcatgagtcccacactaggtgagaatcagtttagcccagaacccaaagtatgaagatgcctggagagtttgtggtggtgggaagctggctgaaaggcccagcacatggagaacacaccatcagatacgaagggagggggtctgagaaragcccctgggatgagattgagccagctgggaggaatgatacgttattacccacagtgcacagcccttccattatccctgaagcttcaatgcactcctgttccacaccccaaatccagttttttttttttaggtattatatgtggtaatatcttgtgctgcagatggagtagcaagaggaagaacaatgccacaatcccccgatgcaaaattggtagaaagaataactactagctacccctcttcacagaagagtggccatcccaccagccatcagcagtagaggaagtagcatgggagcataataagaactatgggtggaggaactcaaagttcatgtccctgagcacctcggacctctgagatacagccagatgccttgcaaagggctacttcccagaa

SEQ ID NO: 753095 - DNA, 590 bp, Homo sapiens
tagtaaattagaaatggaagagaactattactttaattagataaagaatatctacaaataatatatagcagtcatacatttaataataaaaaaatattggccaggcgcagtggcctatgcctgtaattccagcactttgggaatcyggggaaggtggatcatgaggtcaggagtttgagaccagcctggctaacatagtgaaaccttgtctctactaaaaataccaaaaattagctgggtgtggtggcacaaccccagggaggctgaggcaggagaactgcttgaaccagggaggcagaggttgcagtgagccaagatcgtgccactgcactccagcctaggcgacagagtgagactctgtctcaaaaaaaaaaaaaaatgttgaaagcttttcctctctgctacagtttgaatgtggtttgtccctgacaaaactcatgttgaaatttgatccccaatgtggtggtattgagaagtggggcctactggaaggtatttgaatcatgcaggtggatccctcataaataggttaatgccctccctttgggagtgagtgagttctcactcctgtgggactggattcgttacct

SEQ ID NO: 753096 - DNA, 633 bp, Homo sapiens
cctaggagtgctatgggagactggggtctatttcacccctgcagtcttgaccataagagacaggtgcacttgggggggggggggctttttataagcctatacctccaggtgcatgttctctttcccagggatcttccatgctgagaaaaagaattcagtgatatttctcccatttgcttttgaaagaagagaaatatggctctgttccgcccagctcaccaccrgtcagagtttaaggttatctctcttgtttcctaaacattgctgttatcctgttcttttttcaaggtgcccaaatttcatattgctcaaacacacacgctgtacaatttgtgcagttaatgcaattattacagggtcctgaggcgatatacatcctcctcagctgacaggattaagagattaaagacaggcataggaaatcacaagggtgttaattggggaagtgataagtgtccatgaaatctttacaatttatgtttagagactgcagtaaagacaggcataagaaattataaaagtattaatttggggaagtaataaatgtccatgaaatcttcacaatccacattcttctgccacggcctcagctggtccctccatttggggtccctgacttcccccaacaacaaa

SEQ ID NO: 753097 - DNA, 620 bp, Homo sapiens
taaatccaagaggtatcagctaaggtcagcacaaaaataaaccacaactaacatctccaaccagaaacattccaaattcctcctcagccagacacatgctagcccagaaataacccctctctggcagggaaggtttcagcctcaagataaccccctccagccggaaagatgtmagccccaagataacctcccctctacccagacacattccaactctgccataagcttccctcacacagaaacattccaagcttgtgataagccccctcaccctaaaaccaatatacactcttagtctgtaagagaaggtgctcctgacggaaatcgaccagaagaccctctcaggtttattttctctaaaataaatgtgtctttaactaactgtcaagctgaatttcatgttttttctctctttctttaactcttacaaccataactagcagaaaccttgacagtttactatcggtgttccttacacaatgattacaacccccaagagaagagcaatcttactgtgaaattgttttttttttaaactggaaataattaaatctgatatataaaataattcatgagccatacaaggtcttcaaaagcaattttgaataaatattgaataa

SEQ ID NO: 753098 - DNA, 472 bp, Homo sapiens
ttgaagcttcttgatttgtatacttaagatttatccatttcactgcatgtaaattttgccacaatgaaaaacaaaatcaaaggtaccaaagtgtatcagaaacagttacacacatgacaagatttcacttattacctgcatgtatattttgagctagatatcattacactttaatatgaagatacwtattttaagagaggtaaaaagattctttcaaggacacaggattagttagtgacagaatcaatattcaaacttagtttggtatttttctactataccatacacaaattacaatatcctatggaatataatactatatcttataaaatcatatgccattaattttttgttttgctttttctatttttgtctccttcattagccatcagtgagtaatgcagttgtacgctcaaaggtttaggtcttcagcgtggccattttcaaaagatatttgttagaagtggaaaag

SEQ ID NO: 753099 - DNA, 472 bp, Homo sapiens
ttgaagcttcttgatttgtatacttaagatttatccatttcactgcatgtaaattttgccacaatgaaaaacaaaatcaaaggtaccaaagtgtatcagaaacagttacacacatgacaagatttcacttattacctgcatgtatattttgagctagatatcattacactttaatatgaagatacatattttaagagaggtaaaaagattctttcaaggacacaggattagttagtgacagaatcaatattcaaacttagtttggtatttttctactataccatacacaaattamaatatcctatggaatataatactatatcttataaaatcatatgccattaattttttgttttgctttttctatttttgtctccttcattagccatcagtgagtaatgcagttgtacgctcaaaggtttaggtcttcagcgtggccattttcaaaagatatttgttagaagtggaaaag

SEQ ID NO: 753100 - DNA, 570 bp, Homo sapiens
tctgtcatttggctgattatatttctggtagcgcctttaatagagcaaaaatttgttacttttaataaagtctaacttataagttctttttaacatgaatcttgtctttggtattgtatttaaaaatgcactgccaaaccctaggtatctaaattctctcctttattatcttccaggagttttatattttgcmttttacaactaggtctataattcattttaagttactttttgtgaagagtgtaaagtctgcgtttagattcatttttttgtacgtaagtgtccagttgtttcagcatcatttgttgtgaaaaccacctttgtttcattgcattgcctttgctcctttgtcaaagattagttgcctatacttacatgggcctattttggagctctttactctgctccactaaatgatttatctgtgtttttttgttgttgttgttgccagttccacactgtcatgattgctgtagctttgtattaagtcttatgtcaggtagtgtcagtctttgttcttcttcaatattgtgttggctattctgggtcatttgcctctctatataaact

SEQ ID NO: 753101 - DNA, 570 bp, Homo sapiens
tctgtcatttggctgattatatttctggtagcgcctttaatagagcaaaaatttgttacttttaataaagtctaacttataagttctttttaacatgaatcttgtctttggtattgtatttaaaaatgcactgccaaaccctaggtatctaaattctctcctttattatcttccaggagttttatattttgccttttacaactaggtctataattcattttaagttactttttgtgaagagtgtaaagtctgcgtttagattcatttttttgtacrtaagtgtccagttgtttcagcatcatttgttgtgaaaaccacctttgtttcattgcattgcctttgctcctttgtcaaagattagttgcctatacttacatgggcctattttggagctctttactctgctccactaaatgatttatctgtgtttttttgttgttgttgttgccagttccacactgtcatgattgctgtagctttgtattaagtcttatgtcaggtagtgtcagtctttgttcttcttcaatattgtgttggctattctgggtcatttgcctctctatataaact

SEQ ID NO: 753102 - DNA, 632 bp, Homo sapiens
gaaacaaggccttcctgggccaggtggtattctgacatccaggcaatgtcatgagccttgctggcagggtcacaagtctcaggatgggctcagagagactgcttctaatcctgagtgatgggttgacctgtaggcagatttccagggcctctgtgcatggggggagaggggagcttgactcctgctaagatctgaattcattttgaatgggctagtagagttgtttgagatcatatttaactcataataggaacagataatgagtctcttcaaaaacaaggttttattttgttattaaatagaatatttgttggtctcctcctctgtgctgagtatcaacccaggtgaagagayacagggaccagcaagacgtcaacatgtctcatggagttcacttcgtagaggatctaaaaccaaaaatatttatttttgtgcccaactggaatgctagttccttaataaaagagactctgtatatcttgtccttatcaggatctcagaactgagaagtatttgttgactgactggctcatgatagacatattcagtaagaactagcctgttagacgaagacattttcttctggtgcttactgaaaagtatttaatagacaaccaaaaactgatgatgca

SEQ ID NO: 753103 - DNA, 541 bp, Homo sapiens
gaattcaaagagagaagtgacaggaaacacctaaatgaaggagagggatccggagtctactcgaccaggattggctgggagcctggagagactccccaaagcggaaaagggaaaagagatactcagtggtccacattcccatcgggtactcctgcaatcctagccatgctaaagttyctcagccctcgtgggccatgaaactaacagagtgaggttcctgaagactatacaatgacattgctccagagagagaggtaacactgggtttcacacccccaaaccctaagcagctacagtacagtgtcattgagagcctggtccatgataaactgtaccctgccatagggctcaacagcccctgcatctccacatccctggaggcccactgatttcccctgcctacaactaacactgcagtttgctgctactacttgggctgaagcatcatgtgccaccagacacaatcttgtagatttgagaagtggaaacaccatgtattttcacatgtctggacaaagtccccctgcctgcagctgccatc

SEQ ID NO: 753104 - DNA, 444 bp, Homo sapiens
ttttccttctgtgtttcaacattttggcaggttttcttgctatttattgttttaaatgtatttacatttactaatcttttcttctgcattgtctattctgctgtttatcctattcagtatatttttcatcccagacattgtgtttttaccagaatttcaattgggaatattgtatatcttctatgttcctacttaacatcctcartatttcttctaccttctttaacatatggaatatagatataaaattgttttccagacttttactgtgttgaaatacccatcacataaaatttactgtcttaaccatttttaagtgtacagttcaatggtgttaaatacatatataatgttgtgcaaccatcaccatcatccaactccataaatcttttcatcttataaaactgaaactctatacccattaaacaataactcccattcccc

SEQ ID NO: 753105 - DNA, 649 bp, Homo sapiens
ttatgcttttggtgacagtttatgattagtgaggggatactcgtgtgttcagagacttccttctcttccgaaacatgttgctatgaattgcaattgtaattactatgcagctctatgggtaaagttcaaagagcaggctatctccaattagtcagtctacagaatgtgttcttyatggtcacttctaggtaatgtcatcagaattaggacatcaacaaatatgctgaggttagaaaacaattccaaaatgtatcgtcaatgaaatttaaagtgccatctccagtgtgtgtgaagttgcaaaatgacaaataatgttctacatttgtcagatgtctaaaagatattcaactttaataagaaacaggagacagagaagtgaggactaaactaaaaattacctacaacatatcacaatttaattttaaatgaatttatttgattattgcctttcatcttaccttcagtttgcctaaatcctgagttaagtatatcacaaactttaatcctggaaagagtaaaaaatcaagaggtaaagcattgcattcatgaaagagtttgagatgtctaaggcgtttctcaactcaactacccagagtgaaagtcagtaagtctatgagctaatcttgttgtgattaacttctgaacctgt

SEQ ID NO: 753106 - DNA, 682 bp, Homo sapiens
ggttttatcagagtgaagggtggaagccacctcagctcccctgccaggcaagcaggaaagctatccaccttcctgtcccagtattccagctattcagatcagacaggtaactctttgcatctgtaggaatgttgatgttccaagtagagaggagttgtgactctgcaagcctgaatttgagaagtgctcctcctgtggggatgcaatcaccctaaattgttcctggaaggccatctatatgtgcatctacactgcattcctctgggagaarccccagctgtgtgtgcagtggtgtaccagtgggaaaaggaccccctttccaagcccctttatgatcagagatgctgcctgattgttggggtagaggtgtagactttctttactgcacccagcactgcaattgtgtctctgctataagaaacgtcccactagtggaaagatctgggactcaaggcctgccattcagattctttttcccatgggatgttcccttgatgtgatgctctcccccttcccctaggaatgagacttcctgagacccagaccacagtgattgttagtgctcttctgggtctagatacccagtgggactaccacactttgagctgatgctggggaatgtctgcaagggatccagaaatgtgaactaatttcaagtctcccagcagtgtacaccagcacc

SEQ ID NO: 753107 - DNA, 633 bp, Homo sapiens
acagtctttctgtctatctgacaggctctaggtccctggctttccctttagttccccacttggactggagcccaactgaccagggctccgccctcttctctttgctccctccagctcagcaccagccttggtgccagcacccccactgacaatgatggtgagattcttragattcatgccactctctcactcctctaccttctgttctggactgggtcagaactacctcattctccagaattggggatttggacaactgagcagtcccgcttttatcatagctgcccaagcatctctctgccagcctgtgcttcccacctcgtgcagtgccaggaaccaggatgtctcatggctggctttatctcacatttcactcattcattcaacaaatctttatgatatgccactgtacaccatgcacattttctaccaaactgtaaatgtcctaaaataactacatacgtatcaagttctgtgtttcttttgtaatatggatggcaagttattgaaattttatgaattcattactataaaccggatacagttcagtcctctttctggaataaatgcacttctagacagttaccactatagcactctatcccatcccactgattgtataataaaagtcaa

SEQ ID NO: 753108 - DNA, 601 bp, Homo sapiens
actaataatgatgaggctccctgcgccggttgactgggagggtgggaaagcgtggggcacctgggagtgcaggacagcacaggacagggggcgtggcttagcaggtggggctgctcgggtgcggatgcgtgggaggaaaggggcaggggcaggaactggtggaagagctgacagcaaggggagtggccaaacggaggcggggcctggaagggggcgtggcttgcgggcctctgggccgcccggcctctttaggtgccgcagcggaaggcctggagcagaggctgcttctccgcccaagcactccctgggtgagtccatactcctggcgcgagtacgatcctctcctccagggaaggccgggtccctcgctggggttcgacccgactcttcccctctacccctttctccttgttctacacctagcgagcccaggccctcccgaggarcagagaatggaaggaaaccaagttttgtcctgcgagtcctcgccctctgcaggaagaggatgtggtgaggccagcttttccatatgcagttaggcatcgaagggaagatctgctgtacctaagtggggtgggcatttcatttttagggaccgtct

SEQ ID NO: 753109 - DNA, 611 bp, Homo sapiens
tttatatgacattcttgaaaagataaaactacagggatggagaacacattggtagttaccagggttactaaaaagaaagggtgaccagtaagggactgcatgaaggagtttttgggggtgatgcaaatgttctacatcctgatttttacagtggttccatgaatctatacatgtatgaaatttcataaaactacatacaaaaaragaaaaattcattttacagcataataaaccagataaaataataataaattctattctttaatgcaattgtatgtaggatgacagatgtccatcaaagtttctaaagtttcattaggttttatttttgttcctgaacattacttacaaattgttctccctccatattttaaaacctaatttcaaatctgagggaaaaaaacttcatttttctgtatcattgcatttactgaatagatatctaatgataaataacttgcttcctaaaaaaaaattcaataccaaaaactgttcatctttccatctggagaaaaaattggaaatgaggaattggaactacaaccttaactttgccaaagtacttctatacagcaggatattaattcttgtcatcttcagtgacaacaagg

SEQ ID NO: 753110 - DNA, 611 bp, Homo sapiens
tttatatgacattcttgaaaagataaaactacagggatggagaacacattggtagttaccagggttactaaaaagaaagggtgaccagtaagggactgcatgaaggagtttttgggggtgatgcaaatgttctacatcctgatttttacagtggttccatgaatctatacatgtatgaaatttcataaaactacatacaaaaagaraaaaattcattttacagcataataaaccagataaaataataataaattctattctttaatgcaattgtatgtaggatgacagatgtccatcaaagtttctaaagtttcattaggttttatttttgttcctgaacattacttacaaattgttctccctccatattttaaaacctaatttcaaatctgagggaaaaaaacttcatttttctgtatcattgcatttactgaatagatatctaatgataaataacttgcttcctaaaaaaaaattcaataccaaaaactgttcatctttccatctggagaaaaaattggaaatgaggaattggaactacaaccttaactttgccaaagtacttctatacagcaggatattaattcttgtcatcttcagtgacaacaagg

SEQ ID NO: 753111 - DNA, 535 bp, Homo sapiens
tcttttgctcaataatttatttgtgagattcacaactgtatatagctgtaggctatttattttcattactgccttgtattccattatatatttctatgatcattcatccatttactggatataaaattctaagttgacagttattttctttcagctctttaaaaatggcctttgrttgactttttgtttccatcatttctattgagaagacagctactagctagttgttgcttatttgaaggtaattttcctttgctctctagctccttttaagatttttctcatttttggttttcagcaatttaacaataatgcctatatatgtagagttctttggtatttctcctgctcagggttcatatcatttctgcaatttatggactaatgttttccatcagttttagaaagttctaaaccattttctcttcaaatcctgattttgattcatcctctttctcttgcctttctggaactttaaatacacgcaccagacctttaaacggtattctctctctctctctctctctcttactct

SEQ ID NO: 753112 - DNA, 519 bp, Homo sapiens
tcctatttcacatatcaaaaaaaaaaaaaaaaaagacttcacctctctgcttctttatctataaattgatcagcagactcatccattctcaacctaatctcggttctcaaagtagtcttccttcctctcctccaaggtttatattgcaattctctgtttacatggcttcttcgctataagactgtaaactattcaaatgcaagtactatctcattcacccagcatratgcccagcacctactatggacttcaggaaaggctgaataagtaaactgttgattcttttcctacaaaactcaaagaatatgaaggattttaaaaaattatttgaagctcttaatttatggactgtgcttattctcatagctgagctaatttaaatacttaaaaaaaaaatacatttgcaatgactgagactttccgaatttaacaaaacaacataaacacaagaatcttaactttgcaactatgcttctgtacacagaaaatgctcaaattaatgtgttttgaactaaattt

SEQ ID NO: 753113 - DNA, 519 bp, Homo sapiens
tcctatttcacatatcaaaaaaaaaaaaaaaaaagacttcacctctctgcttctttatctataaattgatcagcagactcatccattctcaacctaatctcggttctcaaagtagtcttccttcctctcctccaaggtttatattgcaattctctgtttacatggcttcttcgctataagactgtaaactattcaaatgcaagtactatctcattcacccagcataatgcccagcacctactatggacttcaggaaaggctgaataagtaaactgttgattcttttcctacaaaactcaaagaatatgaaggattttaaaaaattatttgaagctcttaatttatggacygtgcttattctcatagctgagctaatttaaatacttaaaaaaaaaatacatttgcaatgactgagactttccgaatttaacaaaacaacataaacacaagaatcttaactttgcaactatgcttctgtacacagaaaatgctcaaattaatgtgttttgaactaaattt

SEQ ID NO: 753114 - DNA, 465 bp, Homo sapiens
aaggtagacacaatctcaggttaaaggacagtgttttctgttaaataaactcagttttatgtgtagtgttaaaagtgagggctctgcagtcagtttgcctggattcaaatcctggttcttccactaactagctggaaataataatagtaactacctcagagagttactataattaagtataatgcacataaagcacttakcatactttatggtggatagtaagagctcgtaaatattggctattaattaatagcttatttctctcacctttctgcagatgagtgatgaaaatggaattagactcccaactggtgacaattagatcacaattaggttaccaaaaaacttccaaataaatgactattttacttaccaaattacttctgagactgacagttgtgaccatctgctccttaaaactttatctaccagaattgtcacttgaacttcgcaaattatagtacc

SEQ ID NO: 753115 - DNA, 680 bp, Homo sapiens
aaagaggttgctaatgtttgacaaaagaagagatgatgaactaaaacatattatatacttttcttgtatgcccgaaaacttcataggtaagactatcttctgaaaacaacttttggaacgctgatattgtcctttgggctgataatgataagaaggaagtgagaaggtgaagtgtacttggctataatattcatatttmgaagatactttcagattatagcctttgttatatgcacacaatttaatcaatgctatcattatacagtagacgtttgaaacatgtagtcttcacaaaataacacactttaagtaagtttatgtcaattaacaggaatgactgtctttagaatggaactgttaaacttttatctctttgagctacatattctttgctcattgggtagtaaaggaggtgggagagacaggaagtgacggtggaagagttctgtgccagtgtgttttgagataaatgcagattatctactcgtcgttctgcaagtgcatttacttagcattgttgagtatgcaaaggacaaacaaggccccaatgctgagaagtgcccaaagtatgctgaaagtttaagaagtaaaatgattctttgataaatgtcctcttgttagagtttttagcaaggcttgttgtctgggagtgactgttgttaacccatctcgtagagcta

SEQ ID NO: 753116 - DNA, 610 bp, Homo sapiens
cattttgtatttcagatgaaatgtttcattatataaaaacagcactgccgggtgcgggggctcacatctataatcccagcactttgggaggctgtggcaggcacatcatgaagtcaggagattgataccattctgaccaacatggtgaaatcacgtctctactaaaaatacaaaagttagccaggcatgatggcgcgcggctgtagtcgcagctacgtgggaggctgaggcaggagaatcacttgaacccgggaggcagaggttgcagtgagccgagattgcgccactgcactccaacctggtgatagagcaagtctytgtctcaaaaataaataaataaataaatacaaacaaaaacagcgcacattaaaataactgttgacaaaatttcttatgtcaccaaaaataggcagctcaaatattcaaaaacatattatttaaaaacaaatttacatttttatgtaatactaagatgcagcattaaaatgatgggtgagttccacttcaaaataaaggaaaataaatttcacaattcagtgttctgaaaacagtcaataaatgcccacagtggatgtaagtatattacctcaagagactttcagccacacag

SEQ ID NO: 753117 - DNA, 592 bp, Homo sapiens
tcattgtaatgatgacatttgagccactaaaaatatctcctcaataattgaatgcttgtttccaatttctactgctttctttggaaaagacattatttttgaactatgcgctcatgcaaacttttacctcctgtgttgcagcacctatcccatcagactgtaaattatctgctttatgtgttcatcactcactgtggaatataaagttgatggacttgacaattagtgttatgagttattcaacttctttatcagagtacatagtaggaactaaaaaawttttttaactattttgaaaatctaaatataaaactttttttaaagtttctaaatggttatatttcaaaataaaaagatgaaaaattaagtatccacattaagatgttagcaacagaacaacagaataaattcaaagaaaatagaaaatagaaaaaatatagaaaagatgaaagtaaattctattaaactttcaaggataacatcccattcttataaaaagtatcctagaaaataaaatgcaaccattcttttagctcactttatgaaagcaaaattagacaagcatagtgactaaagaaaaacaacagtccat

SEQ ID NO: 753118 - DNA, 652 bp, Homo sapiens
aacttcatgtgatatgcactctgatcttaaaaaatttattatatttgcaagagagagaagatagcttgttcaaaatcctctctaccagtaatttgttggacctcctatgactgctatgcttctcaaactctgatctgttcttgttatctagtgtttggctaatgggatatattttggcttttttaaatctaaaaatgtgacaaaacaagactaagagatgtcttactgaagggcaatgggatttgtgaatcatcaaacaggtaaatcagttttcttcttttttggtaacaatctgtgtctattttaaaaattgtcatyatcctagttctgtcatagcttttcttcttattgtaacttccagcatttccaggcaatatgtgtgaatttgaccttgacgttgttaattaatcctggctgtttgccacaattttatcttcacttccttccaagaagcttgagtaagtatactgtgattaaccaggcaaaggaacagttttcagcttacattttcttgagcctaagcagttgatttacttaagtccctgggaatttttaaacagggtgcccatcaatattagtggatatgtgcagtattttaccttaattagcatattgaatgtatattttccacagggaaggataatgtttccag

SEQ ID NO: 753119 - DNA, 652 bp, Homo sapiens
aacttcatgtgatatgcactctgatcttaaaaaatttattatatttgcaagagagagaagatagcttgttcaaaatcctctctaccagtaatttgttggacctcctatgactgctatgcttctcaaactctgatctgttcttgttatctagtgtttggctaatgggatatattttggcttttttaaatctaaaaatgtgacaaaacaagactaagagatgtcttactgaagggcaatgggatttgtgaatcatcaaacaggtaaatcagttttcttcttttttggtaacaatctgtgtctattttaaaaattgtcatcatcctagttctgtcatagcttttcttcttattgtaacttccagcatttccaggcaatatgtgtgaatttgaccttsacgttgttaattaatcctggctgtttgccacaattttatcttcacttccttccaagaagcttgagtaagtatactgtgattaaccaggcaaaggaacagttttcagcttacattttcttgagcctaagcagttgatttacttaagtccctgggaatttttaaacagggtgcccatcaatattagtggatatgtgcagtattttaccttaattagcatattgaatgtatattttccacagggaaggataatgtttccag

SEQ ID NO: 753120 - DNA, 495 bp, Homo sapiens
atttggttttctgttcctacattaattcacttaggataatgacctccagctgcatccatgttgctgcaaaggacatgattttcatattttttatgctacatagtatttactggcacataagcaccacattttctttatccagtccaccaatgatggacatctaggctaattccatgtctctgctattgtgaatggtgctgtaatgaacatayaagttcatgtgccgtttggcaaaatgatttattttcttttgtagtaatgggattgctgggtcgaatagttttgtttttaagttatttcagaaatctccaaactgctttccacagtaactgaactatttacattcccaccaacagtgtatatgcattcttttttctctccagcctcagcagcatctgttgttttttgactttttaatgatagccattctgactgatatgagataatgcctcatcgtggttttggatacgcatctctctgatgatttgtgatgtt

SEQ ID NO: 753121 - DNA, 693 bp, Homo sapiens
atcatagcttagcctagctcaccttacacattctcagaaaattcacattcaccttccattgggcaaaaattatctctcacaaacccactttaaagtgttgaatatctcatgtaatttattgaatactgaagtatggtttctgctgaatgcgtatcactttcaccccatcataaagtcaaaaaattataagtcaamccattgtatgtcagggatcatctgtccattagaaatagtacttctgtagtaaaacgagcacaaactcctttggttttcatgtcctcagaatcactttcataatcatcttctgtggttcacaaggtgcatcttttattggttaaaaaaattaacacaatttatttcactctcaaattaggtttaataataaataacacaactttcttttgttttcactaataatgctaacattggcttgatttaaaattaaaattattgcaaaaataagactttatagaatagatgttcccatttttcagatgtgtgagattatactatagttgacaaactaactttaaagaacacagcttgcaatgtggtctttgtgtatgtgactcgtttgcagctcacagcctgtgcatctttccatagagtctgacaaaacctgagttggtctgtaactgctcattgagacaagtcccctgatgtcacatacagatgctgggagaatgtcaagtt

SEQ ID NO: 753122 - DNA, 642 bp, Homo sapiens
aattataagtcaacccattgtatgtcagggatcatctgtccattagaaatagtacttctgtagtaaaacgagsacaaactcctttggttttcatgtcctcagaatcactttcataatcatcttctgtggttcacaaggtgcatcttttattggttaaaaaaattaacacaatttatttcactctcaaattaggtttaataataaataacacaactttcttttgttttcactaataatgctaacattggcttgatttaaaattaaaattattgcaaaaataagactttatagaatagatgttcccatttttcagatgtgtgagattatactatagttgacaaactaactttaaagaacacagcttgcaatgtggtctttgtgtatgtgactcgtttgcagctcacagcctgtgcatctttccatagagtctgacaaaacctgagttggtctgtaactgctcattgagacaagtcccctgatgtcacatacagatgctgggagaatgtcaagtttatatagaaatttctacacatttaccgtgaatttatatgtttgtgtcattacatagagatgacagagtgttgacagactttgagtggtctttagtaaccaattgttgaaagtctggtttagctaaagtag

SEQ ID NO: 753123 - DNA, 642 bp, Homo sapiens
aattataagtcaacccattgtatgtcagggatcatctgtccattagaaatagtacttctgtagtaaaacgagcacaaactcctttggttttcatgtcctcagaatcactttcataatcatcttctgtggttcacaaggtgcatcttttattggttaaaaaaattaayacaatttatttcactctcaaattaggtttaataataaataacacaactttcttttgttttcactaataatgctaacattggcttgatttaaaattaaaattattgcaaaaataagactttatagaatagatgttcccatttttcagatgtgtgagattatactatagttgacaaactaactttaaagaacacagcttgcaatgtggtctttgtgtatgtgactcgtttgcagctcacagcctgtgcatctttccatagagtctgacaaaacctgagttggtctgtaactgctcattgagacaagtcccctgatgtcacatacagatgctgggagaatgtcaagtttatatagaaatttctacacatttaccgtgaatttatatgtttgtgtcattacatagagatgacagagtgttgacagactttgagtggtctttagtaaccaattgttgaaagtctggtttagctaaagtag

SEQ ID NO: 753124 - DNA, 662 bp, Homo sapiens
tagcttttgatttaaagtgagaagtgtgggactcttccttttacttgaacaattaaagatcattgtagggttattaattagccaaatttaaataatgttgtgtctcagggaatagaaatgccaaggcaagagagaaaaagattagataatggctggtcagtaagcagtcagaacacaaacatttataaattgtttgccatcttacatgggtgcagttcatggcctctcaaaacaattttgatagtaacatcaaagatcactgatcacagataactaaaaaaatgaaaaagtttgaaatattgcaaggattaccaaaatgtgacacagacacaaagtgtgcatatgctgttggaaaaatggtgytgatagacttgcttgatgcgggattaccaaaaacgttcagtttgtaaaaactgtaatatctgtgaagcacgataaagtgaagtgcaataaaatggggcatgtccatacttgtgtagcagtatcagcatcattaattcttacacctgtgagaaacaattttatcaaccaaagtacattgcttgtgtgcaatttctgttgcattccgccttataaatactcttttccagagttacttaggtcagtacttcttctcccaccttcttgaatgaggttgttttatatacttctgttacagttat

SEQ ID NO: 753125 - DNA, 573 bp, Homo sapiens
gctaaaactggatcccttccttacaccttatccaaaaattaactcaagatggattaaagacttaaacgtaagacctaaaaccataaaaaccctagaagaaaacctaggcaatactgttcaggacatggggatgggcaaagacttcatgactaaaacaccaaaagcaatggcaacaaaagccaaaatagacagatgggatttaattaaactacagagcttctccacagcaaaagaaactatcagcagagtgaacaggcaacctacagaatgggagaaaatttttgcaatctatccatctgacaaagggctaatatccagaatctacaaagaacttaaacmaatttacaagaaacaaacaaacaaccccatcaaaaaatgagcaaaggatatgaacagacacttttcaaaataagacatttatgcagccaacagatttatgaaaaaatgctcatcatcactggtcattagagaaatgcaaatcaaaaccacaatgagatgccatgtcatgccagttagaatgatgatcattaaaaagtcaggaaacaacagatgctggagaggatgtggagaaat

SEQ ID NO: 753126 - DNA, 592 bp, Homo sapiens
cagctcttctttgtacacctggtagaatttggctgtgaatccacctgggctagagcttttttcagttgtaggttatttattactgattcaattttggagctcattattggtctgttcagagattcagtttcttcctgtttcagtctcgggagggtgtatgagtccaggaatttatccatatcttctagattttctagtttatgtgcatagaggtgttcataatagtctttggtggttatttgtgtttctttgggacatcctttctcttccctttattatatttatttggatcttctctccttcttagtagtctagctagtggtctatctattttattaacttcttcaaaaaacaagmtcctggcttcattgatcttttgaatggtttttttttgtgtctcaatctccttcagttcaactctgattttgatcaattcttgtcctctgctagctttggggttggtttgctcttgagtctcttgttcttttggatgtagtgttagtttgttaatttgacatctttctagctttttgatgtggacatttagggttataaatttccctcttaaccctgccttagctgtgttccaggg

SEQ ID NO: 753127 - DNA, 529 bp, Homo sapiens
gccagtgttttattgaggatttttgcattgatgctcatcagggatgttggcctgaatgaagtttttgttgttgttgttgttgtatctctgccaggttttggcatcaggatgatgctggcctcataaaatgagttacgsgagagtccctccttttcagttgtttgcaatagtttcaggagaaatgctaccagttcctctttgtacctctggtagaagtcagctgtaaatatgtctgtttctgggcttttgagctagtaggctatttattactgcctcaatttcagaacttattattgactgatttagggattcagtttcttcctggtttagtcttggtggagtgtaatgcctccagaaatttatcactttcttctagattttctggtttgtttgcatagaggttattacagtattctctgagcattgactgtattcctgtggggtcactggtgatatcccccttatcgtttctgattgtgtctatttgattcttctctcttttctcctttattagttcagccagtgttct

SEQ ID NO: 753128 - DNA, 529 bp, Homo sapiens
gccagtgttttattgaggatttttgcattgatgctcatcagggatgttggcctgaatgaagtttttgttgttgttgttgttgtatctctgccaggttttggcatcaggatgatgctggcctcataaaatgagttacgggagagtccctccttttcagttgtttgcaatagtttcaggagaaatgctaccagytcctctttgtacctctggtagaagtcagctgtaaatatgtctgtttctgggcttttgagctagtaggctatttattactgcctcaatttcagaacttattattgactgatttagggattcagtttcttcctggtttagtcttggtggagtgtaatgcctccagaaatttatcactttcttctagattttctggtttgtttgcatagaggttattacagtattctctgagcattgactgtattcctgtggggtcactggtgatatcccccttatcgtttctgattgtgtctatttgattcttctctcttttctcctttattagttcagccagtgttct

SEQ ID NO: 753129 - DNA, 597 bp, Homo sapiens
ttaagttgatattggaatagttaagacttttggatcaggtgaatgtggtttgcatacagaaaggccatgctttatttttatttttattttttgatgggggaagcaaagggaagacttttaaaggttgaattgtgtccccaaaagctatgttggagtcttaattctcagtatctcagaaggtgaatttacctggaaatagattgcagcagatgaaattaattaagttaatacaaggttatactagattaggatgggcttctagttcaatatgactgagattattataagacaacaaaataaatacatgaaaaaacacaaaaatgcagggagagttctatataayggtgaattcagagattgaaattttgcagttgcaaaggatgaaaagttaaagattattggtggtaccagaagctaaaaccatggaacatattctcccttacagtcttcaagaaagcatgagtatgctgacacattgattttggacttctagcctcagaccattgagagaaaattaatttatgttgttttcagccacccagtttgtggcactttgttatagcagccctgggaaactagtgcactaaatgtatatac

SEQ ID NO: 753130 - DNA, 648 bp, Homo sapiens
cacccagggcccagcctaggaaaccccttcctttacctcaggcagcaacagcagggtagctaggtgtctgcagcagcaccagataaaccaaacacatcaaatcatacctcaaaggctctgaaaacataactacttttgaaaccatakaataggccaaacctgcatgccagagctaaatagagtgaatgtctgctaaaataaaagatttaaatatgacccatcttctcctaacataagtcaaaacaactaggatacaattcagaattaccacacaaagcaagaaataagaagataacagcctgagtgagaagacaatcaactgactacaacacgtagatgaatcagtgttgcaaattaatgactttaacaattaagttaatttaaggaattaaaatttatttgaaacaaattaaaagtagaaaatctcagaaaataaatagaagttataaaaaacaataaaatgaaaacattgataaattggacttgcagtgggttgaatattgtttaaaaacaatacagaatacagaaacctcagaaacctatgtatgtatgtggtaaaattatttagaactaaatacacacacacatgcaaacacatagatacatacacacaaacacaacaaagctgctgaaactggaataagattg

SEQ ID NO: 753131 - DNA, 593 bp, Homo sapiens
tgtttgtttgtttttgagatagaatcttgctctgttatgcaggttggagtgcagtggcacaataatagttctctgcaacctcaacctcccagttcaagtgattctccaacttcagtctccctagtagatgagactacagacacrtgccaccaagcctggctaattttttttttctttttcattcttgctattttttttttttaagagatggagtcttgctacgttgcaatcctcctgcctgggcctccctcccaaagtgctgggattacagatgtgagccaccgcacccaactggaaattatctttgatactgctgttttctaatcactttgccaaatatccttagccttgccagaataagtaggcatggataaaggtgaatgcttaatatttgtcataatggaaaaattaaattgctaacattttcagccattttgcatttcaaatcgggaaacgccaacactgagcccagatataaagggcatgggttggcacaggagcccaggaaggtattggagaatatgcagaaatagaagttaaagtgagaagatgctcttatttataattcaaaaggggaagaaaggaaggcacta

SEQ ID NO: 753132 - DNA, 593 bp, Homo sapiens
tgtttgtttgtttttgagatagaatcttgctctgttatgcaggttggagtgcagtggcacaataatagttctctgcaacctcaacctcccagttcaagtgattctccaacttcagtctccctagtagatgagactacagacacatgccaccaagcctggctaattttttttttctttttcrttcttgctattttttttttttaagagatggagtcttgctacgttgcaatcctcctgcctgggcctccctcccaaagtgctgggattacagatgtgagccaccgcacccaactggaaattatctttgatactgctgttttctaatcactttgccaaatatccttagccttgccagaataagtaggcatggataaaggtgaatgcttaatatttgtcataatggaaaaattaaattgctaacattttcagccattttgcatttcaaatcgggaaacgccaacactgagcccagatataaagggcatgggttggcacaggagcccaggaaggtattggagaatatgcagaaatagaagttaaagtgagaagatgctcttatttataattcaaaaggggaagaaaggaaggcacta

SEQ ID NO: 753133 - DNA, 593 bp, Homo sapiens
tgtttgtttgtttttgagatagaatcttgctctgttatgcaggttggagtgcagtggcacaataatagttctctgcaacctcaacctcccagttcaagtgattctccaacttcagtctccctagtagatgagactacagacacatgccaccaagcctggctaattttttttttctttttcattcttgctattttttttttttaagagatggagtcttgctacgttgcaatcctcctgcctgggcctccctcccaaagtgctgggattacagatgtgagccaccgcacccaactggaaattatctttgatactgctgttttctaatcactttgccaaatatccttagccttgccagaataagtaggcatggataaaggtgaatgcttaatatttgtcataatggaaaaattaaattgctaacattttcagccattttgcatttcaaatcrggaaacgccaacactgagcccagatataaagggcatgggttggcacaggagcccaggaaggtattggagaatatgcagaaatagaagttaaagtgagaagatgctcttatttataattcaaaaggggaagaaaggaaggcacta

SEQ ID NO: 753134 - DNA, 631 bp, Homo sapiens
ttctccttgtatataaatctacatgtcacctttgctggaaataatgtttggattatattatcctcccctactctgaatcttctttcccttcccttggttgaagttcacaagtcttggaagctctataaatgctggagaccaagtattagtactcagacrctggaatcagatgcagaccttgagttcagattcaagcaggaatccctttctggctgtgttgaccctaagcaagtcactgaacttctctaagtcagttttgttatctgtaataggtggcttttagtagcagctacttcagagttgttatgaggattaatagcacaaagtaaatattcaatacattttagctattccagtcttttatctctgtaaaactcattctattagtataatgtaagtaaaaatacaaattgcttatcattaaaaattcaggctgggtatggtggttcacacctgtaatattagcactttgggaggccaaggcaggaagattgcctgaggccaggagtttgagagaagcctgggcaacatagtgagaccctgtttctatttaaaaaaaaaaacaaaaacaaccagcagattccacaggtccataaggaaatatcatattgaagagaagtctgtaattaag

SEQ ID NO: 753135 - DNA, 558 bp, Homo sapiens
gagatcaggagttcaagaccagcctcgccaacatggtgaaatcctgtctctgctaaaaatacaaaatttagctgggcatggtggcacgtgcctttaatcccagctacttgggaggctgaggcaggagaatcgcttggacctgggaggcggaagctgcagtaagccgagatcacgccactgcactccagcctgggcaacagagcaaaagtccatctcaaataaataaataaataaataggaatttgggccaggcgcggtggctcaggcatggtggcatgtacctgtagtctcagctacttgggaggctgaggtgtgtggatsgcttgagcttaggagatcaaggctacagggagctatgatctcaccactgcactccagcctcagcgacagagaccttgtctcaaggggaaaaaaatatataaatatacatatattttttaataatattccttctgtactcaaaatgagtatctttttccttatcaccatcactaataatacttatcaccaacttcaggacaagacatgctggcacctgctcattattatcaggtcaat

SEQ ID NO: 753136 - DNA, 566 bp, Homo sapiens
ttaagtttatcaaaataataaagcacacagtttcaatgttaaagaatttttaatggaaagcagctgtctctggttcctcccttccctacctagactttcttctcagagggaatatttttaactctgattttgcttttagttattcttttgattaaaataggtcctccatatccatgagttccacatccgtggattcagctaactgcggatcaaaaatattcaggggaaaagaaaaaggatggttttgtctgtactgaacatgtacagacctttttttgtctatattccttaaaaatataacaattatttacatagtatttacattgcattaggtattataaataatctagagatggtttaaagtatacaagagaatgtgtataaatgcaaatactataccattttatgtaaggcacttaarcatccatggattttggtatccacaggggcccaggaaccaatctcccatggatttggagacatgactgggctgccatatctctaaataatattcttggctgggtgcagtggctcacacctgtaatcccagcactttgggaggccaa

SEQ ID NO: 753137 - DNA, 641 bp, Homo sapiens
tgtatatctcggtagacccttcttcattaagttctacactgtccatgtttctgggagttataatttaatctttgcaatcttggcagtgcaatttaagcagtgggttaagttgtaaaatgagtgttttaacatccagtgctctaacagtttgatgcaaatgtttttgcggcatttatgcaactcagattctccaagaaagtaaaagagagagagagagagagagatcatatttctgaggatgttatagaccaagctagcatcaaagaataagagaaaaagagctgcataaaagtcttggaggtaacaggtttggacaactttggatgaacagacatcctttaatgctagtctctgattccaattgctacaaaatccagcaggtatgttggggcactgtgcagcttggaagtcagagtttcacatccgcctcctctcatcattgttaaatcattttgtttcaaaaaggttttctttttatgttaataaaaagaaaagtcttcaarggcattttgttacaacaatgaaatttcaatttgtgattctaatatattcaaaagtacattggattgtggacttaagtcatcaatagaaccaaaatgtgctggtaaaacaacaactagacgtctccaggaatgccttga

SEQ ID NO: 753138 - DNA, 576 bp, Homo sapiens
aaatagcagggagcatgatggctggatcctatggtaagagaatatctagtttttgttatgtcaaatggccttccaaagtagctataccattttgcattccaaccaacaatgattgagcattgctgttattctacatgctcaccagtattcgatgttgtcaatgttttggattttggccatagtaataggtaagaagtggtggctttctgtggtgacatgtctgctcaggttttttgcccatttttcagttaggttgtttgctttcttattgttgagttttaagagtttctatatgttgaatatcaatcctttatcatatatataatggaaatattttcttgcagtgtgtggtttgtcttttcattttcttagtagtgttttttgcagagcagaagtttttacttttaatgaactacaacttaccaatttcttttktcataaattgtgcttttagtgttgtacctaagatgtcatcactaaacctaagtttatatagattttcttctatgttaccttttagaagttttatgattttgtattttatatttaggtctatgatccatttttaattaattt

SEQ ID NO: 753139 - DNA, 420 bp, Homo sapiens
atgcatatactaagaccatgatcaagatatagaattgctatcaccccaaaacttccactgtgcacatttgtggccaatcacctacttctagtcatatcccatggcaaacattgacatgttttcagcccttattgttttatttctgtaatcacccaacgacttcttcctgcccagtgcacagacctaatcaattcactgagataacagcrctgcagtaaataaagagtttaattgacacaaggctggccatgccacacaggagtcggagttattactcaaatcaatctccctgaaaattcagaggctagggtttttcaaggataatttggtcagcaggaggataggggaatggatgctggttggggatgcaatcataggagtatggaaaacagtcttcctgtactgagtttgcctctaggt

SEQ ID NO: 753140 - DNA, 624 bp, Homo sapiens
cagtaagcttttctcactgcaaaaacccagtgcttcagtgtttggctttccattgtgcagtcaaatggatccagtttgattcagtgacacaaccactgtgactaaaggtatatgaactttcaaaatatactcaaacgttctagtgatatattgaataattgttaggattcaggatgtaaatctgaattagttgtatataaggaagattgtacattatcargatttgattacttctgctttgtaggctgccaaatttgtttcagggcaaccagtgagaaagtctacaaaaccagaaaatacccatggcattcctatcttaaccagagccatagcagacatcagtaatcaaccacggcattttcccacagagctcatatttagctttataatccttctcaaaacagattttccaccttcctaccacatccctaagagtttatctataaaatggagagtgacaatctgtgggcatttgagatctccctaccaccctctcagcctcatatacactttttcccactagcaatgcaagagatcaggttgtgatgttggctcttagatccacctgattcatctcaagcctccttccttccttgtcgtgtatctgcacttaccaaagagcaa

SEQ ID NO: 753141 - DNA, 626 bp, Homo sapiens
aaacatgagtgaaaaggctgtgaatgattgcaactgagagagagaataagagaccccatgcacatgtaggtcatgttcctatacttctgcaagtcacatgacttctttaccgccctccttgatctttagttctctcctttctttttgaatatccccacttccattcattctttttgttcgtccatgccttcacccagctctgatccccaagccctgtggtggcttctaagtgctaatgaagttgtcaagccctgcttcccctccgggtgaaagaactccaagtggatgtgccttctcactcaagagcagggctgcccagagactcatttcaagacatttatctgycactgaacaatggtgtctgctgctgagaagaaattaaagcgactgccaagtagagcagcacagcacataacagcctcgtggaacaggagagggtgtttgatggtgatggctgtgaagccaggtctgacaaggtcctcacccatattgcctgcaatccttcagcagctggctgtgcagctgctgcggatctggcactccccacgctgacggatgctgaagagcacattccggtgttgggggaaatccaatgaggcaggaaacagcttgaccaggacaagctc

SEQ ID NO: 753142 - DNA, 589 bp, Homo sapiens
atgacattttacaaaacaatctaggtaaggaaaaagttaatttatcatcagagaaacaaagtttgtagctgcctgttacatgactcaggtcccacaatcacattttctttaagactcaaataatttcaggttcaaacagctttaatttgaattacttatttcacagtataaacatcaaaatcatagggacctttttacaaactacacataccccatatgccccaactgcaccccctgaccaagctccaagtatgcataggttgcttccagataccctttccccaaattctccattgaaaatcattgttttcattgaattactcttactgaaagtgktaagttttatcccttgataatgttgaggaggacagaaaaggttgagaacctctgtactacatcaaactgccaaagagaaaagagaatgaaaagtgtatatatttggacacattcaccagcttttctacctttgtatctcccacacatggcacagtgccttgcacagtggaagactagaatatgccaccccaaaatatcttctttggcataaggattattttaagctgattattttgggaaagagcaaagacag

SEQ ID NO: 753143 - DNA, 530 bp, Homo sapiens
tcctaaaagcaaatattgggatttcctgtagaagaagaaattctgcttcaagacgttaacatagaaatgttgcttgagttttgattgtgctggcctaaactacagttttcagacttgccagctctcacaatcaagtgagccaattctttaaaataagtaaacaaaagcgcaaatatgataaggaaaaacatcagacacataagtgatgaaataaaagttctagagataaaaatagatcagagatttttaaaataacctgaaatgaattaatatcagaagcaaaatgtcaatgaaattaaaaatataccaatagaaactctccaaatgatgcaaaaaatatkgaagaaaattcacagaggatcaatgacacatgggacaatctcaaattctctaaaaaaatgtgtaaatggacttgcataatagggagaaggatataaaaaatatttgaacaaaaaatgaacaaatatgataaaaatataaaccaagacatctaagaagctaaaaagctactcgagcataatatacataga

SEQ ID NO: 753144 - DNA, 575 bp, Homo sapiens
cacatcttgaaaattatgaagagttatatggtaaacattggatgctactatctcctcaaggttatcattttaattattctggacaaataaacataagtaggattgttgaactatatggtagtactgtttttaattttttttatgaacctccatgctgytgctagagcagctgagccattttgcatttcaccaacagtgtacaagggttccagtttctccacgtccttgtcaatacttgtcttttgctttttgatcacagtcatcgtaatgggagtgaggttatatacatcattgtggttttgggtcacatttttctggagtagtgacattgagcaaatattcatatacatgctgagtatttacatttcttcttttgagaaatgtttattcaaatctttagcccatttttaattgggttattgcatatgtacttttttgctattgaattgtaaaagtttcttaaatattttggaaattaaccccaagtctatgtggtttacaaatactttttttttttccattcagtacgttgtcttttctttctgctgattttttttctttgctgttcagaagtg

SEQ ID NO: 753145 - DNA, 627 bp, Homo sapiens
atgaatgaacactctgattcatccatccacacaatggaacacaatttatcaattaaaaaaagcaaactattgatacatgaaacaacatggatgaatctcaaatgtgtattgctaagcgaaagaaatcagactcaaaaggttatatactgtttgaatccatttataagatattctagaaaataaaaaaccacarggacataaatcagaccagtggctggtgggaggggagctgggaagttctaactacaaagggacacaagggaaatttttgaatcatgattgtgattatacagctgtatgcatttttcaaaattcacagaactgtacaccaaaaggggggattttaatgtatctaaattaatctcacattaataaaacacattgtaagatattatttaactatttccattaacaattactcacaactgattaactattcggtgaaatttccaagcccatttcttcttctcttgttgacattttggctggtttctggcatattcacacttctaccagaaagtgatagatgctaaaatgagaatgggataaaccttaaatcagttgatatttattaattacaaaaaatatagatgtaagtataggaaagccaaggtctcaaattagttt

SEQ ID NO: 753146 - DNA, 608 bp, Homo sapiens
gagtctctgcttggtaacccagataattctcctggatattgtcaaagatcattgagatgttacctctatgtgtctgcaagaaccacagcattactggggttggggtgtaccctaaagcagatacagcttagatcacattacctaagtccttttgaatatcttgaaagtcttccaagaaggatgaatacaaacaagcacagattgagaagaatacaataaataaataattattcaatgcccagacacagacaaacattttaaagtatcacaaccatccaggaaaacatgaactcactaaattaactaaaagagccwgcagggaccagtcctggagaaacacagatatgtgaactttcagacagaattttaaacaactgtgttgaggaaactcaaagaaattcaagataacacagagaaggaattcagaattctagcatacaaagttaacaaagagattgaaataatttttaaaattatttaaaattttttaaattttaaaaatcgagcagatattctggagctgaaatctgcaactggtatactaaaaaatgaatcagagtcttttaatagaagaattgatcaagcagaaaaaaattattagtgagctt

SEQ ID NO: 753147 - DNA, 578 bp, Homo sapiens
aaaattttctcccattctgtaaattatctgtttactctgttgatagtttcttttgctgtgcagaagctctttagtttaattagatcccctttgtcaatttttgcttttattgcaattgcttttggtgtctttgtcatgaaatctttacccatgcctatataacataatttttataaccaactctcattgatgaacatttgaacttttcagtttttcaacattgcaaacaagtttacaataaaaagctgtatagatatttatctccacacttgttttattgtatctttaggaaaccacccagagatggaataacaggattttaggcaaagtacactcccatacacattctgcacaccccccaaaaaaagtgtatgtgatttctattatctgatcttaatttgtgctttacrgatttctacaactggcaagataaagcttatattataaggctggggaataaaattagagattcaaggatgaaaaaaaaaaaaaagcctggggcttctaagttaggaatccaagcacaaagcccaagtacaaaaggagctgagacaattttaacaatattaataatagct

SEQ ID NO: 753148 - DNA, 618 bp, Homo sapiens
ttcacaattgttacaaagagaataaaatacctgagaatacgacttacaagggaggtgaaaaccctcttcaagagaaaatataagccactgctcaaggaaataagagaggacacaaacaaatggaaaaaaaaattccatgctcatgggtaggaagaatcagtattgtgaaagtggccacactgcccaaagtaatttatagattcaatgctattctcattaatctaccattgattttcttcacagaattagaaaaaaygactttaaatttcatgtggaaccaataaagagaaaaaagagctcgtatagccaagacaatcctaagcaatagaacaaagctgaaggcatcacactatctgacttgaagctatattacaaggctacagtaaccaaaacagcatggtactggtaccaaaacagatatatagaccaatgaaacagaagaccaacctcagaagtaacaccacacatctataaccatctggtcttcaacaaacctgacaaaaacaagcaattgtgaaagtattccttatttaataaatggtgctaggaaaactggctagtcatatgcagaaaatggaaactggaccccttccttacaccttatacaaaaattaactc

SEQ ID NO: 753149 - DNA, 529 bp, Homo sapiens
cagtgatcgctgtctggcccctacctttgttcacgcaagccttgggctctgaaatcagcaggtagcacacccagctgggcacgtgttcttctctttagggtggtaagttccccctcagccctggacaggctaaagatgctgtccaggagccagagcctaaataaggaacattaggaatctacctggtgctttattctactatggctgagcttgcatctaggctacatgacaaagtccttccccatcccttcctccttttgytaaagcaaaagagcctctgaacatggtcaccaccatcccaggctggcaagtgctgcctgattaccattgatgttcactcaaggcccaaaggctcttcagtcaacttgtggtgaatactgccagtcctgagcctcttccttcaggttagtgggctcccttctgtttcaggacaggtctagaaatgctgtccaggagccaaggtgtggaatcagagatcgtaaaagccagcttagtgcttgactccagtgtggccgagctgttacccaag

SEQ ID NO: 753150 - DNA, 639 bp, Homo sapiens
cctgcaggtcacaggggcagagctgcccaagatcatgggaatccacttcttgcatcagcatgacctggatgtgagacctggggtccaaggagatcattttgaagctttaagatttaactgccccactggatttcggacttgcatggggcctgtagcccctcgatttaggccattttctcccgtttgtaatggctgtatttacccaatgcctgtatctccattgtatccagggagtaactaacttgcttttgattttacaggctcataggtggacgagacttgccttgtctcagatgagagtttggactgtggacttttgagttaatkctgaaatgatttaagactttgggggactgttgggaagacatgattgattttgaaatgtgaggacatgagatttgagaatggccaggggcagaataatatggtttgactgtgtccccacccaaatctcattttgaattatagctcccataattcccatgtgttgtaggagaaacccactggaagataattgaatcatgggcgcagtttccctcacactgttttgtgatagtgaatagatctcacaagatctgattgttttataaggggaaaaccctttcacttggatctcattatctctcttgtctatcacca

SEQ ID NO: 753151 - DNA, 521 bp, Homo sapiens
aactcaaatgagaagtggtttgggcctggcacagtgtttcacacctgtatttccagcacattgggaggctgagacaggaggatcacttgagcccaggagttcaagaccagcctgggcaacacagtgagagcccatctctattaaaaaaaaaaaaaaaaaaaaaaaaaagagagggagaaatggtatgaatcaggaatctaaatatcagcaaatactaaatagttctgatcctgaaggtagatcagtwtttttagaaaacctgctctgagatcacatgaaccaagttatacagctaaaatcattgtatttatttttcttttttcccctatttcacaacagctggagtttatttttcaaacagtaaagaagaaaattgaaacattctgctacagaaaatacttctctttttttcccttaatataatcaagtagttttcagctttgtggatttttgccagctgtgtttagcagagggtaaatctgaccatgaataaaaaaagaaatacttagaagggtggaatc

SEQ ID NO: 753152 - DNA, 616 bp, Homo sapiens
ctgctgaacatagacccttatcagtagttctcctttttgccctttgaagcatgtgatctactccctgttcttacaccccctccccttatgaaacccttaataaaaaatttgctggtttgaggttcaggtgggcatcacggtcgtagcaatatgtgatgtcacccctggcagcccagctgtaaaattcctctctttgtactctttgtctttatttctcagccggccgacacttacgaaaaatagaaagaacctacgttgaaatattgggggtgggttcgygtgataaatgttttcttgtttttttttttttagatatcttgttattagtctgtggaaaccctactgattgttgtatgttgattttgtgttctgagactttaaaaaattagtttatttgttctgataagtatttttaaaaaatttatagggttttctatgtataagattatgtcatctgcaaacagatcttgagcaaaaaataaataaaacaacaaaaaaccaaccaaacaaaaaaacctggagtcatcacactacttgatcttaaaacctactataagtctagagtaatcaaaacagcatagtactgccataaaaacagacatgcagcccaatggaa

SEQ ID NO: 753153 - DNA, 616 bp, Homo sapiens
ctgctgaacatagacccttatcagtagttctcctttttgccctttgaagcatgtgatctactccctgttcttacaccccctccccttatgaaacccttaataaaaaatttgctggtttgaggttcaggtgggcatcacggtcgtagcaatatgtgatgtcacccctggcagcccagctgtaaaattcctctctttgtactctttgtctttatttctcagccggccgacacttacgaaaaatagaaagaacctacgttgaaatattgggggtgggttcgcgtgataaaygttttcttgtttttttttttttagatatcttgttattagtctgtggaaaccctactgattgttgtatgttgattttgtgttctgagactttaaaaaattagtttatttgttctgataagtatttttaaaaaatttatagggttttctatgtataagattatgtcatctgcaaacagatcttgagcaaaaaataaataaaacaacaaaaaaccaaccaaacaaaaaaacctggagtcatcacactacttgatcttaaaacctactataagtctagagtaatcaaaacagcatagtactgccataaaaacagacatgcagcccaatggaa

SEQ ID NO: 753154 - DNA, 660 bp, Homo sapiens
tcattggcctgctcaaaacactttctcccccttactagtttcatttctgagagcactttgtggtctactgttgatcagcttgggaaacatctttaacaggatcatgtaaactgaaaaggatcccagagtgcttcacaacaaacacatttagctgttgaaagattgacaacatcactgaagtataatttttctgaggcagaaagactgaagtagaagaacacaagacacctaaactacaggccttcctcatcactaccagatccctggaaaaagtttcctatttctgtaaatctcagctttcacatctgcataaagagataattatgtctaacttcaaataatttccatacatataatttctatacacatttaaactggttccgatttttatttttctattttatcctatttattgacctggaagacttcccgtayatggtacagaaaaaaaaatgccttgacaaatttaaactcatgcttaatttagagtttctcaagctaagcactattgacattgtgggctggataactttttgttatggagggctttccagtacactgtaggatctttagcagcatctctggcctatacccattaattgtcagtagcacccctcaaatcatgaaacaaaaaatatctccaggcattgccaaaagatc

SEQ ID NO: 753155 - DNA, 621 bp, Homo sapiens
gtagtttaaaatttttataagaaattattaggttgtgtgtggaatacaactttctctaaaacaaacaaaaggccggacccttattcaagtactgtgtgttgtccttagttccacaacaacacaggaacacagaacttaatgtggattatgtggaaaggccacaccattaaactgtgggcagtaagaactctgaaaacatggagaaaagggtgataattcarttcagggtagagaaggctgagtgtggagtcatttagcagaaaattttgtggatatgaatgtttgatttttttaacacaaggaatgtttgaccagctctcctcatcctctcttaatgcagacaaagagcaaagcagtaaaatggagcctgagggtattaatttcacaataaggaatacaatttgttgatgatgagagtcatttgatgttagaaagtgttgtgaagaaaggctgggaaatcttcccaaaagaattttaagaaagagtcagaagctcatccatctgaaatattctaagagagggctgctgggagcaggagcacagcccttgggaggtctaggccctggcatcgtgtgcgtcatgtgtatatacatacttagttgtgcttgtgttgcacaaata

SEQ ID NO: 753156 - DNA, 636 bp, Homo sapiens
tctgtgtcttttaactggagcatttagcccatttccatttaaggttaatattgttatgtgtgtatttggtcctgtcattatgatgttagctggtgattttgctcgttagttgatgcagtttcttcctagccttgatggtttttacaatttggcatgtttttgcagtggctggtacygtttgttcctttccatgtttagtgtttccttccggagtgttttagggcaggcctggtggtgacaaaatctctcagcgtttgcgtgtctgtaaagtattttatttctccttcacttatgaagcttagtttggctggatatgaaattctgggttgaaaattcttttctttaagaatgttgaatattggcccccactctcttctggcttgtagagcttctgccaagagatcagctattagtctgatgggcttccctttgtgggtaacccgccctttctctcgggctgcccttaacatttgttccttcatttcaactttggtgaatctgacaattatgtgtcttggagttagttgctcttctcgaggagtatctttgttgcgttctctgtatttcctgaatctaaatgttggcttgccttgctagattggggaaattctcctggataatatcctgcagagtgtt

SEQ ID NO: 753157 - DNA, 636 bp, Homo sapiens
tctgtgtcttttaactggagcatttagcccatttccatttaaggttaatattgttatgtgtgtatttggtcctgtcattatgatgttagctggtgattttgctcgttagttgatgcagtttcttcctagccttgatggtttttacaatttggcatgtttttgcagtggctggtactgkttgttcctttccatgtttagtgtttccttccggagtgttttagggcaggcctggtggtgacaaaatctctcagcgtttgcgtgtctgtaaagtattttatttctccttcacttatgaagcttagtttggctggatatgaaattctgggttgaaaattcttttctttaagaatgttgaatattggcccccactctcttctggcttgtagagcttctgccaagagatcagctattagtctgatgggcttccctttgtgggtaacccgccctttctctcgggctgcccttaacatttgttccttcatttcaactttggtgaatctgacaattatgtgtcttggagttagttgctcttctcgaggagtatctttgttgcgttctctgtatttcctgaatctaaatgttggcttgccttgctagattggggaaattctcctggataatatcctgcagagtgtt

SEQ ID NO: 753158 - DNA, 623 bp, Homo sapiens
agcaaaatgctcaaaaaatgtgaaaaatgtagcactaaatagatccccaaaggacacttgtttaaagctaaaacaagaaggcaaagcattgccttgtgaaacctcagctgggaatatgcctgttaggcagctcaaattttatgccactcagaacacatctgagtgtgaccatcaaagcaccatgactatttgttttaggattacaaatatagtgagtgtgcaaattcacaaatatggaatctgaataatgaggaccaactatagactgtatgttgcacccattctcaacaggtttatgaacaggcaccatgctgggtactgatgatataagratgaataatacagaaggagcttaataagaaagacagacattaaactgatagtaacaatgtatactcaatatttaccagtgtatgactaaatgctgagtccctagcatatagtagcgatttaagagtatgtttcaatgtagctgtcatggagcatctccttggaaaaataatgtttaagctcatacctgagaatgagttagccctacagtttaatgaggtgagtgtttttcccaggaaaagaacaagttctagatgctagagagaacagagttaaaggcatggaaagtttag

SEQ ID NO: 753159 - DNA, 513 bp, Homo sapiens
aatatattccatactatgaatgtaccatagtgtgtttaaccattcacctgttgaatgatacacgggttgatttcagtttgaggctattttggatgaaattactatgaacattcatgtttacatttttgtgtaaacataggtttttrtttctctgggacaaaagtgcaagggtataacttctgggacctatttagttgcatacttagttttatgagaacataacaaactgtttatcagagaggctgtaatattttacattctcaccagcaatgcacaggcgatccagtttctctatattcttgcccacatttggtggtggtcctatattttttcatttttgccattctgctagaagtgtagtgatatcttattgtggttttaatttgaatttccctggtggctaatgattttgaaaatcttttgattttgatgtacttatttgccatttgtgtgtcctcttcggtaaaatgtctaatcattttcttcacgcatttcataattttattgcttttt

SEQ ID NO: 753160 - DNA, 600 bp, Homo sapiens
tttattgctttttatagttgttgcctttttttttttttttttttgagaagtagttttgctcttgttgcccaggctggagtgcaatggtgcgatattggctaaccacaacctccatctcccgggttcaagcgattctcctgcctcagcctcctgagtagctgggattacggtgccaaccaccatgcccagctagttttgtatttttagtagagacggagtttatccatgttggtcagtctggtcttgaactctcaacctcaggtgatccacctacctcagcctcccaaaatgctgggatgacaggcrtgagccaccacacctggccattttttggttgttgttagttgcctttcttttcttttctttctttcttcctttcttttttaacttgtttactgcccaggcttcccagatcaggaggcttgctatagctggatcctccttgttgtttctgcccactatatctgagtctttcggtaggggaggagagttttgggcctgcaatcacaaagtggctcctcagaatgaactgctgtatctctcttgcgatttccactcacccacctgggtttctcttggcagaaagagagaatcttcaac

SEQ ID NO: 753161 - DNA, 600 bp, Homo sapiens
tttattgctttttatagttgttgcctttttttttttttttttttgagaagtagttttgctcttgttgcccaggctggagtgcaatggtgcgatattggctaaccacaacctccatctcccgggttcaagcgattctcctgcctcagcctcctgagtagctgggattacggtgccaaccaccatgcccagctagttttgtatttttagtagagacggagtttatccatgttggtcagtctggtcttgaactctcaacctcaggtgatccacctacctcagcctcccaaaatgctgggatgacaggcatgagccaccacacctggccattttttggttgttgttagttgcctttcttttcttttctttctttcttcctttcttttttaacttgtttactgcccaggcttcccagatcaggaggcttgctatagctggatcctccttgttgtttctgcccactatatctgagtctttsggtaggggaggagagttttgggcctgcaatcacaaagtggctcctcagaatgaactgctgtatctctcttgcgatttccactcacccacctgggtttctcttggcagaaagagagaatcttcaac

SEQ ID NO: 753162 - DNA, 590 bp, Homo sapiens
tccttcattgaacagatatttaattctgataaaaaatatgatcagttttcttcttatgctttacagtttaaaggttgtgttgaacaactccttccctgctcctaaatcacaaacatatgctcctgaattatcttctctkactttatactatcacttttcacatgtaggtatttaattaggtatacattgtaaggtactctgtatagagaacaagttttcctaacatcatcaacaatctattctttcccatggatttgtgctgcaacatcaaaatatcattgtgctagcaaaaattaaatgctaaagaggtcgatttttgataaatcattttatgatttgctttctgacacgctgagcaaaaaataatgaaaagtgaattttgtaaaaggaaactttgtatagggaaatttgcataataatttgcataacaatttaagacattcaatactgggatagtagccacaagaaaagtcacctttctgtcactggaagtgtttaagccgaggttgaatgtccacctgatgaatcccatataataagtgtatggttgatgacttgtcctcagttctttcatgtgcaatataagagga

SEQ ID NO: 753163 - DNA, 518 bp, Homo sapiens
ggctaagaaatcattgcactgatcaacttgagaaaaattccaaggactttctctctctccatcatttattgtgataatgccaaaagttgttggtgttttttaatgaatgacattctttggggatattcagattgttccatgtatgtcttggataaatattcatattttccatttaaaggcaaaaaggatgtatcctaggaaataaacagatatatagcaaggttcatagggttgcattttaacctccaattagattgctctgataggagacagttccgtgtsattcagagaagagatcactggaactcaggaatgagactagttccagatttgctactccctagttgcatgactttagacaatcttttaattccatataacctcagtgttctcatctgtgaaataaagaggtgcatccaataaaccttgaagcttcctgtggactctataattccacaaatctaacaagctattgccagaaagataaaattaaccgggcattggaattgtatacaata

SEQ ID NO: 753164 - DNA, 581 bp, Homo sapiens
atgctataccaatcaagctaccattgcctttcttcacagaattgaaaaaaaaaactactttaaattttatatggaactaaaaagaagcccacatagccaagacaatcctaagcaaaaggcacaaagccggaggcatcacgttacttgacttcaaaccatactacaaggctacagtagccaaaacagcatggtactagtatcaaaacagatatagagaacaatggaacagaacagaggcctcagaaatgrcaccacacatctataactatgtgatctttgaaaaacctgacaaaaacaagcaatggggaaagaattccctatttaataaatggtgttgggaaaactggctagccatatgctgaaaagtggaactgaaccccttccttataccttatagaaaaattaactcaagatggattaaagacttaaaccatcaaaaccctagaagaaaacctaggcaataaggacataggcatgggcaaaggcttcatgagtaaaacaccaaaatcaatggtaacaaaagccaaaattgacaaacgggatctaattaaactaaagcacttctgggcagcaaaataacc

SEQ ID NO: 753165 - DNA, 610 bp, Homo sapiens
aagtgtctcaagagaaaagagagagcttacctcctgtaagaacagtttattgagagtgacatgctgttgtcattatctgaaaatcctaaaaacctactttaaaaatacaggaaaataatgaaaaatataacctaaatgaaatacagctgtgcaaagtaacataccatgtcatatattagttgctaataaatatttctcataaatgtccatgaaatacaaagttgcattcaacaacattttcttaaatatatgtgaagtacactttgcaaattgtcaaattccaaaatagggaaaatttctcaaacaatcatttctgagtgaaataattgtatatatgttatggttaagcatcacatgaatgagttgctcttagcttaggaaaatgttcaactttctcatatattgttatcawcattcgaaggtctgaaattacagaactgtagagttacacataataaataggcggaacggcaatcagactatttattctagtatctctgtcaaaggagatatagaggaaaacatagttactagaaggcaattgtgaattcacagggggctaacattctcttcagtgaccaggatgggctaagtttgaaaaacatctgaa

SEQ ID NO: 753166 - DNA, 610 bp, Homo sapiens
aagtgtctcaagagaaaagagagagcttacctcctgtaagaacagtttattgagagtgacatgctgttgtcattatctgaaaatcctaaaaacctactttaaaaatacaggaaaataatgaaaaatataacctaaatgaaatacagctgtgcaaagtaacataccatgtcatatattagttgctaataaatatttctcataaatgtccatgaaatacaaagttgcattcaacaacattttcttaaatatatgtgaagtacactttgcaaattgtcaaattccaaaatagggaaaatttctcaaacaatcatttctgagtgaaataattgtatatatgttatggttaagcatcacatgaatgagttgctcttagcttaggaaaatgttcaactttctcatatattgttatcaacattcgraggtctgaaattacagaactgtagagttacacataataaataggcggaacggcaatcagactatttattctagtatctctgtcaaaggagatatagaggaaaacatagttactagaaggcaattgtgaattcacagggggctaacattctcttcagtgaccaggatgggctaagtttgaaaaacatctgaa

SEQ ID NO: 753167 - DNA, 610 bp, Homo sapiens
aagtgtctcaagagaaaagagagagcttacctcctgtaagaacagtttattgagagtgacatgctgttgtcattatctgaaaatcctaaaaacctactttaaaaatacaggaaaataatgaaaaatataacctaaatgaaatacagctgtgcaaagtaacataccatgtcatatattagttgctaataaatatttctcataaatgtccatgaaatacaaagttgcattcaacaacattttcttaaatatatgtgaagtacactttgcaaattgtcaaattccaaaatagggaaaatttctcaaacaatcatttctgagtgaaataattgtatatatgttatggttaagcatcacatgaatgagttgctcttagcttaggaaaatgttcaactttctcatatattgttatcaacattcgaaggtctgaaattacagaactgtagagttacacataataaataggcrgaacggcaatcagactatttattctagtatctctgtcaaaggagatatagaggaaaacatagttactagaaggcaattgtgaattcacagggggctaacattctcttcagtgaccaggatgggctaagtttgaaaaacatctgaa

SEQ ID NO: 753168 - DNA, 502 bp, Homo sapiens
tatttctctactcagctttcattgtaacttttagggtgattaccactgacatatactgattcctaatactggatattcagtcagagtcacagcttattgagtttaaagagttccccatagatccagagatagcatataaaactgagttatgcattgcttcttaagttcttgggtatagcttcagtgaataaaaatattgaataaacctgcaacatttaagtagcactgtttcacatcaaaggtgacaaggagtagatcaaacaagaatgccttcaacatggatgcagctggacgttattatcctaagtgaattaatgcagaaacagaaaaccaaataccaygtgttctcacttaaaagttggagctaaacaactgctacacatggacataaaaatagaaataattgacactgggtactccaaaaggaggaagggagagagagagaggcaagggttgaaaaactacccattggatagtattttcacttattgggtgacggatt

SEQ ID NO: 753169 - DNA, 605 bp, Homo sapiens
accctatgcatggcagtaggaaaatgtgaatcactaaaacacattattttgaccccagacatctactcagtcaagctattttctattttaataagcacttgtactctcaggtattactggcaagtaaaacagagtaacctgcatttatggctcaatttgaggaagagagaaatcaccctactgtggataaatatgatactatcttggatagaacctttattttggatggtcttaggccaaaaayagattttcccagatcagagcagccactgaaggattaaagtagattaactagttaggatgtagagccttttttgtgtatttttttcttttcagaatgttagatgccgagtatcaagtagaacaggtatggcaccctctaaaagaagatttagcaagtcatgaattatgatcaaaaaatactcctaaagaatcttgacacactattattactatgcctactaagttacattttcattgtttatatttctttgtttctcctatatgctactatacattttctgtatgcttaacaatgttatcaagtccacaaagatttctcaacaaatattaagtaaatgaattaatcaacatatcttccatag

SEQ ID NO: 753170 - DNA, 629 bp, Homo sapiens
tctcctttcttccttcatggctcctgacatggtttcttagatgctccacttgaagagtcagtatttatgtgccagtttgcttcttttccatgagaatggtgcacactacctgcttctagtcagccatcttgaccaaaaatacttttttaaatatataataaagaggttcttatccagacactcaaatacatataatttagaaaatataaaagtcaaaaggattgtccttaatcattagtattcatgaaactctagagctggagatagttatatttgttatctattgctgtgtaacaaatgatcyctaactttatcagtttagaaatgtgaaaggaaattaaatctttggacctcaaactcattaagccaaagggaaaagtcaaggtgagaactggggacatgcaaactgcctccccctttttggttcctaaatgaaatggctacaagatgaaaatctgtatgcctgccccatattggtccataagagaatacctagtgagctgcaagatctttactctaagttgtttctattaaaatttcaccatgacaatgtaaattgatagcttatctttatagatgcagtcacccccagcccaccagacgcaaatgaatatatgattgttctcctt

SEQ ID NO: 753171 - DNA, 590 bp, Homo sapiens
ctggcaacaacactctggggtgctgcaaaaccctacttgggagtgactgccttgctggtcaacaggaagccacagccaagactctgtgcccagtggggcctgcaccactctgtcatgacttgagtgggggcagtaagaggtggaaggggccagaggctgcctcttcactttcacccccatggatttccatggatccaaaggcctgcttggggttcttcatgggcatagaagtcacttgcttgggagcccaagacaaaccctgctcatgggtgagcagctgggtccctgggagacgaggctggttctttttccttsgggataattttaggttctgaattcccctgcaaccttcctaactcccagcccccagctcagcctcccagagggattgttcataccagtgactataaagtgttctctcgaaatatagagctgttcagagacctgccagggcatagccctggaggcattttccatgataatttttccccctttgtcccattgtttcagaggaggaagcatgatagctcaagaatcaggtcctgatagtccctgataaggtgtcacatcttcctgcctctccacttgaa

SEQ ID NO: 753172 - DNA, 627 bp, Homo sapiens
gatttttgacttcaatccctggatcccatacagcatctctggtcaggcccagggcctcaggtaactcatgaagggaagggccttgggcaaggcccagtgttttgctggcttcaggtctgacctagcacacttccagtggtggtggccacaaaggtaattgcatcaccatacccccagtaccaggtggctcagcacaaagagaaagactctatttgtttggaagaaaataagggaaaataacaagagtctctgcctggtaatcagagaattcctccaggtcttatccaagaccactaaggcagtacctctacaagtctgcaaaaaccagagcgttattgggcatgggggccaagtccctttgaatacctggaaagccttcccaaggaggacaggtacaaacaagcccagactgtgaagactamaataaatacctaactcttcaatgcccagacactgactaacatctacaagcatcaacaccattcaggaaaacatgacctcaccaaatgaactaaatagatcatcaggaaccaatcctggaaaaacagacatatataacctttcagacagataattcaaaatagttgtgttgaggtaactcaaagaaattcaagataacacagagaa

SEQ ID NO: 753173 - DNA, 575 bp, Homo sapiens
gtttgcaaatattttctccctttctgtaggttgtcttttcactctgttaatagtttcctttgctgtgcaaaaacttttcagtttgatataatccatttgtctatttttgcttttgttgcctgtatttaagaggtgttatttaaaaaatctttgccaagcccaatgtggtgaagtattccccttatgttttcttctagtagtttcatagttttgcatcttacatttaagtcttgaattcattttgagttggtttttgtatattgcaagagggaggggtgtaatctcattcttctacatgtggatattttattttcccagaaccatttattgaaaagactgtattttctccaatgtgtggtcttggcacytttgtcaaaactcagaaatatttgaaatgaagcatttaaatcttcttttccttctggaaatcctttgaaattaggtagatggaaaaatagaggaacagtcacgtatgccaattgccaagtgagacacaagtattgagtggatatcagtggaatcttttttctaagaatgaatcattctcctatgaccataaaattgtgtgcattgta

SEQ ID NO: 753174 - DNA, 552 bp, Homo sapiens
cacttattttatcccatcagtcttgatagatagtctagatagaatgaacctaaagcttgaatatgttcaattaagggaactaagtaagataaagttaatattaagctctgcccagagtttgcacttaccgtgtaagatgatagagagatggatagataaggggcaacamaaaaatccacatggcacttggcttacaatgtaatggttgattttctgctaaaatgacaatagcttctggtcagttttcatctagggtgaaattgtttagattttatataaaatattttctgaaatacctgtgcctactaactgtctgctccagttgcacattttgctagctatcactccctaaaagtcatttcatttcagaattgtttaattaatgctaaatcaagcagctagtatttttggtgtgacacagaggtgatgaattcctcaagggtcttgcctgactgacagctgtcaactagaaatggatgcatagaatgaacaatttggcagcatgcattttagcccttagattgcacttaatatttttaacgtatggttgtt

SEQ ID NO: 753175 - DNA, 637 bp, Homo sapiens
atatatacatatatatatatatttttttttttttggagcgggggagatggagtctcactcttgtcacctagtctggagtgcagtggcatgatcttggctgattgcaacctttgcctcctgggttcaagcgattctccagcctcagccacctgagtagctgggattacagrcgcccaccaccacgcccggctaacttctgtatttttagtagagacggggtttcgccatgttggccaggctggtcttgaactcctgacctcaaatgatcctcctgcctcggcctcccaaagtgctgggattacaggcgtgagccaccatgcctggccaactatatgttttaatcaatggaataactcatataattatatggcctcttagttcaagtggatactcaatcctctaacaaaaaaattatttaaaatctcaacagctttttgtttttttaagtgtgaatcttactattaaagaatgtatcagattatctgctgtttcatttgtagctaatcatgtgggtaacattttggttcaactgagcaccctgtctaaatgtagacctaggactgcatttggaaacaggagctaaggagacagagctgtgtccatctgcataggaactcaatgagaacttgagttcctg

SEQ ID NO: 753176 - DNA, 637 bp, Homo sapiens
atatatacatatatatatatatttttttttttttggagcgggggagatggagtctcactcttgtcacctagtctggagtgcagtggcatgatcttggctgattgcaacctttgcctcctgggttcaagcgattctccagcctcagccacctgagtagctgggattacagacgcccaccaccacgcccggctaacttytgtatttttagtagagacggggtttcgccatgttggccaggctggtcttgaactcctgacctcaaatgatcctcctgcctcggcctcccaaagtgctgggattacaggcgtgagccaccatgcctggccaactatatgttttaatcaatggaataactcatataattatatggcctcttagttcaagtggatactcaatcctctaacaaaaaaattatttaaaatctcaacagctttttgtttttttaagtgtgaatcttactattaaagaatgtatcagattatctgctgtttcatttgtagctaatcatgtgggtaacattttggttcaactgagcaccctgtctaaatgtagacctaggactgcatttggaaacaggagctaaggagacagagctgtgtccatctgcataggaactcaatgagaacttgagttcctg

SEQ ID NO: 753177 - DNA, 614 bp, Homo sapiens
gtttcatctctgagggagaaaatggggtcttctttaaatacaggttcagctgttacaaacaacttgaatggctgaaaaaaatggttttaattttttaaattacatggctatgtgaacaaaatttatttgatggtagctataaacaaagtaatcatcatctgaaatcattaataaggaatttactatagccattgagaacataagacctaataacaaaatgttatgttcatggaagcaaatatgagttttttattaaaaaccttggaagattcyatttgtaaattttaatcatgttcaattggtaacaactaaaaagtatatatcatataaaataaatgtaataaaatttttcactaagcaccacggagattcctccagatccccccatttactccagtgtattgtatgattgtaattttatggttttctatttatttcactatgttaaatataaaattgtcatgaagaactactcttgagaaggttagaaatgcacatttctttggggtcagagagacacaaatcttgtagctctaattccatatgtcccccttatatcccaacattatcttaacattatatcccagtgggctggcattattatgaaggatatt

SEQ ID NO: 753178 - DNA, 557 bp, Homo sapiens
ttgtgtggtttatagaataaatacatatacatatgaaaattataataaatggacctatggagtcgcaaagtttctccatttttcatggagtcatacaatattaactctaagtagactgagaagttaagaatgtgtattgtaactccatgagcaaccattgaaactaatgcaaaaaactctgaaaatctaataaataaaatatagtttaaaratattcaattaatctaaaaggaagcaagaaaggtggaatataggagcaaagaagcagaggggacaacagaaaacagatagtaaaatggtagacctaattgtaaacatgccagtaattctattagctgttgttggactaaacaccccaattaaaagatagagattgtcagaatgaattttttaaacacccaaacatgttatctcaagaagatgcaggctgggcacagtggctcatgctggtaatcttagcactttgggagaccgaggcggaaggatcacttgagcttaggagctcgagaccaggctgggcaacatagtgagacctagtctctaaaaaataaaaataa

SEQ ID NO: 753179 - DNA, 550 bp, Homo sapiens
aaaaaaccaatggtacaagtagggggtagggaggacttggtttaacagcaacccatatgcaaagtatttgaaaagtttgaaaattgtagaggttggaaaaaagttactcaaaaatttttaacaatgcacatctccaccagctttagaacttttgaccgagtaatctactcttagaataygcttctaagtaaataatagatttttatagagatgtatatataaaagtattaaattagtgcagcattaaagcagtagaaaatggaaataaccttaattttcaataatacaaatattcaatggaatattatgcatttattaaatgtcatatttgcaaagaacatttaatgacataacatgatcttttcactttacagtgctgtctttccaactaaagtggtgcctctaatgacaacattttaggtttcatggagcaactgtggggaaagttagggggtaaatcacatcagtcaggaaatcactttctttgcctctgtatgagatcattccctaaagtatcctcatgtccctgaaggaagttaggacaaggaaa

SEQ ID NO: 753180 - DNA, 586 bp, Homo sapiens
cctccctaccgcaacccctccaacccactcctccagagcagtcagtgatttaagtgaaattactcattgtaccccgatttctactccccagtggcttcttactgaggagactacatagtaagtattggcttacccagccctatacacagccagctttgcaggtgtgcaacctgtatagccatgctcagaarggccccttggtttaatgctctgctgtcactgtcctggaattcttaaaaatatttgaacaaaggggcctgcattttcattttgcactgggcactatgaatcatgtagctgggtctgtctacacactagtgtgaaagttggcatttttttcactctctatctagctccatctggtccagtgacactggtcttcttgctgttcttcaaacacaccaggcttatgccctcagcagggcctttttccttgctattgtttcatcccaaaatgttattcctcaaggtgtgtgtatagttcccttcttcccatcattcaggaattggcccaagggccactgcctcagagaggacttctctgatcaccccagtgaagaaagcccatttgtatgcccagttactc

SEQ ID NO: 753181 - DNA, 586 bp, Homo sapiens
cctccctaccgcaacccctccaacccactcctccagagcagtcagtgatttaagtgaaattactcattgtaccccgatttctactccccagtggcttcttactgaggagactacatagtaagtattggcttacccagccctatacacagccagctttgcaggtgtgcaacctgtatagccatgctcagaagggccccttggtttaatgctctgctgtcactgtcctggaattcttaaaaatatttgaacaaaggggcctgcattttcattttgcactgggcactatgartcatgtagctgggtctgtctacacactagtgtgaaagttggcatttttttcactctctatctagctccatctggtccagtgacactggtcttcttgctgttcttcaaacacaccaggcttatgccctcagcagggcctttttccttgctattgtttcatcccaaaatgttattcctcaaggtgtgtgtatagttcccttcttcccatcattcaggaattggcccaagggccactgcctcagagaggacttctctgatcaccccagtgaagaaagcccatttgtatgcccagttactc

SEQ ID NO: 753182 - DNA, 586 bp, Homo sapiens
cctccctaccgcaacccctccaacccactcctccagagcagtcagtgatttaagtgaaattactcattgtaccccgatttctactccccagtggcttcttactgaggagactacatagtaagtattggcttacccagccctatacacagccagctttgcaggtgtgcaacctgtatagccatgctcagaagggccccttggtttaatgctctgctgtcactgtcctggaattcttaaaaatatttgaacaaaggggcctgcattttcattttgcactgggcactatgaatcatgtagctgggtctgtctacacactagtgtgaaagttggcatttttttcactctctatctagctccatctggtccagtgacactggtctycttgctgttcttcaaacacaccaggcttatgccctcagcagggcctttttccttgctattgtttcatcccaaaatgttattcctcaaggtgtgtgtatagttcccttcttcccatcattcaggaattggcccaagggccactgcctcagagaggacttctctgatcaccccagtgaagaaagcccatttgtatgcccagttactc

SEQ ID NO: 753183 - DNA, 586 bp, Homo sapiens
cctccctaccgcaacccctccaacccactcctccagagcagtcagtgatttaagtgaaattactcattgtaccccgatttctactccccagtggcttcttactgaggagactacatagtaagtattggcttacccagccctatacacagccagctttgcaggtgtgcaacctgtatagccatgctcagaagggccccttggtttaatgctctgctgtcactgtcctggaattcttaaaaatatttgaacaaaggggcctgcattttcattttgcactgggcactatgaatcatgtagctgggtctgtctacacactagtgtgaaagttggcatttttttcactctctatctagctccatctggtccagtgacactggtcttcttgctgttcttcaaacacaccaggcttatgccctcagcagggcctttttccttgytattgtttcatcccaaaatgttattcctcaaggtgtgtgtatagttcccttcttcccatcattcaggaattggcccaagggccactgcctcagagaggacttctctgatcaccccagtgaagaaagcccatttgtatgcccagttactc

SEQ ID NO: 753184 - DNA, 585 bp, Homo sapiens
tttagagagcccaaatgccaagtaatgctcacacctgcatgagccaggacagtgatgcacaatgactggcattcattttcatcttggttacactttccagtttgtcctgaaaaaattcttactggctttgggccagtgccatggcttatatctgtaatcccagcactttgggaggctgaggcagaccaatttgagtccaggaattggagaccagcctagcaacatggcaaaacsctgtgtctacaaaaaaaaaaaaaaaaaaaaaaaatttagccgagtgtggtggtacgtacctgtagtgccagctacttaggaggctgaggtgggaggaacgcttgagcccaggaggtcaaggctgcagtgagccatcatcgtgccactgcattctagctagggcaacagaatgagaccttgtctcaaaaggaaaaaaaaaaagaaaaaagaaaaaatacttactggttttttacctcttacttggctgtaggaactatgctaagtgtttgatgtttattatctaatcctaccaaccaaagacgtgcactaaatatttaatgtatagtatcatacataactttcttcacaaca

SEQ ID NO: 753185 - DNA, 619 bp, Homo sapiens
actttagaaaatgcataaccaccatttgaaattcacaagtcatcatcctagcaaacagaatagtacacagtatgtcttctttttttttcttactatttttttgagacaagttcttactctggctctatcacccagagtggagtgaagtagcgcagccatagctcactgtaacctcaaactcctgagctcaaaggatcttcctcccttaggtagtagctaggactataggtacacaccaccacacctggctaattaatttaaaaaaaattttttttagagatgggatatctctatgttgcccagactggtctcaaactcctggcctccagcaatcctcccacctcacctcccaaagccctgggactgcaagcatgagccaccatgcccagctatattttctgtaaattgctaatgagaatgaaacatgtatgctgtggacagaagccttgttggacctagmgcccatgctgggtcctttgccttaataaaacataactctggcattacatatataattaacagcctcaaagaacatgtttctttattaaactctgactgtttcagcattattttcagtacatttagatttaagtttggttttgattttttttaacttaag

SEQ ID NO: 753186 - DNA, 589 bp, Homo sapiens
agcacccaaaattactgcagcttcacagacatcacacacttaaaaaaagactcctggcttcctttcaaattccatcagtcaacttttatcaaccataggggaagcagaggaggataaacactgcctgcgataccatttgggttttaggttttgggtttcttccagttaagtttgcaaaagtgtgaaagtactaaagaacagaatattgttcctcattcttactatacaataaatacttccaaatatgtccttaaatgcaatcctttgtgattcccttaattaatcttgactaatccttgaaggaaccatgatagcaaaaatttagtgtctagcataaccttactacagtttccctttttaagttctcatttgaatttgataagttaatatktactttaaaaaaatccacatcatttctattcaatggcacttgaacttttaaaaaatgtttcaaagaaattaaagctagatatgattggaaataagcaaaacgagaaagagttgtcctatgtgtatgtagcacaaccctccctgtgtcctttaataaaaagcaggactctggtcattccatgatgtcactggcattccg

SEQ ID NO: 753187 - DNA, 624 bp, Homo sapiens
gcaacccacttgccgtgcagacatgtcagaacacagatctgtagtatctatattcatcactgccaggcgtattaaaatagaggcagaatgtcagtggcaggagttggcatgtgtacgaaatgtttaagcgccctacatgattctgatctgccccactaggtcaaaaatcactcayctattcccatcacggtagttcactcagcggttcactgtctcacttagtgcttaattgcgggatgttttcataggtccactggcacctaactaggttcagactgttttaagtctctcccaatctacaaatggttatctcctgcctattcataggcacctgcacaccagcagcctaatgacagtggcctaaactagttaaactagttgattcttcataactgtttgcttttgatcaaaaagggcagcaagaaaagggccagtggttccactgggaggaaagccatgtgggacaaattaggtgccgctgcaagatttaaaagctcgggggtggggatggggggggaagcagagctaactagaggcagctgttaggatgtggtttctgtgtttatattcttctccttccccctaatgcctcttatgggtattaggaaggaaagcatatatatg

SEQ ID NO: 753188 - DNA, 625 bp, Homo sapiens
agatacagcacagttgcgatctccctgcgtcaaacttcaggattcaactcatcaactctgataagggatgttggatggtttgggtagttgaatatatgtcacacattatttttattactgactaattgtaacttcagtgtggttttccagatataaatatttaaagccatgtctgaaaacaaaacagaaaaaaaaatccttttaataaaatctttagagtcatgtttgaaagtaaaaaagaaaacttctgtgtcctcttcaaaagtttacacaatgtaaatatgtatgtattagttcctcttaactgaaaaaacaaagttggagggttggggagaagtaaatyataagtttttaaaaaagaagttttaaaggctgatagattaatgaagttgaaaatgacctcccagaagacaacaatcccctcatttcacagatgaggaaacacgacttgaccaaggttaagtgacttgcccaaggtcaaacagttaaatagtgtcaaggccttaccacatctcggatcttctaagtgagatgctctcgcctaagagatcgactaattcaatcaccttgtaaagatgaaaaacagagtcccagagcaatcgatgacttgattaaggtaaacatc

SEQ ID NO: 753189 - DNA, 634 bp, Homo sapiens
aaacataaacaagaaaaaaaatctgagccccaaagagattacaagacttgcccaagcttacaccgaaatattcgaagttaagcctaaaactcaagttttaacccccactcccggcaactgtactacataatgccacacagattatactgttttttttttgttgtttattttttgtttttaagtaaytcgctttttttcctttgccttttgcattttacactgaacaataatttcctagctttcaggaaatagtaatttttaaatgcttaccacctgattatattcattaaagatttccaaaatagtccctagtctagcaaagtagaaatcacaccattattatattattacagagctgaagaaagagaatatatttctcttccaaaacttctatgagagtcaatataattcctattatactttctctgctattttattatccttttctttattagaggtttagatttgaagccactcaagaaaaaggataggaatggaaagagatttaaattgctctttgtccatattaaggccaaagctttagcagataagggcaaagggaaggttaagacacaatggtcaaatgctgtgacctaattacgtctggacttacttattttcttgtcctttcatt

SEQ ID NO: 753190 - DNA, 545 bp, Homo sapiens
gtggtgcagggagactcactaaccacaagaggtcctgcccggggctcctcctttacccccctccttttggggcaggctggagggagggtcaggtaatggtgctcacacaaagtctgcctagaagtccagaggtggggggtactctgggcctcagcagtcaggactgacaaccctttaacccctgatgccccagaaaatgccctcccttaaaatgtctgagtaccatgcttctttggcatcagggaggggaggggagtgtggtgtcctctaagtctgctccctgcttggctgggttgtttgcagctccttggtcactgagtccttgtctkcaggggttggcctcaggctccaggttgggtcacggttctaagaccgggtgtgggggatcaggcttatattccatgctagggttctggtgttggtgcgtggggttggggtgggactgcagaagtgccttttaagattatgtgattgactgatctgtcattggttccctgccatctttatcttttggattcccctcggaggagggggaggaaggagtt

SEQ ID NO: 753191 - DNA, 545 bp, Homo sapiens
gtggtgcagggagactcactaaccacaagaggtcctgcccggggctcctcctttacccccctccttttggggcaggctggagggagggtcaggtaatggtgctcacacaaagtctgcctagaagtccagaggtggggggtactctgggcctcagcagtcaggactgacaaccctttaacccctgatgccccagaaaatgccctcccttaaaatgtctgagtaccatgcttctttggcatcagggaggggaggggagtgtggtgtcctctaagtctgctccctgcttggctgggttgtttgcagctccttggtcactgagtccttgtctgcaggggttggcctcaggctccaggttgggtcacggttctaagaccgggtgtgggggatcargcttatattccatgctagggttctggtgttggtgcgtggggttggggtgggactgcagaagtgccttttaagattatgtgattgactgatctgtcattggttccctgccatctttatcttttggattcccctcggaggagggggaggaaggagtt

SEQ ID NO: 753192 - DNA, 561 bp, Homo sapiens
ttcttttgggttttattgaatgaaatgaaagggaaagtagagctgttcctatgtcccgggctccggagcttctattcctgatccctgcataagaaggagacatggtggtggtggtggtgggtgggggtggtggggcacagaggaagccgrtactgggctctgcaccccattcccgctcccagatccctctggacacagcatttttctccagtgagcacagcctccccttgccccacagccaacagcaacatgcctcccaacaaaagcatctgtccctcagccaaaacccctgttgcctctctctggggaaattgtagggctgggccagggtggggggaccattctctgcagggagattaggagtgtctgtcaggggcgggtggagcggggtggggccctggcttactcacatccttgagagtcctttgctggcagatttggggagcccacagctcagatgtctgtctcagcattgtcttccaagctcctaggccacagtagtggggggctcccttctctggcttcttctttggtgacagtcaaagtggggttgggggtgac

SEQ ID NO: 753193 - DNA, 589 bp, Homo sapiens
cacacacatatgcacaatcttacctgacacttcaggatttggccatccacataatataatttaagcatccttgatacagaagaagcaggtgtgtgtggttgtgaattcggaaagggcaaatagtgagttctatttgtataatattcatcttctatatcctatgactagcacagtggtctgacaagagtagattttctgtaaatgttgaatcaataaaagaataattgaaaactaaagtataaagaataagtggaagacaactgagaagccctgattgtctattacatagagaaataaccaaatcctcccttaaaaaacactcacacaatataaaataggtaatctgtgaagctctactgatactctgttagcactgcyggcttactccaggggccaggaggaattaacatagtttcacatagtgactgatttacagcaaagaaagaaattgtgcctggaatctatgagtctttagagagcacagcttttacgtggttgcgctgagtgatgtgtcaatccttgactcattcacaagtaacattctcatttactaggcaatgacatcacagctgttttctgcaaaccacag

SEQ ID NO: 753194 - DNA, 669 bp, Homo sapiens
aggagctgcttttttgagaaaattaataaaagagacagaccactagctagactaataaagaagaacagagagaaaaatcaaacagacacaataaaaaatgataaggaggatattgccactgaccccacagaaatacaaacaatcattaaagaatactataaatacctctatgcacataaactagaaaatctggaagatatagatacatttctggacaaatacacctcccaaractaaaccaggaagaaactgaatccctgaatagaccaataacaagttcagaaattgaggcagtaataagtagcctaccaaccaaaaaaaccccaggaccagatggattcacagctgaattctaccagaggtacaaagaagagctggtaccacttctactgacactattccaaacagctgaaaaggagagacacctccctactcattttatgaggccagcatcatcctcataccagagatacaacagagatacaacaaaaaaaagaaaacctcaggccaatatccctgatgaacagtgatgcaaagatcctcaataaaatactggcaaaccgaatacagcagcacatcaaaaagcttatccactacaatcaagttggtgccatcccaaggatgcaaggttggttcaacatacacaaatcaataaatgtaattcatcac

SEQ ID NO: 753195 - DNA, 669 bp, Homo sapiens
aggagctgcttttttgagaaaattaataaaagagacagaccactagctagactaataaagaagaacagagagaaaaatcaaacagacacaataaaaaatgataaggaggatattgccactgaccccacagaaatacaaacaatcattaaagaatactataaatacctctatgcacataaactagaaaatctggaagatatagatacatttctggacaaatacacctcccaagactaaaccaggaagaaactgaatccctgaatagaccaataacaagttcagaaattgaggcagtaataagtagcctaccaaccaaaaaaaccccaggaccagatggattcacagctgaattctaccagaggtacaaagaagagctggtaccacttctactgacactattccaaacagctgaaaaggagagacacctccctactcattttatgagrccagcatcatcctcataccagagatacaacagagatacaacaaaaaaaagaaaacctcaggccaatatccctgatgaacagtgatgcaaagatcctcaataaaatactggcaaaccgaatacagcagcacatcaaaaagcttatccactacaatcaagttggtgccatcccaaggatgcaaggttggttcaacatacacaaatcaataaatgtaattcatcac

SEQ ID NO: 753196 - DNA, 609 bp, Homo sapiens
catagtattctagtaaatgtatattttatgatttatttaatcaactccctattactgaacatttagtttctgatatatttattcattttcttcaatataagtttttaattgtgtgatcttaaaaatgaagtttttcttagtcctacagggctaagttgatggatgaagctgagatgtttagagggcttggtgttattaagactgatctaaaactgggtaggatacattgaattgttctattctgggtgtaatgacatgctcttttgactaggctagagaatgatgacaaaatatcaactgacagataatatgagaggctagaggagagaatattcaatagtttttcttttcaattttcctttattgtgcgtccctatgtgcctggctttgggttgagctgccttttcctattatyattgttttacttacccctaaaattagcccaaagatcttagtgggtagttaattctttaagatggattaaaaacatcagtctcattctctagtggcatcttgtctctactgttcacttgtcttttgattctgacacaaccatctaaccccattcttcagacatgggtgctgacatccaacagaggctcggcttgt

SEQ ID NO: 753197 - DNA, 631 bp, Homo sapiens
cctgagctaaagatacaggagctaaagatacaagagtacaagaacatgtacttctcatggaggaccagtggggtgcaaggagcaagccaaactatacaagcacacttaaaacttctagcataatatccactcacattccagagacgaacaccagtcatatgactaaaccaatcccaggcagagaagtatcctctgctcaaggagccaggattcaattaaaggaacaaccactgsaagatgtatatgattaatgtattaccatacagtcatgcatcgcttagccacagggatatgttctgagatatgtgtcattaggtgattttatcgttgtgcaaacatcagagtgaacttacacaaacctatatggtatagcctactacacatctaggctatagggtatagcctattgctcctaggatacaaacatgtacagcagttactggactaaatactgtaggcaactgtaacacaatggtatttgtctatctaaatatagagaagggacagtaaaaatgtgaaattacaatcttacaggaccaccatcatatgtgtggtcatttgttgattgaaatgttatgcagcatctgaatgtatatattaatataggtgtatcctaacaaataaattaaaa

SEQ ID NO: 753198 - DNA, 633 bp, Homo sapiens
ggatgttttagttgacaaggaaaggactgccaggatatgacaaatatttggaactcctcctaaatagagaaggtctggaagagaggaattctttcaggttcattcagtgacccctgtcagggatcgctgtcagttggaagagggcatggagcagagaggttaggaagtccagctctggagtctgtcttcatgagttcaaatatagccaccaacatgcattagctctgtgaccttgagtaggttgtctatccattctctgtctcagcgtcctcatttataagatgggatcatggtttcctcctgaaaggtctgtggagaggacaaaatgagataatatacctgtgaccagtttgctagtgagctgggctgggcagggtgcttgcagaatgcactgaattcttcctttccaaaccgaccctctttcatcttcctcctcatcctagacaaaaccccccagactatccactagatgacagtaccccagytgtgacaatgaaaatgtcccctagggggcagaatttcccctggttgaaaaatcactgaattaagactgtcccagataagatgaccaaaattttcagtgttttccaaattgcaggagacactttaagctccctgcattcttggtttaaa

SEQ ID NO: 753199 - DNA, 592 bp, Homo sapiens
agaaaggtgcatccaccgtgttttcatggtcaaagtatgtttcccatttggccttgaagtaaacagcattcaccagtaccagcacagtctcagcattaatagcgtccttgctgaagagttccttgattttacctaaaaaaagatcccagagaatatcctgagtatgaattgtatcaaaagcatttgtgtagataattttttttttttttttttgagacagagtttcgctcttgtctcccaggctggagtgcaatggcgtgatccctgctcactgcaacctctgccttctgggttcaagcgattctcctgcctcagccgccagagtaactgggattacaggcrcccgccaccatgcctggctaattttttattttcagtagagaaggggtttcgccatgttggccaggctggtcttgagctcctgacctcaggtgatctgcccgcctcggcctcccaaagtgctgggattacaggcatgagccaccgtgcctggccaataattctttttaatgcagtttatcacccccaagactagggagtgtctcattcaagaactaacccaagaagattaattcacagtcctggctggagg

SEQ ID NO: 753200 - DNA, 565 bp, Homo sapiens
tagaaaactatctgcctgtaagcatcaatattttctttaattcattcaactgaccaatatttatggagcattgacttgttatgtcacatgacagagaatattaaaaaatgaaagtcaatagagagaaagcattcattacatgggccaagaaactaacttgggcctcctttagggggtacagaacttatatgtgaacaactcccactgctttgcttgatagatctggctaaagtagattagcccctcctttgtcttctatcctgtacagaaaggaattaacaaagtctaaaatattgtgttggactcgacggcatcattttggacattctgscttaaaataattgctctttcccccaccccgtttttttaaaaaaatgagaaaagccatatgtttcttgtgaaaagttgggaaaaaatatttctaatcgccatggtcacaccgtccaaaaagcaaccaccgctaacatttgtgtatctctttccaggcttttacccagccatttttagggagttatgccttaataaaaatgtattacattgaacataaaatgttatagcttgctct

SEQ ID NO: 753201 - DNA, 566 bp, Homo sapiens
cctgtaatcccagctacccaggaggctgaggcaggagaatcaattgaatctgggaggcagaggttgcagtaagccaagatcactcctgcactccagcctgggtgacagagcaggactccatctcaaaaaaaaaaaaaaaaagamaaaaagaaaaaaagaaaggtgaagagtacttgccctgacacaaaatggcaatggctgtagaatactacaaaatggccacagaatactacacagtgaaacatctgcttgttcatccttaacgtccaatgcaataactccctatcttgtctgtgcattggatcacctgagtagcttccaaaactaccgatgcctgtgtgtcctccattacccacccaacccccagctcaccccagctccccacctacccccactcccatgtccagggattattatttaatccattttgtgagtggcctgagtttaaaaattaatgaaagatatccggaggatgctaaagcatgtctgaaaagtgtgggaaccattgctttaatgtgaggtcctcagaaattacttctccttgtaggcagtctattgccattgcc

SEQ ID NO: 753202 - DNA, 581 bp, Homo sapiens
cattttgttatagcagaaggaatggcctgagcctgtcacttaatatcactgagcctctctttcctcaaaataagaatccctcacacatttatacggctgagttgatgttcatatgaactaataaatggaaataagtgccatttgtaattttaaaacattctgccagcgtaagatgtgataatgtacatacctacaacataacatcatcattccactttttttctggcctggagcacctcaatccctaggttggctttaattaatttcaggtgtatgattaaaatrttaatgatgccctcattcatctctgggcacttaattgtcctacaatgtctcggataccagttgtgctctgcactctcaagatcagcagggcttcgtaaagagagcctgtctttatcacattaagaaatccccactccagcaaaagataaactgaaggattgatcattattgttgcaaatcaattccagagaaatctttaatatgaagctctgctgatgcatagagaatggttccaattgcaaaacttcagatgaacatgtgacttgctgagaacctgactattgtttgaaatcagg

SEQ ID NO: 753203 - DNA, 581 bp, Homo sapiens
cattttgttatagcagaaggaatggcctgagcctgtcacttaatatcactgagcctctctttcctcaaaataagaatccctcacacatttatacggctgagttgatgttcatatgaactaataaatggaaataagtgccatttgtaattttaaaacattctgccagcgtaagatgtgataatgtacatacctacaacataacatcatcattccactttttttctggcctggagcacctcaatccctaggttggctttaattaatttcaggtgtatgattaaaatattaatgatgccctcattcatctctgggcacttaattgtcctacaakgtctcggataccagttgtgctctgcactctcaagatcagcagggcttcgtaaagagagcctgtctttatcacattaagaaatccccactccagcaaaagataaactgaaggattgatcattattgttgcaaatcaattccagagaaatctttaatatgaagctctgctgatgcatagagaatggttccaattgcaaaacttcagatgaacatgtgacttgctgagaacctgactattgtttgaaatcagg

SEQ ID NO: 753204 - DNA, 504 bp, Homo sapiens
tgcaacttaaaccttcatgaataacaccattccagggtcaaggggtctcccaatttgagataagattttgtggtgtttgaatctgtttttcctttcccaaatcacttattttccctctgcttcaaattctccagttatggatggtcccaggctgattatcaatgtcttcttccttttgactttatgacttggactcccagcgcctccaatatgtcttcctgtttctggtcctagaggacatggaattggtcccagtccattgcatattttgtttttaagtcatgcactgttaatatttgagataatctctcagtacctctgttcctgctgcccatataacaaatatctgtgtgttgtcctattggcccrtgttgtgcctcatgctgagtgactcaagagccagagaaaagtggctatgtaaattggcctggatgtccaggcaccaaaactagaaaaggaaaggacaagcaggcctgaacaaaatcaggagatggattgatgaag

SEQ ID NO: 753205 - DNA, 611 bp, Homo sapiens
tgcaggtgcggagccctcatggagaccctctgctagggcagtggagaaggcaaatgtggggttggagccctcacacaaggtgcccactgaggcactgcctagtggagcttcaagaagagggtcaccatccttcagaccccagaatggtagacccactgacagattgcactgtgcatctggaaaagccatagacactcatmaccagcccatgaaagcagctgggaaggaggttgtaccctgcaaagccacagaagtggagctgcccaaggctgtgggagcccacctcttgcatcactgtgacctggacgtgagacatggagtcaaaggagatcattttggaaatttaaggtttaatgactgccccattggattccagacttgcatagggcctatagccctttggtttttgccaatttctccaatttagaacaggagtatttacccaatgcctgtactccccttgtatctagaaagtaactaacttgcttttgatttttacagtctcataggcagaggggatttgccttgtctcagatgagactctggagttgggattttgtgttaatgctgtaatgagttaagactttgggggactgttgggaaggcatgac

SEQ ID NO: 753206 - DNA, 635 bp, Homo sapiens
ggaggaggcagcaatctttgctgttctgcagcctctgctggtgatacccatgcaaacagggtatggagtggacccccagaaaactccagcagaccagcagaagaagggcctgactgttagaaagaaaattaacaaacagaaagcaatagcatcaacatcaacaaagagcatgaccatgtaaacactccttccaaaggtcaccaatgccaaagaccaaaggtagataaagccacaaagatgaggaaaaaccagtscaataaggctgaaaattcccaaaaccagaacgcctcttctcctccaaaggatcacaactccttaccagcaagggaacaatactgaatggagaatgtgtttgacaaattgacagaagtaggcttcagaagatgggtaataacgaactcctcagagcgaatggaacatatagtaacccaatacgaggaagctaagaaccttgataaaaggttagaggaattgctaactagaataaccagtttagagaataaccagtttagagaagaacacaaatgacctgatggagctgaaaaacacagcacgagaacttcatgaagcatacacaagtatcaatagctgaatcgatcaagcagaagaaaggatatcagagactgaagatcaac

SEQ ID NO: 753207 - DNA, 661 bp, Homo sapiens
gaaaatttatttaacactataaactcaacaaatatttctttttcttattttttttttgagacagcgtctccctctgtcagccaggctggagtgcagtggcaggatctcagctcactgaaacctggaacctccatcccaccaactcccacttccgatcccaagctcaagtgatactcccacctgagcctcccgagtagctgggaccacaggcacacaccaccacacccggctatgtttttgtatttttggtagagatgaggtctcaccgtgttgcccaggctgcccttgaattgctgagctcaagtgatttgcctgcttcagccttgcaaagtgctgagattatagggttgagccaccacacccagccaacaaatatttctttattgaattctacatacaaggcatttttytgaactatagggttacagtggggagcaaaacaaagattctaccttcatagatcttgctagtgggaggattagctagtcattgtgtagctatttggcagagccatctcagcaaattaggaaaatgtttcaggatctaaatctgagctctagtgaggctgaaggagagagaatcagcctttaggacagttacatgcaaccaagtagatagttaccaaaaaaaaaaaaatatatgcaccgtgagaatcagtaga

SEQ ID NO: 753208 - DNA, 624 bp, Homo sapiens
agagcattaggacaaatacttaatgcatgcagggcttaaaacctagatgataggttgatgggtacagcaaaccactatggtatacctgtgtaacaaacttgcaagttctgcacatgtatcccagaacttaaagtaaaattaaaaagagagaagtatttactgttaagaaaagaccttcaccaacctaaaattctgcaccctgtgaaattatccctttaaactgaagaagaaataaagattttattataaaataaaaaattgagataatttgttgacaagaaattctttagagagctgtaaagtaatataggttagagaaacttgtatccacataaagaaagaaagagcatcagagaaggagtaagtgaagataaaataaacattttagttttgcttattcttaactgatctaatagacaatagcttattcataataataatatatttgattatatatgtttacatatgyttctgtatgagtaaaataaataagtagtgatacaaggcatgggaagataaactaggactattttactattatgaggcactcactctacctgggaactggtatagtgttatttgaaagtggacatgaaattgttgtgaatgtatattacaaagtct

SEQ ID NO: 753209 - DNA, 642 bp, Homo sapiens
ccagggaacctgatctaagacaattgatcatttctcattgacttttcattacttcccagccattttttttgcaaatattgaatttcaaaatatcatgcaaacacatctgtattatttctatgtgatttcttctaaacttaaaagatgccacccccaacacacacaccagtggtttcactaatactcagttgtattctcttctagcttttcgtttttgtctttttcttttttttttttctttttcacagattcttctggcttttctayggttgccattttattcttggcttctaattctaatgaaattcatttttagtgaaggatttgaagcaaatgagtaaatgccatttgttgacgatgtctctctcgtatcattcatttgcaatgcctatccttcattatatattaaatggaggcaatgttctcaccatattctgcagctgtaagtagacagctgagaaaccactgcttcaaaatgatttctgaagctgtccacaatctcctccatgtgtgtgggcttttcaaatgttcctgcccaggcagtggagactttgggccaagctctggcctcttttccccatcagcacagcccagcacgtcaccatgtttaagatgaagcctggatcccaacgctgaatgaac

SEQ ID NO: 753210 - DNA, 642 bp, Homo sapiens
ccagggaacctgatctaagacaattgatcatttctcattgacttttcattacttcccagccattttttttgcaaatattgaatttcaaaatatcatgcaaacacatctgtattatttctatgtgatttcttctaaacttaaaagatgccacccccaacacacacaccagtggtttcactaatactcagttgtattctcttctagcttttcgtttttgtctttttcttttttttttttctttttcacagattcttctggcttttctatggttgccattwtattcttggcttctaattctaatgaaattcatttttagtgaaggatttgaagcaaatgagtaaatgccatttgttgacgatgtctctctcgtatcattcatttgcaatgcctatccttcattatatattaaatggaggcaatgttctcaccatattctgcagctgtaagtagacagctgagaaaccactgcttcaaaatgatttctgaagctgtccacaatctcctccatgtgtgtgggcttttcaaatgttcctgcccaggcagtggagactttgggccaagctctggcctcttttccccatcagcacagcccagcacgtcaccatgtttaagatgaagcctggatcccaacgctgaatgaac

SEQ ID NO: 753211 - DNA, 642 bp, Homo sapiens
ccagggaacctgatctaagacaattgatcatttctcattgacttttcattacttcccagccattttttttgcaaatattgaatttcaaaatatcatgcaaacacatctgtattatttctatgtgatttcttctaaacttaaaagatgccacccccaacacacacaccagtggtttcactaatactcagttgtattctcttctagcttttcgtttttgtctttttcttttttttttttctttttcacagattcttctggcttttctatggttgccattttattcttggcttctaattctaatgaaattcatttttagtgaaggatttgaagcaaatgagtaaatgccatttgttgacgatgtctctctcgtatcattcatttgcaatgcctatccttcattatatattaaatggaggcaatgttctcaccatattctgcagctgtaagtagacagctgagaaaccactgcttcraaatgatttctgaagctgtccacaatctcctccatgtgtgtgggcttttcaaatgttcctgcccaggcagtggagactttgggccaagctctggcctcttttccccatcagcacagcccagcacgtcaccatgtttaagatgaagcctggatcccaacgctgaatgaac

SEQ ID NO: 753212 - DNA, 610 bp, Homo sapiens
aggtaggaggccagacagtcgttcaggctttgcaagttctccttctcgttctggatgcctcccattcctgccaggcccccggccattcccacagccaggcccccggaccccatgccgccccagaagctggaggagtgggacatagagatccgggaaccagagcccccggcacctgcatagacgctggtcgtgcctggacggagcccagaraccagtagttggtggagcgagtggtgaagctcatgctgttccgggaggagggcgagaggacaggactcgggctttgccgaggactccttcttagttttaatgctgctattgtcaaacattttgtttttatgtatgttatattttctacaatgcattttaaatagtcatttatctttaaaatatatttaaataataacatattataaatttactcatttaatgaaccatacatggtgctctttattcctttgtgtagatctgaatttctgcctgttatcaggtttgtttttttttttttaagtcaaaagaactttttattatggaaaatttcagagtagataaaagtagagagaacagtatagtgaaccatgcatctattacctacttccagtgattacca

SEQ ID NO: 753213 - DNA, 602 bp, Homo sapiens
gctctggcttttctctggctcgcatcctcaccacctggatggtttccctagttatgatctccctacccataatggaacaagagttcttagaactggggtcggctgggcacagtggctcacgcctgtaatcccgtaatcccagcactttgggaggctgaggcatggggatcatgaggtcaagagatggagaccattctggccaacatggtgaaacctggtctctactaaaaatacaaaaatcagccaggtgtggtggcacacacctgtagttccagctactcgggaggctgaggcaggagaatcgcttgaacccgggaggcgaagtttgcagtgagccgagatggcgccgctgcacttcagcctggtgacagagtgagactctgtctcaaaaaaaaaaaaaaaaaaaaaragagctggggttaatcattcacctgcattgacctgagatgccttagtcatggttagttctcccacacttgttcttcagaaacctctgaaaccacacccttgtgaggtaagaggccttccagtcaacaagtcatgcagttctctagctaccagggaaacctgattagatactaataacaggaacctctcggcca

SEQ ID NO: 753214 - DNA, 527 bp, Homo sapiens
ggaggtggcactttcctgagagcatcagctgtggtggtatggggaggcataggccgtgtgtggggccctagaagtgccgagagtatatgccctttgtcttcacttaccagggtgagtagggaaggaccattgggtaggggcagggcttggtatgtctgagctcagattccttgggcaggtcttgctgcagctgctgtgggggatgggggtaaggttcccaggtcaatggaattatgtttctaggaggattatggctgtttctactgtgtcatgcagtttgtcagggaagtaggaaagccgacagtcacaggcctcacccagctcccacgcaatccaaagggcaggtcttactcccaccgtaacccccaacagcactgagtctgtttccrggcagtgggtaagtagggctgaggacttgctccacgctacctgcctcccagctgcaaaaccaagtatggctttcattcttcccctgcttttggaatctgcacactggattcacgccctcccctgagttctggccagga

SEQ ID NO: 753215 - DNA, 509 bp, Homo sapiens
ctcctaagctgctcttctttatattatgtgcctctagcaaatacatctagtcattgctttggtttcattccagtctagtgatttcaaactcctgttggccaatctttgttctagaatggtatttacagctgagcacatgatatccacctcccttcttcagatattctgcagtcatcttgacaaatctcaatattcacacatacatcwgtctttctccattctcttccctgcctctaatacgttctgaacctagctgcaagtgttcattgtgtatgtttaccctgattcactaattgacaataaattcctgagagctagtcttttcagtttgtagggatgaacattctctttccagtagttgaaaacaaaggtagcaagctgaaaacctttttctctgatagaaaaaagaaatgtattagattgaacataagagcacactatatttggtatgagtcaaggtggaattattattgatcaatctggtttaaaatcctcttcactgaatccac

SEQ ID NO: 753216 - DNA, 578 bp, Homo sapiens
atacataggcacttagaggggagcaacacacgctggggcctattacagggtgagagtgggaggagggagagaatgaggagaaataactaacagatactaggcttaatacctgggtgatgaaatcatctgtacagcaaacccccgtgacacaagtttacctatgtaacaaacctacacatgcacccctgaacttaaaagttaaaaaaagaactttaatgatagctcagtacagaagaaatgtattaatacttagagcttttgattataaagtattttaaaatactttaaaattacatacatatagtcaattctcattatttgtggaagctatgttctataaagttgctgtgagcattgaattagcaaacactgaaacattgctcctagaggaaatacaaagtgaagttcctgcaagcttctggtcacaacatttttaycaaccaatcaatatatagccttgtttaatgatgtttctactttaaaacctcttgtttaatgtatatcattgattcaataacattgaattagcagccaataaaactgtaacccctgcctgaagaaagttccagtaacccata

SEQ ID NO: 753217 - DNA, 491 bp, Homo sapiens
tccagttatatggccttgttactcaatctctgatagccatgacttcacctttataaaatgtagataataatgaccacttcctaggtctattatgaggattcaataaaagtacccacaaatccatgaaaacacacatgcttcacaaagggggattttttatctcatccccctcaggtctagattagtacctggcaagtggtaggcacatctctgctgaatactctgaatgattaattcagtaaaygtgtcaagggctcaacacggtgcttcagatgtctgggaggcataatcagagggagttccgctctctattccttcaatgtcagaaagaaaaaaaactttggaatatctgaaacagtacatgcttgaggaagaaattttgcccaacaaataattaggttaaaaacttatgaaaatgacaaaagttacatgaattataacatcctcagtggtgaggacaaaaattctgatacttttctttcagggacttt

SEQ ID NO: 753218 - DNA, 618 bp, Homo sapiens
atgtttcaaatgaaaacctgtgtgtttcatttctaagaaattttcttgcattatgtcttgaaattttttctctttttttttccccctctgttctcttttcctggaactgatatgggtcaaacatttggtttgttagatttatccattgatttttattaccccattttctatattcttgacttttttgttcattttccaaggagattttcctaacttcatctcttaattctcctattataatttttttttctgttttacttgttasaaaccaagagttatttattgaactctgaatattcttttattgcactctaacatttcttgaatgtaatattctttcttatttccctaaggatagggaaataattataattatttgcagttttcttctggccagtacagtctctatctcccttaattttgtttgtttgtttgttttagcgactattttatgctcggagctttattaaatgtctgaagatacttggtgtcaattcttattagggagtgaggaagtaaatatctaaatagaattttgttcacgggtggggcttatctactgctgagcctcatggttgcttaaatggaagaccctgaagtatcagtgcctgtagtctt

SEQ ID NO: 753219 - DNA, 635 bp, Homo sapiens
tagtgtatttctgatggaacatccatttctaccggacattagtgagaacaatactctcttacaatattcctcgcttgataagtggaaaaattttcacaaattagcttttgtctctgtataattgaaagcctagaactcctcctttactcacytgcttccaagaccaggcactgaggatgtattcctaacccaacacaacctctaacctcactcttgctgtcacagtgccaggtgagctagtgctgcaggcaacaaaagtacttccagaagccaaggcattactgcattgggagagcaatcaatattttgctatccacccaaggaactatgaacacacaaacccaaactgcatatctctccaactcaacttcttattttctgggtcccaaaaatgccctgacaactctaaaatcctctaggacaagggccaatgtgaaggagaggaaatcacagcagaaagagaagctgtctttaccaatgtgggtacaagtattttaccagggtgatgttccaaatacataggaggaccctggaacccactcatagggttcttcctagggttctggaagggtctgtgcaagtgaagagctggatcctgagcttcctttgcgtcagggtaaatgtgcctttgtcag

SEQ ID NO: 753220 - DNA, 596 bp, Homo sapiens
cattggaaagaacccaaccccaggtttagggttaggacaatgacacaatcctgcacatttgtatttaaggctggccatgtgatctaagccacactgatgagaattggccctgggagttttagaagttttgctggaaagaggttgcctttatctgccactatctttgccatgatgatgtaaagcctaagacagaaaccagcacgctgcaaattggagccaagcagggagaattagatagattcttataagttttatttgtttgactagcctgaagctagcatagctctggacttcttagtcacctgagacaatcattaaacttctgccacttgcaaccaaaagattccaggttaatgtatgcctgtaagagagaaggaaatttagtagtcaatgatatagatgaggagaaagtcaagagtgttagcggaagtgacsaacggcaggagtggctgagaggcttggcttttcaacagttgtttgggaagtcattctgagtttaaaaggtgtcttcctaaaagccagacattaaatatttctaagaaagccagagatcggcatcagaatcatattaaaacctcaatatattgaatggattt

SEQ ID NO: 753221 - DNA, 632 bp, Homo sapiens
aaatgctgatttttgaatttatttatttatttttttaagaaagacatttttacagagagaaacatatactgctgagattgtgcccacaaagccagccggtgaacccagtctaccaggcactctgaacacaagttcacctggcacccattctctactcacctatggctgcctttattctgtgacaactttccttagacagaaaggatctgttggacaattttctctcaattctattctatattgcatcaagttgtgctttgcctcccacrtctgcctctctgtaacccatccttcaaaagtccactgaacacctccttgaggtcttcttgttcttcagtctaatgccctgtccttcaaggcttattgcttccaaggaaatgtcccctcctcagactcaagggctgcattttactgtattttgtgacatcatcttcatctttctcatgttttctttctccttaattacctgggggacagagtctcgccctcagggccaaccagagtgtctggctgacatagaggcttaatacccaataactgactacttaattgataacatcctcgcttcttagatttttaaaattataacattgttttataaaagacacatgttctcaaaatacgaaaatgtg

SEQ ID NO: 753222 - DNA, 500 bp, Homo sapiens
aacaacaccctgtggcataacttgttctacagtctatttggcatcctttacaagggtagtttttgagctcagttttctgcttttttgacctcaggagaactctcttagctattcctgattctctctggataactagagatgctgatggtttaactggcttattttcaaatttttcattttttttttctgacagtgcccttatgcctaaaattccccttaccttgtttagataagtttagattcttagtaaagaacttctgagctctctgttttatggcctacctttctctttggtccaaatatctgagtcacagctctggtccttaggttggggacaattgaaaactttctaattgacacctytacttttgcaggttaccgggcccctatagtcttctagttttgcctcttcctgcatggaaacttgctgcatgcctgcactatgatgagggcaatgagggctccaggattctcacccttccactcctggggtaaaatct

SEQ ID NO: 753223 - DNA, 625 bp, Homo sapiens
atgcataaagcgctcagcatagtgcttggttcactataggtatgatgatctattatcagtattattaaataatatgtgtaaacgcgtggctcctagcaactgttccaccagtaacagctcctattatggctctcatttgactttctctttagttatgtttgttttgtagctgaatttarttgccatgacaaggaaaggaaggaagaaactcatatgtagcctttataattcattcattaatttatttattcattcccagaatcatttatttaataaatatttattgactacttattatattccagactctgtgctggattctaataaacatatattaccttatataattctcaagataactggctatataaggcattatagtatgtattttattgatgaaaacaaatgagaagtcaaaaaacttgttgaggttcatttggagctcagaatatctgactctaaatctggattcttctcacctccccacattacctttggctgagtttctgcctgctatgctgtccaaagcatgcacagaacccaattacattttataaataagaatgtaaaatctgagaaagatgattagtctctggaacttctatatacatgaaaactttattat

SEQ ID NO: 753224 - DNA, 626 bp, Homo sapiens
gtgcagagggagaatgccatgacctcagacatctgctcttccatgccactgggcacgtggttgtggaatgcgtcctcaactggccttttgctgttttctcccaaatttcataccatgagtcttcatctcaggctcctcttcgttgatttgaagcccctagtccgtctccagttttatttcattacaagacaacatcagcctctggatctgctgtgatgtcctccctctgctccctacatctgtctatcctgctccctgkaggggacgtccctcacatttcccaaagtcttactccacaccaccagctcaggctgaactagcttagagagtttattccatttgccccaaatactgccctttggaacccgccaacgatccatgtgtgcttcagatagcctcgtccaggcaggagtagctttctgaaatttaaatttttatctatttacaaacatttttatgtgtaacaaaaagtaaaaatgtgcctaacaagtataattaaccctgaaatggaaaaaaaaaaaaaagaatataaagtatatcaagggtatccacagaggaggtagtactttgggtggaaagagcatggttttgaggtttggatacattttgtctgagaattttgttat

SEQ ID NO: 753225 - DNA, 626 bp, Homo sapiens
gtgcagagggagaatgccatgacctcagacatctgctcttccatgccactgggcacgtggttgtggaatgcgtcctcaactggccttttgctgttttctcccaaatttcataccatgagtcttcatctcaggctcctcttcgttgatttgaagcccctagtccgtctccagttttatttcattacaagacaacatcagcctctggatctgctgtgatgtcctccctctgctccctacatctgtctatcctgctccctggaggggacgtccctcacatttcccaaagtcttactccacaccaccagctcaggctgaactagcttagagagtttattccatttgccccaaatactgccctttggaacccgccaacgatccatgtgtgcttcagatagcctcgtccaggcaggagtagctttctgaaatttaaatttttatctatttacaaacatttttatgtktaacaaaaagtaaaaatgtgcctaacaagtataattaaccctgaaatggaaaaaaaaaaaaaagaatataaagtatatcaagggtatccacagaggaggtagtactttgggtggaaagagcatggttttgaggtttggatacattttgtctgagaattttgttat

SEQ ID NO: 753226 - DNA, 562 bp, Homo sapiens
ttgtttacctaagcaagcctgggcaatggtgggcacccctcccccagcctcactgccgcctttcagtttgatctcagactgctgtgcgagcaatcagcgagactctgtgggcataggaccctccgagccaggtgcaggatataatctccyggtgcaccgttccttaagcccgtcggaaaagtgcagtattagggtgggagtgacccgattttccaggtgccgtctgttacccctttctttgattaggaaagggaactccctgaccccttgcgcttcctgagtgaggcaatgccatgctctgcttcggctcatgcacgctgcgctgcccccactgtcctgtgcccactgtctggcactccctagtgagatgaacctggtacctcaggtggaaatgcagaaattagctgtcttctgcatcgctcaggccgggagctgtagactggagctgttcctattcggccatcttggctgccccacctatgtaacatattacatataatttatttatatataatttacttgtattatatatgtaatatattgtatctattctataatatat

SEQ ID NO: 753227 - DNA, 562 bp, Homo sapiens
ttgtttacctaagcaagcctgggcaatggtgggcacccctcccccagcctcactgccgcctttcagtttgatctcagactgctgtgcgagcaatcagcgagactctgtgggcataggaccctccgagccaggtgcaggatataatctcctggtgcaccgttccttaagcccgtcggaaaagtrcagtattagggtgggagtgacccgattttccaggtgccgtctgttacccctttctttgattaggaaagggaactccctgaccccttgcgcttcctgagtgaggcaatgccatgctctgcttcggctcatgcacgctgcgctgcccccactgtcctgtgcccactgtctggcactccctagtgagatgaacctggtacctcaggtggaaatgcagaaattagctgtcttctgcatcgctcaggccgggagctgtagactggagctgttcctattcggccatcttggctgccccacctatgtaacatattacatataatttatttatatataatttacttgtattatatatgtaatatattgtatctattctataatatat

SEQ ID NO: 753228 - DNA, 562 bp, Homo sapiens
ttgtttacctaagcaagcctgggcaatggtgggcacccctcccccagcctcactgccgcctttcagtttgatctcagactgctgtgcgagcaatcagcgagactctgtgggcataggaccctccgagccaggtgcaggatataatctcctggtgcaccgttccttaagcccgtcggaaaagtgcagtattagggtgggagtgacccgattttccaggtgccgtctgttacccctttctttgattaggaaagggaactccctgaccccttgcgcttcctgagtgaggcaatgccatgctctgcttcggctcatgcacgctgcgctgcccccactgtcctgtgcccactgtctggcactccctagtgagatgaaccyggtacctcaggtggaaatgcagaaattagctgtcttctgcatcgctcaggccgggagctgtagactggagctgttcctattcggccatcttggctgccccacctatgtaacatattacatataatttatttatatataatttacttgtattatatatgtaatatattgtatctattctataatatat

SEQ ID NO: 753229 - DNA, 591 bp, Homo sapiens
tttaggagctgaccttcctgtctttcagctcttgctctttactaatactttctcctcttcctggattgctgaatatcccctgaattcccccaaaccacctaaacatctcttaacttctaccttagaaatcactacaacctcagaggtcacttatgcttttggcactatayggtgctttataagcactcaaattcagtgattttccaatcttgctggtagtcagaaacaccggccaagcttttttaaaaatatgcactcttaggcttcagtctagatcagctgattcataatcactacattatgttgtccaggagtatgttttccaaaagcctcaaaagcaatcttaggatcagatagatttgagaatgattacagaccagtagttgtcatcccctctcacactttagaacacatataaagctttgaaaaaaattcaggcctggctgcactgcaccccagcattgggcaataaaacccttgtgattggtaacaaactggcagagtaagccaaaggagaggagaaacaagacaatgagatatcatttaaaaaagatgaacagaacccacattgaagttttgaaaaaaccttgg

SEQ ID NO: 753230 - DNA, 534 bp, Homo sapiens
tctcacacccagaaaaaagaatgtctatcatcatcttctttttgcggcccacatgtcgaaaacataacttaaaattactgtcagtgaaaacattcttccttacatgtgtttgtcttatatgcaacaacagagtcttaagtaatttcaacattytccctactcttctgtcacctaagccatacttgaatggcctatatataagctgtttttccctcactcaaatatatcctgttattggattacatacatacagtacgtccctaggttaaagttgttgcttcaattaccctaggcaatatcacaccactagggtttaaagctgcattaccatggaaacgtcatgatgctgtaatcttatatcaccacattattccagagttattgttgttggtcctgaaaacatgccagaatcccttcttaattgttatcactattaataataccaatgggctcaatcctttttccttcaagagttcaaggtgaaagttgacagtaactcttcagagcaaatttggtggaggaccaaaccagctg

SEQ ID NO: 753231 - DNA, 564 bp, Homo sapiens
aaatttcacaataattttgatctataattaaattaaatttccctatagtcttatttttcccagtgaagtttctcaggatatttattctatgtatgttttaataagccagttatttttaggtagaatcattgagagaagaataaaaacaagtgtgttgtctttagaaaatgaaatgataaaacttagctctgatccattgaggcttttaaagtataaataaataatagaatatgaggtggggagagttttggttccatttactagcatattttttgactacacattattgagctgctgttttctctgtggttctctttttacagcagttcatttcaytacttttacttttctataatttttttcttttctatgacaacagattttactaattttatgtagcataattttgtaccataaagaatgcatatctgaaaggttggaagtacagtcacagtcctgataaaaaattgaggtattattttgaatgccatttgatccatttgcaatcattcagcacaatttagacttcatcattcatttagtcttctcatacagggctgacac

SEQ ID NO: 753232 - DNA, 590 bp, Homo sapiens
cacccaatcacctgagtggtccccttcccacaggggttgagagctgcaagctgagtaaatgagacaaaccccttcacgagtcccacaaaagggtcaagggaactatcccatttcagtattttacttttaaaataaattcaacttcttgttacattattacagtaacttagcacttatttgctaagcgcattacaacgttagtgtgttaagaataaaaactaattggccgggcgcagtggctcacacctgtaatcccagcactttgggaggccaagggcagatcacctgaggtcaggagtttgagaccagcctggccaacatggcgaaaccccttctgtactaaaaacacaaaacttarccaggcacagtggcaggtgcctgtaatcccagctacttgggaggctaaggcaggagaatcacttgaacccaggaggcggaggtttcagtgagctgagatcccaccattgctcttcagcctgggcaacagagtgagacttcatctcaaaaaaaaaaaaaaaaaaaaaaaagaaaactaattgtgggttttaccctctcaaatggttccaaagctgcacagattatgaacctat

SEQ ID NO: 753233 - DNA, 626 bp, Homo sapiens
caatcagtgagttatcaattagtatgcttttaagaagtgaaataacataaaaatggatattttatgaattcagcacataaaaaaaaagtttacccctgacctgaatttcaactagaaagatctgattaatttgtttttatactcttttggtcattagagctgatagcttgcaattttcctgtggtttcaagtactgtagttattggattatggtcttgtgcatcagaaaacctgggctgttatcatgagagcagtgggcaatattctctctacctttcctatcaactgctgtccagggccacccactggcctctcaaatggcaagccgcaaatgccagcactctgttagatggagctaccacatctaagcattgcctttgagtcttttctatatccactaactattcatcagtttgatttcccttgactctttgtcctaggtagagacataaaaatacgtcttaccctgtacctactcttttatgtataatagctacrtctcttggatgcactagagaatatatcagcttcaacagagcttggaggagtcttactctttagtcagaagtatttatgtcactgtaaaaaaatgcctatgaccatctattctctaggagactcaaagc

SEQ ID NO: 753234 - DNA, 532 bp, Homo sapiens
tcaaatggcaagccgcaaatgccagcactctgttagatggagctaccacatctaagcattgcctttgagtcttttctatatccactaactattcatcagtttgatttcccttgactctttgtcctaggtagagacataaaaatacgtcttaccctgtacctactcttttatgtataatagctacgtctcttggatgcactagagaatatatcagcttcaacagagcttggaggagtcttactctttagtcagaagtatttatgtcactgtaaaaaaatgcctatgaccatctattctytaggagactcaaagctctgtccaatttacttttttgactgattggtggacagatatttggtaaactattatctcttccttctttcctagtttacgaacctaaatcacctactgatttttttgtgttgtaactaaagcatatctaggatgttttatatgaaagccatagtgcttttatcaccttatttaaatgcagtgaactggtagagaataaactaacaaactccaaaatcta

SEQ ID NO: 753235 - DNA, 662 bp, Homo sapiens
gaaagcctgccaaaatattaaatattacaaaaaaaatttctctttaaatgtagatttaaatatttttcattgttggccaggcgcggtggctcacgcctgtaatcccagcactttgggaggccgaggtgggtggatcacgaggtcaggagatcgagaccatcctggctaacacggtgaaaccccgtttctactaaaaatacagaaaaaaaattagctgggcacggtggtgggcacctgtggtcccagctactcgggaggctgaggcaggagaatggcgtgaccccgggagacggagcttgcagtgagcagagatatatcgccattgcactccagcctggggacagagcgagactccgtctcaaaaaaaaatttyttttcattgttaagggtgaacattgttaagtgcacacataccattccttaaggtctaagttaatgttgatatgaagggatcatgctgtgcatgcccattataaaccaaatgtctaaaacacaaaaacattttagaatacaaaatgttttgtaaagaaatatattacataatagatttatctaaatatcccatttgtctttatatttttattctaagttgttaatcccttttgaaataaacaccatcttcaccttgtattagcagagccatacatgcagttattaataaa

SEQ ID NO: 753236 - DNA, 621 bp, Homo sapiens
tagctgcaaaaaatgtttcaaaccaaatggcccccagtgagtgcactcctcaaccaggcaaataaaggcacccacccacccatcagcccaggccacagagcgcaaaggccggggacttagcagcaggaatctgctggcacaactgtcgccatgggcctctatccgctctggacacccagcacctaggccaaggccaagtgttacaagatttgccttttccactgaagtgcagaacgctttcctggtggttgttttgggtggcggggggagggtgttgagagggwcaggggatcagaatttcctggtccttttaactataaaagatctataatgttgtacatgtctctctgcttctagttcagctagcgtcatgcgaaatggggctttctgcgtgactgcacaaaaaccagcaagtccaaacaggaggtgtcttcccaagaggtaggcaggttgtgtgagcaggagggccaccgtgagaggtgaatccagctgggcttctgggtcaggtggggggacttggataacttttctgtctagctaaaggattgtaaacacaccaatcagagctctgcgtctggctaaaggtttgtaaacacaccaatcagcactctgtaaaaacgc

SEQ ID NO: 753237 - DNA, 508 bp, Homo sapiens
ccgggatgccggctgtgtttgcagatgcaatgttactggagaactgccatgctcattcattacctgctgtccctggctgctgctcccgctgcctgcagacttgagtagttgcaacagggacctatggtccacaaagctgaaaatagacaccatctggcccacaactggctacagagttgtagtagctcagtgcaaaatgaaaatgcaggggcgttgtttataaactaaaaatgtggccgggcgaggtggctcatgcctgtaatcccggcactttgggaggccaaggtgggcggatcacctgagggtgggtgttcgagaccagtctggccaacatggtgaaamctgtctctgctaaaaatacaaaaattaaccgagtgtggtggcatgcacctgtaatcccagctacttgggaggctgaggcaggagaatcacttgaacccaggaggcagaggttatagtgactgcactccagcctgggcaatggagtgagactctgtctcaaaaataa

SEQ ID NO: 753238 - DNA, 475 bp, Homo sapiens
tattacatgatatatagcttttaagaccctccataagaactagaatcttttctggaaaagaaatagacaagtttctgatgtttttggacagcattttctttctcccccactctcagcattgttactttaataattaaaatttcaaaaatctaaatacaggcttacctcattttattgctctttgctttattacactttgcagatattgcattttttgacaaattgagggttgtggcaaccctcagtgtgtccagatgtgtccagcacatstactggcaccacttttccaatagcatgtgctcagtctagttatcagtgtcaccttttggtaattctcacaacattttaagctttctattagtatgtctgttatggtgatctgtgaccagtgatctttgacataactactgtaattgttttgggcaccacacaccacgcccatataagatggtgaatttgattgacagatgcatgt

SEQ ID NO: 753239 - DNA, 640 bp, Homo sapiens
gactatgcttttatactaaaagaaatgatcaacattcatggttcataacagtggattgggagcagagagaagggagaaggagagaggtcttcttatcagatttgcttttaaagtgaaaattttggcaatatttggagaaaggagtggatggaggtgataaaactggatgttgcataaaaactagaagggtatttctgtggtttagatatttctggatctgaataactgtgtggatgatggtggcatttttctaagctaaaaatcacaggagaattttgtgggaaggtcatgaactcagttttggaccctggaattttcagtgtctgatacaactccaggaaaacccttagtctgtagtgcttgaaaatgaatctgactagctgtggggtctctgttaattaattgacactgcactgtgtattcacttaattgtagtcattcttcagaaagcccatgcatccctttagtcacctgcactttcctgcatcctcatmtccatatcacggttctctaccctcatcaactccccctgcccccaatctggaaacccattgcttattttaagcactttccctaactctcaaatccactttttctctgtgaactagttatggtagtctggacccccaaacaactagtt

SEQ ID NO: 753240 - DNA, 699 bp, Homo sapiens
attgttgacaagtagttaaaagtaggaagtaattagagggaacataatcgaaggttttaagattagaaaaacccataagaaggaaaatccaatccaagagtgcatattgagctagtgtgtgttgtgggtacttggggctccatgtagctggagatccctgaaaagcagtgcagagcaaatctcagaactgcctacaagaaaccaagaaaagggtaatatcaacaattttttcctgcctgatattgaccaaagcaatagaatgtagtgactaccttgtatttatatatttacataatttctggtatgtttgagaacattcctacagttacagaatgtgacagctgcagagaagctccagatagaaggtaagagacacagaatccaagtcatgaagaacgtagctgaaggacacctatgttcagctcaatgctgcagcagtggctaacacaaaaaggtaggcttgagagaatgtgatttggggaatagggatgaacttcaaamagagtattctgtaagtccttcctgtgttcctatctggtcactacccatcacagattgacttgtaacagcttagataactttggtcagtttttgaatttcgtataaatgggtatgtgtgtattttagcagatatttacaaggagttttccaagtaggtgaacagttttcattactaccaaccatgtatgaggatcccag

SEQ ID NO: 753241 - DNA, 630 bp, Homo sapiens
atctgacctatagattgctcattctctgcatgagtcaatctttgaagtcggaagataaaaatcaccattaatcacaaaactttcttaccatcataaggtcagatatcccagggcccttccaaaattaccacatggactggcatagggcgagattggctcagctgtggtcacttttatgacacagagctccttccctctggttgatgatattgaatgagcaggaaggaagaaaagaaataaaagtcagctaaccatggttgagtcaatccagcccacggcattcaaaggctgaagggccacctgacactccagaggctgctggaaatgcagggctgtttcatcctggggtgagtttccgttagaagaaatactgacttgaatgaaacaaagagtccgtcccttgctttaytggacaatgaaagttcccatcatactgatcaaagatcgaggatttgggacatgtgggaatgcattaatatctcacctgtggctgaggcagatgtgtgtttccaaatgataatttcttttcctgcaaagccaggtgtgtaaggagaactaagggaaaaggaaacttttttttcctgtgaaaatctggatccacttcaatccaattcagtttcaaaaacattt

SEQ ID NO: 753242 - DNA, 635 bp, Homo sapiens
tatgtcctgtttttattattttactttggacatctttccattattcttggtgtattgaagtattgtaataatgtgccttgctgtggttatttttctattcatatgctggatacaacaaaggtctttcagcctagagatgagtgttctttaattctgggtccccctggtttctcakgctgctaatattcatagcggtaggacccttgcctaccatagcctcagtgcctagcacagaaccctcagaatactcagcattcattaaataattatggaataaagatggaatctggaaagaaaggactgtagtgacttttgaattggtccttcagatttctctaaagttttaattctgacaagaaaacaagaacaaatagtgaagcccagacttggaaaaagtgacctagtcagtacatgtattaaaaccacgaaataaaagcgaggaggagtcatataaacttaggtaatgtagttccaaaagagaaaagcaaaatttacttccactagaagtgaaaatagctgacttattgatcactttcttttaaaatgaataccattgtcccatgttacagttgactaaactaaggctcagaatgttcaaataacaactaggaaatggcagagctggaatttaagtc

SEQ ID NO: 753243 - DNA, 623 bp, Homo sapiens
tggaatcgaacagaatggaagtgaatagaatcgaactaaatcgaatggaatggaattgataggaacggaatggaaaggaatgcaatgatttggcatggaatggaatcgaatggcatcgaatggaatggaatggaatgcaatggaatggaatgtattagaatgtaatgaactttaatggaatgtactcgaatggattcgactggaatggaatgttctggaagtgaatgggctccaatggaatggattcaaaaggaatggaatcgtacggaatggaatctaatggaatggaattaaatgsaaatgaatcaaattgaatagcacggaattgaattgaatggaatcgaatgcaatggaatctaatgaaacggaaaggaatggaatggaatgggctggaatggaaaggaatcgaaacgaatggaatggaatcgaactgaagagactggaatggaatgcactggaatggaagggagtgtaatggaaggttctcgaaagaaatggaatcgaatggaatggaattgaattgaacggaatagagtcgaatggaattgaatggaatggaatggactagagtgaaatggaatcgaaccacaaggaatggacaggaatagaatggtctcgaattg

SEQ ID NO: 753244 - DNA, 623 bp, Homo sapiens
tggaatcgaacagaatggaagtgaatagaatcgaactaaatcgaatggaatggaattgataggaacggaatggaaaggaatgcaatgatttggcatggaatggaatcgaatggcatcgaatggaatggaatggaatgcaatggaatggaatgtattagaatgtaatgaactttaatggaatgtactcgaatggattcgactggaatggaatgttctggaagtgaatgggctccaatggaatggattcaaaaggaatggaatcgtacggaatggaatctaatggaatggaattaaatggaaatgaatcaaattgaatagmacggaattgaattgaatggaatcgaatgcaatggaatctaatgaaacggaaaggaatggaatggaatgggctggaatggaaaggaatcgaaacgaatggaatggaatcgaactgaagagactggaatggaatgcactggaatggaagggagtgtaatggaaggttctcgaaagaaatggaatcgaatggaatggaattgaattgaacggaatagagtcgaatggaattgaatggaatggaatggactagagtgaaatggaatcgaaccacaaggaatggacaggaatagaatggtctcgaattg

SEQ ID NO: 753245 - DNA, 633 bp, Homo sapiens
ggaatggaatctaatggaatggaattaaatggaaatgaatcaaattgaatagcacggaattgaattgaatggaatcgaatgcaatggaatctaatgaaacggaaaggaatggaatggaatgggctggaatggaaaggaatcgaaacgaatggaatggaatcgaastgaagagactggaatggaatgcactggaatggaagggagtgtaatggaaggttctcgaaagaaatggaatcgaatggaatggaattgaattgaacggaatagagtcgaatggaattgaatggaatggaatggactagagtgaaatggaatcgaaccacaaggaatggacaggaatagaatggtctcgaattgaatggaatcgtatggaatggcatcaaacggaatggaatggacagccacggaatggaatgcactcgaatgcaatggagtcgaaactaatggactggaatagaatggactcgactggtacggactccaatggaatggaatcgaatggaagggaatcgaacggaatggactcgaagggaaaagactgcaatggaaaggtctcgaatggaatggaaattaatggaatggaatggaatcgaatgaaatggagtcaaaaggaatggaatcgaatgggaagaa

SEQ ID NO: 753246 - DNA, 638 bp, Homo sapiens
tgggctccaatggaatggattcaaaaggaatggaatcgtacggaatggaatctaatggaatggaattaaatggaaatgaatcaaattgaatagcacggaattgaattgaatggaatcgaatgcaatggaatctaatgaaacggaaaggaatggaatggaatgggctggaatggaaaggaatcgaaacgaatggaatggaatcgaactgaagagactggaatggaatgcactggaatggaagggagtgwaatggaaggttctcgaaagaaatggaatcgaatggaatggaattgaattgaacggaatagagtcgaatggaattgaatggaatggaatggactagagtgaaatggaatcgaaccacaaggaatggacaggaatagaatggtctcgaattgaatggaatcgtatggaatggcatcaaacggaatggaatggacagccacggaatggaatgcactcgaatgcaatggagtcgaaactaatggactggaatagaatggactcgactggtacggactccaatggaatggaatcgaatggaagggaatcgaacggaatggactcgaagggaaaagactgcaatggaaaggtctcgaatggaatggaaattaatggaatggaatggaatcgaatga

SEQ ID NO: 753247 - DNA, 593 bp, Homo sapiens
ggaatggaatgcaatggaatggaatgtattagaatgtaatgaactttaatggaatgtactcgaatggattcgactggaatggaatgttctggaagtgaatgggctccaatggaatggattcaaaaggaatggaatcgtacggaatggaatctaatggaatggaattaaatggaaatgaatcaaattgaatagcacggaattgaattgaatggaatcgaatgcaatggaatctaatgaaacggaaaggaatggaatggaatgggctggaatggaaaggaatcgaaacgaatggaatggaatcgaactgaagagactggaatggaatgcactggaatggaagggagtgtaatgraaggttctcgaaagaaatggaatcgaatggaatggaattgaattgaacggaatagagtcgaatggaattgaatggaatggaatggactagagtgaaatggaatcgaaccacaaggaatggacaggaatagaatggtctcgaattgaatggaatcgtatggaatggcatcaaacggaatggaatggacagccacggaatggaatgcactcgaatgcaatggagtcgaaactaatggactgga

SEQ ID NO: 753248 - DNA, 479 bp, Homo sapiens
acggaatggaatctaatggaatggaattaaatggaaatgaatcaaattgaatagcacggaattgaattgaatggaatcgaatgcaatggaatctaatgaaacggaaaggaatggaatggaatgggctggaatggaaaggaatcgaaacgaatggaatggaatcgaactgaagagactggaatggaatgcactggaatggaagggagtgtaatggaakgttctcgaaagaaatggaatcgaatggaatggaattgaattgaacggaatagagtcgaatggaattgaatggaatggaatggactagagtgaaatggaatcgaaccacaaggaatggacaggaatagaatggtctcgaattgaatggaatcgtatggaatggcatcaaacggaatggaatggacagccacggaatggaatgcactcgaatgcaatggagtcgaaactaatggactggaatagaatggactcgactggtacgg

SEQ ID NO: 753249 - DNA, 559 bp, Homo sapiens
ggagaaatgtgctttatatgagtactttgactgaagcgtagtaaaaagctaagaaaggcacagttagttttattggacatgtagttttgtgtgagtggccatccttgagagttcttcagttttagacttaaggtttttctgtttttttttttttttttttttttcgcactatttccctgagctcttccatgaagcaatcttttctcatcttctcccctcctccttgctttattatagtgttttctcacatttctgttatttttcagtcattttcaaccctatcataactctgccccactctgctattagattagtgcagaagtaattgtggtttttgawactgaaattattgctttctttgaggatccttttcctctcaaagaatgaaattctgagatcgtgtttgttttttctggtgtgtaaaaagggagttgatatgtacatagacaaagtttgctaaaatgattgctttaaagaacaatgccatctagaagtagctatccagacataactgaatgtcagaagcctcatgaaagattaaagatgaccattgaaatgg

SEQ ID NO: 753250 - DNA, 635 bp, Homo sapiens
ataaaataaaaatatatgagaacaattaggtagcatatgatgtatctcttaatgataaatattcttaaaaagcagctaaaattttttctgatctacttagttgcgcgtaacttggttattatcactgatgtgatcaaggtagcatttgagatacattcacgataatttaaatcctcaatacctttttaatccacataataactgttattctaattgctarttacgaattacatgattcctaataggagaatattattttatgctttaaataaatattttaatttaaaatggcatatgatattgagagaaataaagggcatcatatatattctgggtggaacaacatctggcaaacacatgattgtaatattcctttagctctgaacatcacatgcagatttaaaccttcagcataaattctctggagtgagaacacagaagaaaaagttaatgagattattatatctaactggacattttccttatccgtcattcttttctctagttgcccattattaaacattggtgtttatgacagtccttaaaacaacatggttagaagtccccagagctgattgagccatttgctcgtgggacacaatgaacctctgcacctccagctggaaccttttatg

SEQ ID NO: 753251 - DNA, 613 bp, Homo sapiens
tttcctgtagcagagtgcaggacatttgatatgaacaactagcaacgaaaatgtctagaaagaatgactcccaatcagaaaagaagattccgtaccagaaatgtttccgtgtggacaaacacaacagatgtcccctatacagacatgcagcaaccagttataagagagaagcatgttattaaattgttttaagggtttattaccaaggcttaagtcttgtccaaatccttcatgatgtgcaaaacaaccagaaatttttaaggacaggattcacatgatctgatttgtgttttaaaaataaaactttagagctaagtgtaaaataaaatggagttgaggaaaagggaccatttagtaggttgatccagtatttttgatagtaggtgatggtgatttggagtacagtagaagcaaaaaaaaaaaaaaaaaaaaaaawatggagagaactgagcaagtttaacgggaatttagtgggcagaaatgatagaacttggaggacaaacaagataaaggaaaaactaattcattcaggctgggcacagtggctcacgcctgtaatcccagcgctttgagaggctggggcgggcggatcacatggtcaggagatcgtgac

SEQ ID NO: 753252 - DNA, 562 bp, Homo sapiens
  misc_feature 126: n = A,T,C or G
gtgaaaaataatttgttttttttaataagtcacctaaagtctttttgttattgcaacccaaacagactaagacagaaattggtactgggattggatgtgttataacaaatacctaataagtcactntatagaaagcctcagtctcttagataatatctaggkggttatgaattgaatgttggtagatatatgaatgataaagaccattttgatgaggtcttaaggaaaaattaacatgtcatcagaaacaggaattaaggttacccttgttacaaagtggcaaagaactagggtgaattggttttggttttgtgtcttagtgttttgtattaggtagaagttgtaagtaataaaacttagtacttggctaaggtaatttctaagtatagtgttgaagttgcatcatggtttctcttaaatgcttattgtaaaatgcaaggagagaaattatactaagacaatttttaatcaaaagaaaagcaaaacctaaagatctagaaaattctcatcctgtacatattgaaaagaatgagaaacagtattcaggagagaataccaaaga

SEQ ID NO: 753253 - DNA, 592 bp, Homo sapiens
tatgaaaccattctgacacaaaatgtatgtgtgtggagatggggcactgccttgttgtcgtcagatgggtgtggaaatctaggtccctcactcatgatccacacacaagggagagcttttcattactgctggacatgtgtaagaattctggttcacactgggcctccatcaggcctccttactaatccccacgggtctccactgacactacagtggtagaaaaacttactggctggaggtagtgaaaggcctgactctccagcagattttmtgagacatcaccacagggggagtaggagggacaactgattactatctggtgatggtagaagtcgggctccctcatgatctgacactgacagacaccataaagaaggaggccattatttgcctggtgtgcatgaatgttctgactccctaattggccttttctgacaccaccttgctggaagaaggagaggtagaaatgctttattagtcagatttctccagagaaacaaaaccaataggatgaacatgtatacatacatgcatatatatacacaaatagatacatacagtggacccttgaacgacactgatttgaactgca

SEQ ID NO: 753254 - DNA, 605 bp, Homo sapiens
gcagaacttgcaggtttgttacataggtatacatgtgtcatggtggttaactgcacctatcaacccgtcatctaggttttaagcccagcatgcattaggtatttgttctaatgttctccctcccactgcctcccaccttctgacaggccccggtgtgtgatgttcccctccctgtgtccatccacgtgttcttattgttcaactcccacttatgagtgagaacatgcagtgtttggttttctgttcttgtgttrgtttgctgagaatgatggtttccagcttcatccatgtccctgcaaaggacataaactcatcctttctatggctgcatagcattccatttgaccatgaaaaagtcaaatccctgaatagaccaataacaagttctgaaatacaggcagtaattaattgcctgctaaccaacaacaacaacaaaaaaaagcctcggaccagatggattaacatcaaattcaaccagaggtacaaagaggaacttgtaccattccttctgaaactattgcaaacaatagaaaaagaaggactcctccctaactcattgtatgaggccagcatcatcatcctgataccaaactctagcagagaca

SEQ ID NO: 753255 - DNA, 526 bp, Homo sapiens
gctagcacttggagagataaggcactgcccagaagcctggacacatatgaaagaatgggaaggaacatgcacacacgtacacacatgtacacatacatcacacacacacacacacacacacgtgcacccacatcacacacaggaaacttccccaggacataaaaatatgacctcagagggacaagaagccctttgcacgtgaatgtccttaaaaaaaaccgattatgatacagtattccagaagaagaaactctgacracattaccttcacagggtctctcagaatattccacagggaagtcgggggctcctccctcgcagctacaagtgaaagacccgagggtgtttcgacaggatgtccccggcacacagtcgtcctccttcctttcacactcatcgtaatctgcacaacatttagaagacaaaacagaagaacatccctgggggcttgtggtctcacagcagcctggttgggggagagtgcatctcacagacaaagctggaaactccagccacagcagactgc

SEQ ID NO: 753256 - DNA, 528 bp, Homo sapiens
ctggataaatgaggaaactgaagttgagggtgagggatccacccgggggctacaaaacccgggcttgaatgcagggcttggttctcataggcctcagattaatccatcaggactctgggaaaatgggacaatttcccccagatttgtgctcaatgtgggacttggtgctggatgctgtcatcgacttgcaggacattaggcraatgagaaaaacagaagacaaggtgtgggatgttaggaagcaggacagcacacgcagtgtctaaggaatattctccccagggaactggtctcggctgctccttccagctagaaagccctcagcaggggctggcaagccagtggccgggcgcctctgccacgcctgtgtccgggccaacattgctaatcagtcactgcattttaggtccctacgtggcctcctcctgctgctcaattcagcatcccagctatccccgacccactcatcagaactggtccacagaaaagactgggggccgatacagcaggactagagctcagcggccc

SEQ ID NO: 753257 - DNA, 450 bp, Homo sapiens
tctggaggaggcagacaccctggtttgcggagtccacgctccattctgctgttgtcctggtcttgtaatgcccaaccttgtttttactaaccctgtttttaggcttgtttccacctgaatggactctcccttagctragagagccagacagactccatcttgcctctttcactggcagccccttcctcaaggacttaacttgtgcaagctgactcccagcacatccaagaatgcagttaactgataagatactgtggcgagctatatccgcagttcccaggaattcgtctgattgataacgcccaaagcctcgtgtctatcaccttgtaatagtcttaaagcccctgcacctggaactttacttttctgtaaccatttatccttttaacttttttgcctactttacttctgtaaaattgttttaactagacccccgctcctctttctaaa

SEQ ID NO: 753258 - DNA, 450 bp, Homo sapiens
tctggaggaggcagacaccctggtttgcggagtccacgctccattctgctgttgtcctggtcttgtaatgcccaaccttgtttttactaaccctgtttttaggcttgtttccacctgaatggactctcccttagctaagagagccagacagactccatcttgsctctttcactggcagccccttcctcaaggacttaacttgtgcaagctgactcccagcacatccaagaatgcagttaactgataagatactgtggcgagctatatccgcagttcccaggaattcgtctgattgataacgcccaaagcctcgtgtctatcaccttgtaatagtcttaaagcccctgcacctggaactttacttttctgtaaccatttatccttttaacttttttgcctactttacttctgtaaaattgttttaactagacccccgctcctctttctaaa

SEQ ID NO: 753259 - DNA, 450 bp, Homo sapiens
tctggaggaggcagacaccctggtttgcggagtccacgctccattctgctgttgtcctggtcttgtaatgcccaaccttgtttttactaaccctgtttttaggcttgtttccacctgaatggactctcccttagctaagagagccagacagactccatcttgcctctttcmctggcagccccttcctcaaggacttaacttgtgcaagctgactcccagcacatccaagaatgcagttaactgataagatactgtggcgagctatatccgcagttcccaggaattcgtctgattgataacgcccaaagcctcgtgtctatcaccttgtaatagtcttaaagcccctgcacctggaactttacttttctgtaaccatttatccttttaacttttttgcctactttacttctgtaaaattgttttaactagacccccgctcctctttctaaa

SEQ ID NO: 753260 - DNA, 383 bp, Homo sapiens
ccgcagttcccaggaattcgtctgattgataacgcccaaagcctcgtgtctatcaccttgtaatagtcttaaagcccctgcacctggaactttacttttctgtaaccatttatccttttaacttttttgcctactttayttctgtaaaattgttttaactagacccccgctcctctttctaaaccaaagtataaaagaaaatctagccccttcttcggggctgagagaatttttagcgttagccgtctctcggtcgccggctaataaaagactcttaattcgtctcaaagtatggcgttttctctaactcgcctgggtacaacagtctcaggccacaaggatgggtcctgcaggatccccttcgtggcacccaggagctggtg

SEQ ID NO: 753261 - DNA, 383 bp, Homo sapiens
ccgcagttcccaggaattcgtctgattgataacgcccaaagcctcgtgtctatcaccttgtaatagtcttaaagcccctgcacctggaactttacttttctgtaaccatttatccttttaacttttttgcctactttacttctgtaaaattgttttaactagacccccrctcctctttctaaaccaaagtataaaagaaaatctagccccttcttcggggctgagagaatttttagcgttagccgtctctcggtcgccggctaataaaagactcttaattcgtctcaaagtatggcgttttctctaactcgcctgggtacaacagtctcaggccacaaggatgggtcctgcaggatccccttcgtggcacccaggagctggtg

SEQ ID NO: 753262 - DNA, 677 bp, Homo sapiens
cagtctcaggccacaaggatgggtcctgcaggatccccttcgtggcacccaggagctggtggcttctgcactctggaggtcacagcccttatgtctcagtgaccctggccaacaccaagctggagccacacatccccacatccctccacagtgggggtgcaaggcaggaccttctgactgtacagaaactcattgcagatctggtattgactcaaaattagcagccaccacacacacacacacacacacacacacacacacacacacacacacacacacacacacacccctcccctggaagagatcacctgtgtgtcagtaggctgagccctgagtccctgccctatcccaacggctcagaccctggcctggcataaccacacaggtcaccctggtaactggccccaagcatcctacaggaaagcagcttccaaactgcactgaggaaccrggaggacttgggggcctctgagcacttagggtggtaggctcggggctccttccagctctttcacgtattggagttcagaataggattttggctacgaaagcatttcactgcagcttttagaaagaaaaggctgctgtagaagagagttcagtgctggctctcacactcagtggtatatgagaatcactctgggagctttgaaaacttccgacactctctcaacgcc

SEQ ID NO: 753263 - DNA, 582 bp, Homo sapiens
ggaactgatatttgggtggggtaactgacagtaaacaaagacacaagaacgcagcagatattggtaagagccacaatgaatcaaattcaggatcaggatgggaagaactgaatgaaagaaggagacacaagaagaacaaagaggaaggatgtcccaggtggagaaaagagcccacacaaggcccctgggcaggagggaaggcagagaacagtgcagctagaggtggtgaaagggacagcagagatggtccggggctgggtgccccyggagcaggcgcttcctgcaggaggtaaatgagggactgctctgggctcaacacctgtggatgtccacaagcacggagactccatgagggcaggaatttctgttctgcttactgaagtatcctaagggatggaaccatgcacacagtgtgtgtcgggagtgcagcaccatgaatgattgaatgagtgaagacaaatacatgactccgggatttggtcacacaaaggctactggtgaccctgacaagtcgtggagactccagaagactgactggcagtcgggaggtgagatggagacagggacacataggctttgaag

SEQ ID NO: 753264 - DNA, 598 bp, Homo sapiens
ggtggaggtgcagagagacactggggatcccgggggagcccaccagggaagctctgaggttctggaggcagcttgactcacggcgacctgtgtggaggaagaggtcacctgggtcagcttgcacgcaggaaaggtaaagttaatacagaaaaccccaggaggaggggtagtggaggaaacaccaacccgaggacatggcgtctatgtttactggagagggacagatcaagcccctaatgaaaaggcagccactcccagagtgcccagtggaacggggaccatggggctgtgcctgccctcaggtgagcgatgctcctgacacgccaactggtgggggtggctggtgaagayacctgagccagacgagcacagctggggcccctgcacctttgcaccatccgtggagaacccaccaggactctgggaacatctctgagtggggctgcccaagggtcgacctggtgggggtgggtgggttggctgatggttttcaaagagcagatgtctgcaggaactttagaactggtgagacagttctcacttcgaaagacaggagccccaggagaacaaagaaagacaagaggccagttttccctcg

SEQ ID NO: 753265 - DNA, 601 bp, Homo sapiens
ccaggagggtctcggtcacaccagggttggtgtcacctcccttcagggtgccaggcacccctcttcagaggtgctgatttcctcatctggcatccaggcacatttctgcggccgccctcccaggacatgacacagctcattaggtttcagctttttatcttcccttttatgagactacactgtagtaacctttgccggacttggatgttcccaggcctcccagtgtgttcccagagggtaactttttctccgactcctgggggctcacaggccctgctgtgtctgggtggtgctgatgctagctctgtccctgcaggcagacttctgcgttatgacccggctgctgggctacgtggaccccctggatcccagctttgtggctgccgtcatcaccatcaccttcaatccgctctactggaatgtggtaagtgatgtgcctgacactgtccagacgggagtatcycactgcttggtgagccccacatgcaggggatcgcggtggttgctgctggctggccagacagacagacagctctgctcttccctcccgtgtctgtcgctggctggtgtggagtactaggcgcttcctgccgtcttgcct

SEQ ID NO: 753266 - DNA, 647 bp, Homo sapiens
aggccctccaagcgcctctcgtggatccggcccagatccggtcctgaggcccctcccaccggagcctggggtgccctcacatgccctgcgccaacttcgcaacagcccagcttcccggctgctgtgtgccctgcctgtgtcaatattatgactggacttcctgtgggtcaggccgcacgtggggcgtccgcgtgaggtagccacgtggaagtggtacccccatgtccttgagcccactggagtctgtcccccttgccatcctcgggagcccggtgcggttgtgcccccctcatatctctgggcctctcagcacacaggtctgtcctgcctttgatagcaagacggaccygggcaaggttcctggcttctccgagccttggtattctcatctgtgacccaggcacagctgcctggctcactgttgcaagggccgggatggtgcctggagtgggtggtgcctggagccagctcagcgtcagtgaccctcgtctgttccctcttcctacctccagccttaccgtccgcttccccctcgggcagccaccccagggcatctgttgtggaactgctctgtgggttttgtccttgatacctttccaggcttcttcaggttgggctcaggcagggactcagggggacttagcttc

SEQ ID NO: 753267 - DNA, 606 bp, Homo sapiens
atacttgaggaatcatggtcataaaaatatgtatatatagaaaactgatatttgttaattgcctgctgtgtactaactatgtgtgtataatctcacagcaactctaagaggtaaatattattctacaaatttcacaaggacggaggttcagaggttattgatttgcttaagcttgcacagttagtgtgatggctaattttatgtgtcaayttagctgggccatggagcacagatatttggtcaagcattattctgaatatttctgtgaaattcacttttaaatcaatagatattgagtaaaagagattgctctctgtattgtgagtgggtctccaccaatcagttggaagtcctgaagagagcaaaaacttaaccatccctaagcaagagggaattctcccagcagactgcatttggactttctctgcaacactggatcttcttggttctacagcagaattgcctttggtcttaaactgcaactctttcctgtatctctagcctgcctgcctccttgttgattttggattcatcaagccaaaatcatatatagtcatataatcccattcttttaaataaatctctttctatatatatgtgcatgta

SEQ ID NO: 753268 - DNA, 606 bp, Homo sapiens
aagaaagaaagcctaggagagtcagataaatcttcagagaagaggtaaaatcagccctgagcctcaaagggtgaagaaaacgagcagaatctcagacaatacaaacaatgtacaaaggtgtggaaaataaaatggtgttttttaggagcagtggaaacctagtgtaacctgaggaaaggaaaaatgaggagctaagtgacatggtgatggatgaagatggaaaaaatatatatggttaaagactagtttaccatatcaggaagtctggacttgatcctgcagataatgggaaaccagtgaaggtatttaaacactaatggtgatttttaaaaaactcagtgtgtttaaaagggaatggatagtgcataatctcytttttatctctccttggttttgtttaagtgggctgctatgggaatccttagagtatcattttttaaaattaaaaaaaaatttattatactttaagttttgtgatacatgtgcagaatgtgcaggtttgttacataggtatagacgtgccatggtggtttgctgcatccatcaacctgtcatctacattaggtatttctgctaatgctatccctcccctagcccccccaccct

SEQ ID NO: 753269 - DNA, 615 bp, Homo sapiens
attacctcatgtttttgttgcattatctatcccttagggattccagtttgcagagttgcagttttctgtgtaatcatttgactaacaactgcctctctcactatatggtcaacaccctgtgaacaagtactttttgtttttactcacactatattccttccaccaagtatttgctaaataatgaatgaagcatttataatgttctacgtattcttctaagtgatttataaacattaacttgatttttctttacataaatactatgagggaggtagaattattttattctgtaagtcaagataatstaagttaccttgtggtaacagccccccaaatccagtgatttaagatgacctcagccaaagtttttttctggcttattctttgtgtaacatacaggttagcaggtggaaggcattgttgtagttattcagagactcaggttagatgtttcatcttgacacatgcttctgaattgttgcagaagggaagacggatgatggagaatcatgtcccagatcctaaatgcttctacctagaagtgacacacttgggaaaagcaagttgcctagccatgtctaactacaagggggtagaggtgtacagtcatagcag

SEQ ID NO: 753270 - DNA, 646 bp, Homo sapiens
atcaatgtaatttggcacattaacaaactaaaatggaaatcataagatcatatcaatatatacaggaaaagcactgacaaaatttagcacccatttatgattaaaaaaacaaacaaaaatttaaaaaaagtctctcagaaatctagggccagggggaccttgttcaacttgataaaatacactatagctaccatcatacctatggtgagcaactggatgtatttctcctgatatcagcaatagtgcgataatgtcttcttttacttctcctagtcaatactatgstggagtatctagttagtgcattaaggtaataaaagaaaagaaaactcagtttacatgcttggtgttcttcccaaacacccatgaaatcagtctaattatgagaaaaacatcaggcaaattctaatagagtaatattctataaaacatttgaagattactcaatactattgaggtaatcaaaaacaatgccagagaaaagtatagccaagaaaagcctaaggagacacgactacttcatgtaatgtggtaacttagatgatattctggaacagagaaaggatacgaagaaaaaactaagcaaagctaaaactatagcctttagttaataataatgtattcacgcttatctcttaattgtaat

SEQ ID NO: 753271 - DNA, 555 bp, Homo sapiens
caaactctgaagttttctatcatgaaagttcttttgttttgaatacctctgtaagatgataataaatttttctcaatgccccaaataagaaagaagagattataagaatccactcttcttagaagtgaaagagagaagcaagttacagraagagaaaaaggtactagtctttgtccaagagactagtcaactaatctttctttgtgtactatacaagagttgggagcaggagtagctctgagaggagtgagaatgtctcaaatcttttgaacagttccaggaacgacatctaatcagcagagaatgattatttatatgggaatttttgtatctaatattatctaattgttacttttgttatcaagggtagaaaaaccatggatgctactgaaaattcccccagttggtatctgcaagttgaatttctcaaccttccttgtattcccttggaaatatgacctaataattaatttgggatttgtcaaggaaaaagttgagtcttcctaaaactttagaaaaaaaaatctgcatttttgactgagatatatatatctc

SEQ ID NO: 753272 - DNA, 414 bp, Homo sapiens
atctgtaatccagcacaaaaatgaatataaccaagatatatcgtgacattcattttcctatttctctactgcactctgtctctattgaattagttgaagccaacctcatctgcctcagcctctataatagcaactttactggtgtttccagtttcattcttatctcccttttgctcctttgtcttaagtcatactcccagagaagctaaartctgggagaatggtttaaggcaaaactgtttttgcctaaaaatagttttggtgtaaaaattttaccatataatcttccttttaagagccctcagtggcttctctttttccttacaataaaatgcacaattgttgatatggtgaacaggattctccatcctctgatactgccagactccttctctaatatcctcacctactcat

SEQ ID NO: 753273 - DNA, 414 bp, Homo sapiens
atctgtaatccagcacaaaaatgaatataaccaagatatatcgtgacattcattttcctatttctctactgcactctgtctctattgaattagttgaagccaacctcatctgcctcagcctctataatagcaactttactggtgtttccagtttcattcttatctcccttttgctcctttgtcttaagtcatactcccagagaagctaaaatctgggagaatggtttaaggcaaaactgtttttgcctaaaaatagttttggtgtaaaaattttaccwtataatcttccttttaagagccctcagtggcttctctttttccttacaataaaatgcacaattgttgatatggtgaacaggattctccatcctctgatactgccagactccttctctaatatcctcacctactcat

SEQ ID NO: 753274 - DNA, 585 bp, Homo sapiens
tttcatcacttcacttcattgggatttcatttcagttttattcttcatcttctaactgactctgagagggaaaaaagcaaagaatgctgagaatgtgtagttgttcttttcctaataaaacctgggaattggttgtggactctcctgagggagctgtggctttgcccatagagtttggcatgggcctcaggaaggagatttcattgttatgatctctgagtaaaatgaggactggtgttcctgcaagttcaccatgtgaacagaggattctgcagtgggaagcaggcagtaaagctgcagattctgtgaagtttgtaatgtcttcccagtgctcactctcatcttccaaatactgagtgtctggggtgtaatttattacatggtaaagcaaatatttgtttctgctgttattgttaaacttgtataacasttttcaaagctattagctcattaaccacattgtcttgttaatgtcacatattgacaaaactgcattgtctctagggaagatgagatttgtttttagtgcaatggttacttgagcactgagcattgagctgatgttttatgataacatgttgagat

SEQ ID NO: 753275 - DNA, 557 bp, Homo sapiens
acataagccacaataggacataggcatgaacatggctctaatgtcctataacttccaccttgttaaagttatctggcaaaataaagaaacaccagcatcagttcataaaaaagaatgtacaatgttcataaagaagaattgtgcaagctaacaatgttaatttgtaaataagcctgcattcttagtgacagtgtcatagcaaaaggagtgttactttagcaaaagtaacaaaaaactagatttgaatctccgttagcytatatattcatggtgaaacaaaggtgagttttattgtagcacaggcttttaatatactggtcatggctgctaaattaactgtggtgatgtctaaagttttcaagtctcgtgacagattttgtttctcatctactctgaagctgacagctgccattacggctgcctctgcaagtcttactgacattctgggtgtcaagactgacgagcattacttgctatgatttaaagggaaaagaaatgcttgtcctttataaataagtattagatattggaaatatgtttattagtgaatagaaaaa

SEQ ID NO: 753276 - DNA, 525 bp, Homo sapiens
gagtgtgatatcgtgtgtttgtgctgcgctgtgatgggtatgtggttctacgaccttcactgtaattctctgagactccctcctgaacgttgctgagaatgtgacagtggcctgtgtcaccctctggctggtttcatctctgaggctgtgcagcggggcggcactgcatggccttctgtctgtccctgggtgtttttgcctgtgtgacggtgttgcgcggtcagtcaggactgggcgctatggcagctgcccaaaatatctccagctgcctgccgcgggccaggccccatcccagggtggggtgtgggtggagtttggtccatccttgcccttgggaaacccatgtcatggagggatggaaaaggcctgtgaaaacctcctctgtgyctcagacggtgttggacctccaatatccacccaggatcttacccccaaatctaatccctcaacccaaatctgattcatcagcaagtaccctcacagctcctagccccatgggagagaaaaaaagaagagaaaactgtc

SEQ ID NO: 753277 - DNA, 638 bp, Homo sapiens
agcctgagttttgggagtacgactctgtcttaagtacataaataaattgttccctatcacatgttcctttcaaagcctggccatcaacccacagcagctcctggacctacaactcaggtgtgaaatgctcctggagacaggcaatggctttccccactttgaaccctccctgcctggcctcaaccacctgtctcaaaagcttaaataacacttaaaggccagtcttgctccttaaatgccaagaatcaagatgggagtctcaccacctcacactcattaggatggcaatgatcaaaataacagaaaattggccgtgcacggtggctcacacctgtaatcccagcactttgggaagtcaaggtgggtggatcacttcaggtcaaaaatttgagaccagcctggccaacatggtgaagtcctgtctctactagagacaaaaattagccaggtacggtrgtgcacgcctgtaatcccagctacctgggaggctaaggcaggacaatcacttgaacccaggaggcggaggttgcagtgggccaagattgcgccactgcactccaacttgggtgacagagtgagactccatctcaaaaaaaaacaaacccagaaaatgacaggtgtcaaggacgtggagaaat

SEQ ID NO: 753278 - DNA, 630 bp, Homo sapiens
cacagttttgaaggctgggaagtccaagatcaaggccccagcagattcggtggccagtgagggcctgcttcctcatagactcactctagtctcacatggcagaaggtggagaagctctctggggcctcttttataagagcactaatcccattcatgaggactccacccttatgacctaatcacctytaaaaggcccccacctcctatcactgtgggttaggatttcaacatatgaaccgggggaaggggcacaaacattcagaccaaagcacaggtgctgtttagttaggcacagggtgggggttgtggcagggggaggttacagcagtaaacaacagacacaaacctctgctgtcacagatgtgagcgttctaatatgtaagacaacaaacaaggtaaatggggcctggtctccacacctgtaatcccaatactttgggaggccaaggccagaggattgcttgagcttaggagttggagaatgacctgggcaacatagtgagacccccgtctgttcaaatatatatatatatatatatatattttaaaattagctgggcatgttggtgcgcacctgtagtcccggctatgcaggaggctgagatgggagtcccttgagcccaggaagtc

SEQ ID NO: 753279 - DNA, 630 bp, Homo sapiens
cacagttttgaaggctgggaagtccaagatcaaggccccagcagattcggtggccagtgagggcctgcttcctcatagactcactctagtctcacatggcagaaggtggagaagctctctggggcctcttttataagagcactaatcccattcatgaggactccacccttatgacctaatcacctctaaaaggcccccacctcctatcactgtgggttaggatttcaacatatgaaccgggggaaggggcacaaacattcagaccaaagcacaggtgctgtttagttaggcacagggtgggggttgtggcagggggaggttacagcagtaaacaacagacacaaacctctgctgtcacrgatgtgagcgttctaatatgtaagacaacaaacaaggtaaatggggcctggtctccacacctgtaatcccaatactttgggaggccaaggccagaggattgcttgagcttaggagttggagaatgacctgggcaacatagtgagacccccgtctgttcaaatatatatatatatatatatatattttaaaattagctgggcatgttggtgcgcacctgtagtcccggctatgcaggaggctgagatgggagtcccttgagcccaggaagtc

SEQ ID NO: 753280 - DNA, 652 bp, Homo sapiens
cttcacgctgcaggaagaaagcggatcccggtcagtgggagagggctacttccagccaattggattcctccatcgcttccaggcaatgaggcctcactttgtttccgatatgggggcgaggggcagcgatctccccaatcctggccagtctcactttgctcaaatcaatggcgaggatctcaagatctcaaaacctccgctccctgtgcccaattgtgacccaattcccgccaacagaccaaagggattaacagcctccgccgtccacacccacacatgcaccctccggttgccccctgtaagraactgaggtgccctcccacccgctcgttcacacctacacgaggccggagcaaaggtcagtatccaccgcacccctcttgtccagcagccgcggttcctgctgcagaaagaaagcggaaatttctggaccccgtcacttccggtcgtacgttccgcaccgggaacggagactcagggtcgccatgttgggagaggcaggagtgggggcggtgcagagccgagacggcatcttgggcaggactgtgaaaccttagagaggatagttctgagggctagctcttaatggcggcgcacgtacctccatcttgggagtggcggcttctcaagccggaaagaaagttcctgaaaa

SEQ ID NO: 753281 - DNA, 484 bp, Homo sapiens
agccgagggtatcttttataccaacaaattagatgactgaggtgtaatggacaaatcctatacacaaagtgagggtatctgaatatgtgggcaggagtcaaaaatttttagctactttaaagtcaaactaaagtagcttcaaaaagacttctcaagatgcagtatggcctgctgaggtttttttgttttttttttttttaagacagagagtcgctcgtcgcccaggccggagtgcagtagcatgatctcagctcactgcaacctccacctcccgggttcaagcgattctcctgtctcagcctcctaagtagctgggactacaggcacctgccaccaygcccagctaagttttgcatttttagtagcgacggtttcaccttgttggccaggctggttttgttggccaattgtctctaaactgctgtcaaaaaaaggaatggatcagattgtcttgaatagggcagagctaacctgtaatcacctg

SEQ ID NO: 753282 - DNA, 484 bp, Homo sapiens
agccgagggtatcttttataccaacaaattagatgactgaggtgtaatggacaaatcctatacacaaagtgagggtatctgaatatgtgggcaggagtcaaaaatttttagctactttaaagtcaaactaaagtagcttcaaaaagacttctcaagatgcagtatggcctgctgaggtttttttgttttttttttttttaagacagagagtcgctcgtcgcccaggccggagtgcagtagcatgatctcagctcactgcaacctccacctcccgggttcaagcgattctcctgtctcagcctcctaagtagctgggactacaggcacctgccaccatgcccakctaagttttgcatttttagtagcgacggtttcaccttgttggccaggctggttttgttggccaattgtctctaaactgctgtcaaaaaaaggaatggatcagattgtcttgaatagggcagagctaacctgtaatcacctg

SEQ ID NO: 753283 - DNA, 644 bp, Homo sapiens
gactaaacatagtaaatatgtcagcactctccaaactgctctatttattgaaaacaataccaatcaaaatgttgcagtatctttttaatcgagagtaactcattctaaaatttatatagaaatacaaaaatctggaatagctaaacaaatttggagaggtcacactacccaattaaaagactatcatccttcagcaatcaaaatggtattggaatagttacatagatcaatggaaaggaataatgagtcaaggttatctactacacagatgtagcagagatttttgatgaaagtacaagagcaattcagtggagatattrcagtcttttaaaacaatgacattggaaaaaattattcacatgtaaaaaatgaaccttaaactaaatataacactatacaaaagttaaataaattataaatctaaatataaaatgtaaaactatattactattagaaaacatgggagaaaacctttgttaattgggattagacaaggagttcttacacatgacaccaaaagtatataacataaaattttaaaaaatggcttgttagactatatcaaaattaaaaacttttactgtgcaaaaggcactactaagaatgagaagacaagctacaaagtaggggaaatatttgtgaac

SEQ ID NO: 753284 - DNA, 595 bp, Homo sapiens
ccaacttgtttccactgaatgaaatttttttaattttagaactagaaaaacatattatcttagaaactgataaacttcttaacaaacaatagcttcaatcatttgaaacattttacattaaaaaggaactcttggttttaaaaaataggggcccctatagtctagactccrctggacactaacactcctgggaatgtctgtagcgtatattactctctacaggatattgatcgtgttttgatttgactagttggatgcttaggaaggagtccaccaattccatggactttaaccatagctcccaaggatgtcagtgtactaacaacgaactgctttgttcagttacccagcctattgcatgccaactcagcgatcttgtaattaggtaccattcaggctactctgacttagcctggaagagtagaagtaaataaatgtgttaacagtctgagtccttaaagttatagacttacttaatgtaaacctcagctgacaacagttttctaaatggttcttcaaacttccaaagactttggtttgaagcatgatggtgaaacatataacatcttcccctttaagacaatcctctggtcaa

SEQ ID NO: 753285 - DNA, 573 bp, Homo sapiens
tcatacacactatatatttatttttgttgaaagtctaactatagtgctgagagacaggactagctggatttcctaggccgactaagaattcctaagcctagctgcggaaggtgactgcacccacttttaaacacggggcttgtaactcagctcacatctgaccaatcaggtagtaaagagggctcactaaaataccaattaggctaaaagcaggaggcaaagaaatagtcaaatcatctatcatctgagagcacaggggagggacaatgattgrgatataaaccccaggcattcgagctgggagtgggcaaccccctttgggtcccctcctgttgtatgggagctctgttttcactctattaaaccttgggagctctgttttcactctaatcttgcagctacacacttttctggtccgtgtttgttccggctcaaactgagctttcgctcgctgtccaccactgctgattgccataatcgcagacccgtcgctgacttccactcctccagagctggcagggtgtctgctgagcttctgatccagcgaggcacccactgccgctcccgataggg

SEQ ID NO: 753286 - DNA, 579 bp, Homo sapiens
ggaattaacagataaacataaggaggcaaaaatcttgtacactgaaaattataaaacgttattgaaaaaatcaaagaagacaaaaataaatggaaagacatcctatgctcatgattggaaaaacttaattctataacgatattcatagtacccaaaaaatctatagattcattgcaatccctatcaaaatctcaatggcaatttttgtaraaatagacaaaacccatcctgaaattgatagggaatctcagaagactctgaatagtcaaaacaatctttaaaaagaagaccaaagttggagttctcatacttcctgaattcaaaacataatacaaatctacagtaatcaaaacagcatggtaatagcataaagagaaacatatagaccaataaaacagaataggcagcccagaaataaactcttgcttacatggtaaaattattttcaacaagggagtcacagtcacacaatagggaaaggagagcttcctgaataaatggtattgggaaaactagatatccacattcaaaagaatgaaattggattcttaccttaaacaatatactaaagctaactca

SEQ ID NO: 753287 - DNA, 553 bp, Homo sapiens
gacatcagaatcaggtttgcaatggaataggagctttccttcctcctgtcactttagccccaggctccacctcagagtctggaatgctcatacctatggcaggtgaccttgtgtaacaggttggggttaatgccattctgtcctccagcatggcactgaacttagctggactagagggacattttggggagatgtgctcagagtcctcctctggtcctcctcattcaccttctgtcttyctaaatgactgatggagaaactactaaggccagaccaggctctcaggaaaactctgggcctttagaagaaccactggggatgagttggtcttcagatatattcgttaacattattagctcagggtaaaaaaaataactcagaggacagggcagtctagcacaatggtcaagagcatgcatgggtttcggccttccacagagctgctttatcacaagtttatcagcagggtatacaacctctccaggcctcggtttcttcatcaataaatggggatagaaatggtacctaccttagagggttctggtgaggatcc

SEQ ID NO: 753288 - DNA, 643 bp, Homo sapiens
atggctgatgatcagagctagcctctccttgtctagtgttttcccagacagggcctggtgtttggctgaggtgcactaggacccctggccgtggtgtactggatggcatcagttctgatgggtcagatgtccattctaacaggttggtgctggagagggagcagttgttaaatatctttactatctcccctgctccggacacctagatgcccaaatatacagcacgtagtatcgaggcaggcccttttgattgacatcagaatcaggtttgcaatggaataggagctttccttcctcctgtcactttagccccaggctccacctcagagtctggaatgctcatacctatggcaggtgaccttgtgtaacaggttggggttaatgccattctgtcctccagcatggcactgaacttagctggactagagggacattttggggagatgtgctcagagtcctcctctggtcctcctcattcaccttctgtctttctaaatgactgatggagaaactactaaggccagaccaggctctcaggaaaactctgggcctttagaagaaccactggggatgagttgstcttcagatatattcgttaacattattagctcagggtaaaaaaaataactcagaggacagggca

SEQ ID NO: 753289 - DNA, 562 bp, Homo sapiens
ttttaccctccttgtatctcttcttaactctttccaccactgaggtggccagacctttctgggtcttttgccccaggggtgtggacagggtttaaagccagataaagaggaactccctggattttagcctcccaaagctgaagcccatagtgaaagcctgctagtgaacaaagcgttttggaggaagataagaaagagtaaggcttatcctacctagtctagagaatatgtggttgggctcagggaaggaaggagagatgaagggaaatccagattgtctagggatcctgctcctgtgcccttcttcctgctgrggaagcagtatgttagccagttctcgcattgctataaagaaataacctgagactgggtgatgtataaagaaaagaggtttaattggctcattgttccatgggctgtacaagaagcatggaagcacctgcttagaaatttctttggccagacaccctaaatcatttttctcaagttcaaagtttcacaaatctctagggcaggggcaaaatgccaccagtctcttcgctaaaacataacagaagtcacc

SEQ ID NO: 753290 - DNA, 562 bp, Homo sapiens
ttttaccctccttgtatctcttcttaactctttccaccactgaggtggccagacctttctgggtcttttgccccaggggtgtggacagggtttaaagccagataaagaggaactccctggattttagcctcccaaagctgaagcccatagtgaaagcctgctagtgaacaaagcgttttggaggaagataagaaagagtaaggcttatcctacctagtctagagaatatgtggttgggctcagggaaggaaggagagatgaagggaaatccagattgtctagggatcctgctcctgtgcccttcttcctgctgaggaagcagtatgttagycagttctcgcattgctataaagaaataacctgagactgggtgatgtataaagaaaagaggtttaattggctcattgttccatgggctgtacaagaagcatggaagcacctgcttagaaatttctttggccagacaccctaaatcatttttctcaagttcaaagtttcacaaatctctagggcaggggcaaaatgccaccagtctcttcgctaaaacataacagaagtcacc

SEQ ID NO: 753291 - DNA, 562 bp, Homo sapiens
ttttaccctccttgtatctcttcttaactctttccaccactgaggtggccagacctttctgggtcttttgccccaggggtgtggacagggtttaaagccagataaagaggaactccctggattttagcctcccaaagctgaagcccatagtgaaagcctgctagtgaacaaagcgttttggaggaagataagaaagagtaaggcttatcctacctagtctagagaatatgtggttgggctcagggaaggaaggagagatgaagggaaatccagattgtctagggatcctgctcctgtgcccttcttcctgctgaggaagcagtatgttagccmgttctcgcattgctataaagaaataacctgagactgggtgatgtataaagaaaagaggtttaattggctcattgttccatgggctgtacaagaagcatggaagcacctgcttagaaatttctttggccagacaccctaaatcatttttctcaagttcaaagtttcacaaatctctagggcaggggcaaaatgccaccagtctcttcgctaaaacataacagaagtcacc

SEQ ID NO: 753292 - DNA, 642 bp, Homo sapiens
tggctcttactcttccttttccaatcagtaactccaccaccactatcaccactgtatatacagtatcacactgtaggaatttattgcaatacacccaagaacatgtaggctgtttccttttttgtttattacacgtagtgctcttatacatgtctcctgaggtacatatgcagagtttctctagggctattatatagtaaagaatttgtctggtctttgttcccrgttaccagcacagagcttcaaaacccttggaaattcctgagccataggagtgtctttgttatgataatggggtgactcacagtggattcctacacagcttcaggatggagctggtcgtcaaaaagattgagcattagagggttgggactttcagctgcctgagctcttgggagaggtagggggctagagaccaagttcagtcaccttgccaatgattcaatcaaacttgcctgtgtaatgaaaccttaataagaactcaggacaaaggtcagtggagtttcctggttggtgtgctggaagggtgatgtgccctgactcacaaggagagggcataagatctctgagtttgggtcagggtccgagacccactctatgcatatttattttattataaataaaactataattgtaagtata

SEQ ID NO: 753293 - DNA, 569 bp, Homo sapiens
gatgagccaggagaaggaatttcacaagataatgtcatcagttaaggcaggaacaggccattttcacttcttttatggtggaatgtcatcagttaaggcaggaacaggccatctggatgtgtacatgcaggtcacaggggacatgatggcttagcttgggctcagaggcctgacattcctgtcttcttatattaataagaaaaataaaacaaaatagtggtaaagtgttgggatggcaaaaattttgggagatggtatggagagataatgggcgatgtttctcagggccacttcgacygggattaggggcggtgtgggaacctagagtgggagagattaagctgaaggaagattttgtggtaaggggtgatattgtgggactgttagaagaaatatttgtcatttagaatcattggtgatggcctggatacggttttgtatgaattgaaaaactaaacagaataagagaaggagaaaaacaggtattaaaggtctaagaattgggaggacctaggacatctaattagagagtgcctaaggagattcagcatagtcctgtcagcaaagat

SEQ ID NO: 753294 - DNA, 614 bp, Homo sapiens
ttttgcaaaggtggaaggctctctcttaaggccttcagttgccatgtaagaagcctgattgcaaattgccttgaggctgccactttctgaggaagccctgctgctcctgtgccctgctgcttcaatttcagccactatctgacctcaacttcaagggaagccctaagccaaagtctttgagctgaggcctttctgagtgcctggccctaagacattatgagagacaaccaaatgatcattgtttttgtaaaccactaaatctgggggtgatttactacaaaacaatagataacttgagcaaatttattcctaaattttaaccttttctattgctattgtgataatttttaaaaaattgtctctgtaatcattktcaacttttgtgactttgtctcatgcaacttgcacatttgtatatcatatagtgtaatgctacctctaaactgattttcatttgccaaatttaagttttcatctctcagctaatgaacacacaacttaggctattttaaatgctaacctgcctccttaacagctggtagttgaattttgccgtctggatatttttgggtctatgtttgtggaaatacttgactacatgttgcattttttct

SEQ ID NO: 753295 - DNA, 500 bp, Homo sapiens
aaaaatacctagattgtgtgactttaacaacaaacgtttacttctctgttttggagactgagaagtccaagatcaagttgctaatggattcggtgtctagggagggcccatttcctggttcctagacttcttcccagtacatccctacatggctgaaggagcaaggaaggtctccgaaaatctcttatatattttgacgattccrtttatcagggttccaccctcatgacctaatcatctcccaaaggtaccaccttctaatacgaccaccttgagggttagggtttcaacatatacattttgggaggcacagacattcagtctatagaaggtagtatatgtatgcagtggaatactacacagcaatggaaaatgaaccgtatgattcaggtaacaacatgaatgaatctcaaagacatacgctaaaagaataagacataaagtgaaagctatgatccctatttttataaagttcaaaaaggacaaaattaagttgtggt

SEQ ID NO: 753296 - DNA, 585 bp, Homo sapiens
aagtctagctacttgaactgccagccttacccctttacttaaagtgtgatctgtggaccagcagctgataaaggcagagtctcaggccccaccccagacctgttgagtcagaacctgcttacaacagactacaggtgattcaggtgtgcattaaagttggggaagcgctgccctaccactcatgtttcatcccacctcagcctccttaggtggaatccctcattctcttcgaatgcgtctttaaaaatgattttccctgtgmcctatttgtttcgggttttactatttaccagttaaactaggccttcctaatgaataaatgcctgatggtagttgaaatgtgctgtcatttcccaggtaacctaagaattttggaagaagcttcatttaaatcattatctaacccatggtttaaaaaatatctgactgtaatggtctgaacgtttgcgtcactccttttcccaagtccgtaagttgaagctcacagtgtaatggatatttgaagatgggtcctttggaaaggtaattagggttagaagaggtcacgacggtaggaccatcatgatgtgttgtacccttctaaga

SEQ ID NO: 753297 - DNA, 632 bp, Homo sapiens
aggaagacctaaacaacggaaatatgggaaatatatattgaattcgtgtgttgaaagactcagtgtcatttctctcaaattgattaataggttcaatatgttcccaataaaatcccagcaatgtagaaattgacaaacacattctaaaattcatatgaaaacactaaggactcaggggaggcaaaacaacttggaaaaagaacaaagttggagaattaacactacctcatttcaaaacttattataaagctacgataatcaaaatagtgggattaatataaaggtagacaaattcatctgtgaaacagaatgaaatatacagaaacagactcatccatataggagcagttgatttttcacaaagatacaaagaaaagtcagtgaagaaaggacagtctttttgacaaatgatgctcggaaaatcgatgtccattcacacacacacactgaaaagaattcataccccarctacatacaaatgtacaaaaaataattcaaaatggatctgtaaaaatcttctagaagaaaataaaagttttctagataccacaaagattttctagattttctaggcaaagattttctagataccacatcaaaagcacaatctatataagaacaaactggacttc

SEQ ID NO: 753298 - DNA, 632 bp, Homo sapiens
aggaagacctaaacaacggaaatatgggaaatatatattgaattcgtgtgttgaaagactcagtgtcatttctctcaaattgattaataggttcaatatgttcccaataaaatcccagcaatgtagaaattgacaaacacattctaaaattcatatgaaaacactaaggactcaggggaggcaaaacaacttggaaaaagaacaaagttggagaattaacactacctcatttcaaaacttattataaagctacgataatcaaaatagtgggattaatataaaggtagacaaattcatctgtgaaacagaatgaaatatacagaaacagactcatccatataggagcagttgatttttcacaaagatacaaagaaaagtcagtgaagaaaggacagtctttttgacaaatgatgctcggaaaatcgatgtccattcacacacacacactgaaaagaattcataccccagcyacatacaaatgtacaaaaaataattcaaaatggatctgtaaaaatcttctagaagaaaataaaagttttctagataccacaaagattttctagattttctaggcaaagattttctagataccacatcaaaagcacaatctatataagaacaaactggacttc

SEQ ID NO: 753299 - DNA, 626 bp, Homo sapiens
tggagatgaggagaggtggcagattcaagactcattttagaggtaggatcagcaggacttgactggtcggtgagggcaaaagaaaagggtgggccgggcacggtgggtcacgtctataatcccaacactttgggaggccaaggtgggcagatcatgaggtcaggagttcgagaccagcctggccaacgtcgtaaaaccctgtctctagtacaaatgaaaaaattagctgggcatggtggtacacacctataatcccagctactcgggagaactgaggcaggagaattgcttgaacccgggaggtggaggttgcagtgagccaagattgcgccactgcactccagcctgggcaacagagcaagactctgtcttaaaaaaataataataataatgcacctcagagtcaccctgccctgtcgtccagggaaaagtgagacagggatgggagggcrtccataaaggctgtgtcaccaagcagattgccaccgtgagcagttgttgcttagtacaaccgaggaagcttttaaagggagccggtgtaaaacacgcacctcaaagtcaccctgccctggggtccaaggagctgcagtatgtctaggccagcttctgtcagtcattgactgaga

SEQ ID NO: 753300 - DNA, 626 bp, Homo sapiens
tggagatgaggagaggtggcagattcaagactcattttagaggtaggatcagcaggacttgactggtcggtgagggcaaaagaaaagggtgggccgggcacggtgggtcacgtctataatcccaacactttgggaggccaaggtgggcagatcatgaggtcaggagttcgagaccagcctggccaacgtcgtaaaaccctgtctctagtacaaatgaaaaaattagctgggcatggtggtacacacctataatcccagctactcgggagaactgaggcaggagaattgcttgaacccgggaggtggaggttgcagtgagccaagattgcgccactgcactccagcctgggcaacagagcaagactctgtcttaaaaaaataataataataatgcacctcagagtcaccctgccctgtcgtccagggaaaagtgagacagggatgggagggcgtccataaaggctgtgtcaycaagcagattgccaccgtgagcagttgttgcttagtacaaccgaggaagcttttaaagggagccggtgtaaaacacgcacctcaaagtcaccctgccctggggtccaaggagctgcagtatgtctaggccagcttctgtcagtcattgactgaga

SEQ ID NO: 753301 - DNA, 613 bp, Homo sapiens
tgatggctgagcacttcctgtgcaccaagccctgtcctaggcccttgggacatagtggggaacaacgtagagagaagcccctgacctgatggagcccacctgctagctagggagacagacactcagcaaataactgcttaaaacataaaatatatgagacagggaaaagtacactggagagaaataaagcagtggacggggtaggggctctgatgggatggagaggggctgcgtttttaaatggggagcttcctgagtgggtgaaattgtaggggagacttggaggaggtgaggggtttggccaagcaggtgcctgaaggataagtgctcctgagggaaggaacagaaggtgcaaaggccctggcaggagcgtgcctgtgtgctgcggggcagggaggagccacygtggctggaggagggtcggggaggggaggtcctgggctcacatgtacacatgtacgcatgtattcgttcattaatttgacgtctacctagccctaccaggggccaggctctgagtatctgtacctcccaccccgaccctgcccaacacagaggcctgggagggggtggcccacctgaaacacgatcctggatttctcaagcaggtact

SEQ ID NO: 753302 - DNA, 654 bp, Homo sapiens
gctttgggatgcatgacggtcacctagggtcccaggagccctcgagaggggctagtgacacctcgggaggggcttctctggccattattaaggcatgaaaggcaggaaagaaggcttgcacctataggttcctataggttccataatatgcggcgctattaatggaaacctttccaggatgtaatctccttgagggcacggcctgtgtcctcacattgagcatgycctgagggacaaagggagggatgagagagggctctcatcataaggtgaggcaaactaagcaaagcagaaagggacagataaagggctgggcgtgcttggtacacacagagatccttccacatgggggtcaaggggcttcctggaggaagtggcacctgacttgggccctaaaatctgggtggagggccccacatggcacaaggcccggggatgggaatgggcccagcatgctcagtcttcctggcactcaccacggttggtgacaacgaagataacatattcattgaaggcctcagggcgtgtcagagccatctcagcacatatctcttccaccacgtccagggccacctgggggtggggcggaagagatgaggccatgccagttgggcttgacctctgtccttctggccccactcaggcccccagagg

SEQ ID NO: 753303 - DNA, 557 bp, Homo sapiens
gcagcaggtgtagccataggtttcaaggaatacactgcctagtaaagggaaggcacacaaatacagatgaggaagagggggatggagaagctgggtagcggtaactcagggcagtgatccaagtcctttatgaagccagaacagaagggagctggcatggaaaacctcaaagccctcagkctccttgtgtggtacagagaaggctggcaagtcaggcaggtgggagcaaagggcagaaggacccatgtaatagactgggtgggaagcgataggacatagctagcagagaccctgaaggcaccttttccagggtctgctagacacaaagtagtaacttagttccgaaggagtaggggctgcagtcagagcaggactctaaggatactagaggatgctggggagaagtaagcaggagggaaatccaagaactgccttgggctaggctgcttggcatccttggtaacaactgcatctggtcctcagtttcccccattccccatggctgcctctccacattccactggctggcctactgtacatagatgggaaggatcaga

SEQ ID NO: 753304 - DNA, 639 bp, Homo sapiens
ataggggtagctggtttctgaggatccctgaggcccctctttgtcttctgttccacctgggctcagcccaccttcccccctcacctgggtgccaggtgcagctgccaggtgggtcatctgtcctttcaggatcatcagggcctcctcatgagggtctggccgcttcatgaacactttcccgccatccttcctgtgggcattggagtactgtggtgggttgacactgagtctccctttcccatcacatagtttgacagtaggaaacttcctcctcctccaccaccccctatcattataaatgagaatccagggagaagcagagactggcctgaagtcctacagcacaacctagacaacagcagggcctcatctggactcatcagtataaagaaactccctccctaacaggagctgggcagggcgcttcaacccrgtaagctggtgggccatgatggacactcaggtacagtgagggggctggagggctgggggcaggggcagtgctgacctgagggcctcaggcggcctccccggaacggctgctggtactgcctgacaatattcttgatctgctgtgtgggctgtgggaagtggtcagagttgagcgtagagtcaccggaccagctctggggagggtga

SEQ ID NO: 753305 - DNA, 707 bp, Homo sapiens
attaaattcagtttgctagtattttgctgaggatttttgcatcaatattcatcagagatattggtctgtagttttattttttttgacatgtctttgtctggttttggtatcagggtaatactggcctcatagaatgtgtttgaaagtatttcctcctcctcctctatattttggaatattttgagtaggattggtgttagttcttctttaaatgtttggtagaattcagcagagaagccaccaagtcccaggcttttgtttactgggggactttttattacggttttgatcttatgacttgctattgtttttsttcaggttttggatttctccctggttcaatattggtaggttatgtatgagtctaggaatttgtccatttcttctagattttcaaatttattggcatatagttgctcatgatagccactaatgatcttttgagtttctgcagggtcagttataatgtctcctttttcatttctgattttatttatttggatattctattttttttttagttagtctagttagtctggctaaaggtttgccagttttgtttaacttttcaaaaaacctactttttgtttcattgatttttgtattcttttcttcacttcaatttcttttatctctgttctgatcgttactatttgttttctgctaccaattttggtcttgggtttcctcctgtttttgtagttctt

SEQ ID NO: 753306 - DNA, 643 bp, Homo sapiens
tggtgtcgtacacagctttgatttttgtgatgttgctgcttatgtctgccttgatgggagtaaacactggggacccaaggcaatcgaagaagggcggcaggtgggacaccgcctcgaggaagggcccagtctcgatctgcttgtccgcgggcarcggcttcagcaggtgttcggtcagcagagccatttcgggttcgaggcccacggtgatgccccagccggcaccgcgggcgtccacaccgcaccccccgccgccgccgtcagcgcccgggcagtcacagccctttttttggtatgttttcatgatcacagtgataatgcatctatgtgtgtattttaattccaaatgacaacgtagtacatacaaagtgaaagactccctaaatctgttctccagaggcttccctttgctaccctttttattcttactttttaaaattatgagctctggatataaacatatttctatttttaatttatcagtattaaggagtggcttaatggacatcccttataaagtgtgaagagttcagcacatataatatatccttatttttcctccctctacttcatgaaatttgttatttatttccatttggtatgaatattaaaaaattaaagccttatcttctatcactgccct

SEQ ID NO: 753307 - DNA, 626 bp, Homo sapiens
atgtgtttttcttaaaacaaattaattcatgctaataaattaacctaaccaatgtaacatactcatctggaataaacgttacttttcaactctttaaataaaaactatctcaacaagatgacaaaacagagaacakaaactttgtagtgttttacttttttttttttttttttgagatagggtcttgttttgtcacccaggctggagtgcaatggcacaaacatagctcactgcaggctcaagtgatcctcccacctcagcctcctgagtagctgggaatacaggtacatgccactacacccactacacacagctacttttggtatttggggtttcatcatgttgccctggatggtctcaaacttctaagctcaagcgatccgcccacctcagcctttcaaaatgctgggattacagtcatgagccaccacgcccagcctacttcttcaatttcaattccaaatgaggctatctctgccccaaactgtctcaggaccactactgatggactcagaaagtcattcccattctgggcttgtgtgaaggctgccaatcttctcagtagttttacacacaaagctaggaatactggaagtcaaataccaaaaaattaacatgaagaaaat

SEQ ID NO: 753308 - DNA, 626 bp, Homo sapiens
atgtgtttttcttaaaacaaattaattcatgctaataaattaacctaaccaatgtaacatactcatctggaataaacgttacttttcaactctttaaataaaaactatctcaacaagatgacaaaacagagaacataaactttgtagtgttttacttttttttttttttttttgagatagggtcttgttttgtcacccaggctggagtgcaatggcacaaacatagctcactgcaggctcaagtgatcctcccacctcagcctcctgagtagctgggaatacaggtacatgccactacacccactacacmcagctacttttggtatttggggtttcatcatgttgccctggatggtctcaaacttctaagctcaagcgatccgcccacctcagcctttcaaaatgctgggattacagtcatgagccaccacgcccagcctacttcttcaatttcaattccaaatgaggctatctctgccccaaactgtctcaggaccactactgatggactcagaaagtcattcccattctgggcttgtgtgaaggctgccaatcttctcagtagttttacacacaaagctaggaatactggaagtcaaataccaaaaaattaacatgaagaaaat

SEQ ID NO: 753309 - DNA, 546 bp, Homo sapiens
aattacattttattttctatgcatttttgacaaatgcaaacatttctgcataaaagtgacagtagagaaagacatgccaaacattaaagtagtctcatggagctgaaatgagacaggaatcaatcaccttcaggcagagcaagcctcaggaagtaggaggatataagaaggtaagaggaatagtctcatttggcatgaggatttgctttcygttcttctctatcctgtttgacatcccaagtgagtggcttccgtgtaccacattagtaggattctttttatttctggtttctaatgaaattgagacactgggacatactggcaggagactggaagacagcaggagagtgacttgggatttccatctcctggctctctgcctgcgtattagttccttcttgcattgataaaaagaaatacctgagactgggaaatttatgaggaaaacaggtttaattggctcatggctctacaggctatacaggaagcatagcagcttctgctttaggggaggcttcagaaagcttccaatcctggtgaaaggca

SEQ ID NO: 753310 - DNA, 546 bp, Homo sapiens
aattacattttattttctatgcatttttgacaaatgcaaacatttctgcataaaagtgacagtagagaaagacatgccaaacattaaagtagtctcatggagctgaaatgagacaggaatcaatcaccttcaggcagagcaagcctcaggaagtaggaggatataagaaggtaagaggaatagtctcatttggcatgaggatttgctttctgttcttctctatcctgtttgacatcccaagtgagtggcttccrtgtaccacattagtaggattctttttatttctggtttctaatgaaattgagacactgggacatactggcaggagactggaagacagcaggagagtgacttgggatttccatctcctggctctctgcctgcgtattagttccttcttgcattgataaaaagaaatacctgagactgggaaatttatgaggaaaacaggtttaattggctcatggctctacaggctatacaggaagcatagcagcttctgctttaggggaggcttcagaaagcttccaatcctggtgaaaggca

SEQ ID NO: 753311 - DNA, 546 bp, Homo sapiens
aattacattttattttctatgcatttttgacaaatgcaaacatttctgcataaaagtgacagtagagaaagacatgccaaacattaaagtagtctcatggagctgaaatgagacaggaatcaatcaccttcaggcagagcaagcctcaggaagtaggaggatataagaaggtaagaggaatagtctcatttggcatgaggatttgctttctgttcttctctatcctgtttgacatcccaagtgagtggcttccgtgtaccacattagtaggattctttttatttctggtttctaatgaaattgagacactgggacatactggcaggagactggaagacagcaggagagtgacttgggatttccatctcctggctctctgcctgcrtattagttccttcttgcattgataaaaagaaatacctgagactgggaaatttatgaggaaaacaggtttaattggctcatggctctacaggctatacaggaagcatagcagcttctgctttaggggaggcttcagaaagcttccaatcctggtgaaaggca

SEQ ID NO: 753312 - DNA, 573 bp, Homo sapiens
gtgctgagattattggcaagccacatgtggaagaatgaaactggatccttgtctctcacttaatacaaaaattgatacaagatggatcaaagacttaaatctgagacctaaaaccataaaaattctagaagataacatcagaaaaatgcttctagacattcacttaggcaaagacttcatggccaagaacccaaaagtaaatgcaacaaaaacaaaaataaatagataggacttaattaaactaaaaagcttttgcgcacgaaaacaatcattagcagagcaaacagacaacccaccgagtgagagaaaatcttcacaaactaagcatctgacyaaggactaatatccggaatccacaaggaactcaaacaaatcagcaagaagaaagcaaacaatcccatgaaagagtgggctaaggacatgaatagacaattctcaaaagaagatatacaaatggccaacaaacaggaaaaaatgcttaacatcactaatgattagggaaatgtaaatcaacactgtaatgcgataccaccttactcctgcaagaatggtcataatttaaaaatctaaaaa

SEQ ID NO: 753313 - DNA, 635 bp, Homo sapiens
gtgagtgttacagctcataaaggcagtgtggacccaaaaagtgagcagcagcaagatttattgcaaagagcaaaagaacaaagcttccacagtgtggaaggggacctgagcaggttgccaccccagttcaggcagcctgcttttattctcttatctggccccacccacatcctgctgattggtccattttacagagagctgattggtccgttttgacagggtgctgattggtgcatttacaatccctgagctagacacaaaagttctccacatccccactagattagctagatacagaatgctgactggtgtatttacagtcccttagctagacataaaggttctccaagtccccaccagagtagctagatacagtgtcgattggtgcattcacaaaccctgagctagacacagggtgctgattggtgtgtttacaaaccattgagctagatacagagtgccgattggtgtatttacaatccctyagctagacataaaggttctccaagtccccaccagacgcaggagcccagctggcttcacccagtggatcccgcaccggggcacaggtggagctgcctgccagtcccctgccatgtgcccgcactcctcagcccttgggtggtcaatgggac

SEQ ID NO: 753314 - DNA, 617 bp, Homo sapiens
ttatagctacatttgagccttttccttttaaattactcaaagaatttaaacaagctattaatcactatggaccaggttcctcttttgtaatgggactgtaaagaatgttgctgtctccagtcagatgttgccagcagggacgataggattatttctaggtagatctagtttaaatttaaaaggagtgcaagtacaaacaggagtcattgattcagattacaatggggaaattcaaattgttatgtctgctttggttccctggaaagcgagccaggagagcatatagcacagctcctcattatgccacatgtggaaatggggaaaagtgaaattaaacaaacaggaggatttggaagcacraataaacaaggcaaagcagcttattgggtgaatcaaattactgataaacatcctacctgtgaaataactattcaggggaagaaatttaaaggtttggtagatacaggagcggacatttcaatcatttctctacagcactggccatctgcgtggccaattcaacccactcaatttaacatagatggagttggtaaagcccgtgaagtatatcagagtagttatattttggattgtgaagggcctgatggacaacctgg

SEQ ID NO: 753315 - DNA, 563 bp, Homo sapiens
cattctctcaccatcagagagagaataatctggcaattgtgccaaagacttggagtgaaaagacctgtttactgttcctggctctgactccagcttgttgaatgtttttgagaaatttatttagcctctccatttgcttgcatttcctgtactataaagatgcctctgaggatttggtattgaggctcatgagaatccttatttgaaaggcagtacaggaatgtctttatccacatatttttgaaagtaagggacttggatatcaacaaaaggaaaggcaccctcccaagagagaaactaaggagcaatgaaaactctaaatcaggttaggtgaggtgataaattataaagtttattcaatttttcagtattactaattagtttattggcccaaaccaaggtagatcagtgcaaaacaasaaggctttatttcaagcagagagccactcccattcacaattgctacaaagagaataaaatacctaggaatacagttaagaagaaaagtgaaggacctcttcagagagaactacaagccactgctcaaggaaatcagagaggat

SEQ ID NO: 753316 - DNA, 606 bp, Homo sapiens
tataattgtactaagtgggatttgtaagtatcaaggatgttaatcagtcacataactaaacacatgtcatatacctagatgaccatcatgctattatagaaacatagtcctgatccccaaaatgaggtgcccatgaggtacagcctttcaattttggacatagaccaaactgtctcaagcttggtcaraaatcgattaaagacccatggcattattcagtctctgaaccaaaatacactatactgattgccagtgttgtatctgtgacactttcaagatgctctgaaacctgtttgaagcaaattatctccaaactatccacaggctttgacagagcaatctcaatgcaaaaaatcaatgggaataagatcagtgttcaacaaaccgtaaactcccactgccttcaatgatatctaaatactgaaattgctcaagtctaaaaaaatctaaatccagaaaatgcttaaaaatgtttggaagctgttgtctaatttcagacacaatgatttttttaaagattttattaaaaacagccccactcttctagttttgtaactttccgtttttagaatattaactaaagtctgttccagtgcttactatgtg

SEQ ID NO: 753317 - DNA, 547 bp, Homo sapiens
caatgtgccagaaagtgcaagggaatcaaggaaaggtttctggtctagtggctgttctgtagtgtagctgctgagatgccaatcacaggcatggcaaaatacaaaagacacacactaaaaaggaagagcaccaggtcgaacagcatagagagcgtagagaagatgagagaggacatggtggagtcagaaaggtgtcatggaaaaaacaggtctaatggatgagcaaaatggggctrgagagagttaaggagtggcaaaagcagggaggcacagatgaagcatgctgggtttgaagaatggcgagatgacctacgcaggaattctagctttactattactttgcctccctgagaactcttctgcaaatgactttcctgaacacaaacacagattactggttatttctgaaatagtagtagctggacagacctgagcaaactttactctcccacttgcttttttccaagacgaatagcatgtagtctgcaagaacaaagctaagtagtgtgcacgaggacggtccgagcagaataaagtgtggtaacat

SEQ ID NO: 753318 - DNA, 545 bp, Homo sapiens
caagctcccctttgttttttgttcatttgttcatgccttcatttaatcagtatttattaaatgcctgtgatttgcctggtacattctagactctgggaatagagtggtaaataagacagagtagaatatagttaacagactagtgaataaaaaagrtaatgcaggtactgtagtgtggtgtgaggcaactgaaaccacacactgggatagagttacttggggatgaggtggaggaggcactattttattttattttattttttaatctcaaaatctcacaaggaggcactattttagatcaggtggacaggaaggcctttccaagggagccacattcaagccgtcataaaatgcccagaagccgataaggtaaatgtctgagaacagaacctgccttgccaaggaagtgcagagactcaggggtaggaatgagttttctgtggcacataatatggtcagggaagcgtgcagggctacagaaggttgggcttgcatgatctggcaaggtatttgggctttattctgaaagggttttctatatggga

SEQ ID NO: 753319 - DNA, 598 bp, Homo sapiens
gacggagctcgccctgttgcccaggccggagtgcagtggcacaatctcagctccctgcaacctccacctcccaggttcaagcagttctcctgcctcagcctcccgtatagctgggattacaggtgtgtgcctccacacccagctaattgtttgtatttgtattagagtcgaggtttcaccatgttagcctggctgatctcaaactcctgacctcaagtgatctgcctgcctcggcctcccaaagtgctgggattacaagcatgagccaccatgcaggaagtagcattttaaagaagcaccacccaccccctcattcattgtgagccatgaagttgggcattcgttgccctggaggatcaggtagctaaaagagatggtgacccgtgaggatctgtgacagtgaatgtgcaggagattttggtaagtctgcttatatagagattctgtttaagacccctasgtgttcctcctaaaaataatgtggttttaatgaaggaaaaggggcctatttctcacctcattaacaagctctgagaagtttctctgtgtcattatatagttagtagaagagggttgtgtgttgtaatcttctatttct

SEQ ID NO: 753320 - DNA, 547 bp, Homo sapiens
acaacagaactgaaagcagggactgaaatagatatttgtacaccaatgctcatagcagcattattcacaatagggaaaaggtggaaacaacccaaatgtcaattgacaaatgaatggacaaaaggcggcatatacagacaatggaatattattcagtcttaaaaaggaagtgctgacacatttaactacatggatgaatcttgagacattatgctgaatgaaataagccakatatacaaagacaaatatgattccacttatatgaggtaactggaataatcaaattcatagaaacagaaagtagaatgatggttaccaagggcgatggggaaagggaatggggagttattgtttaatggatacagagtttctgtttgggataatgaaaacattctggagatggatgatggtgatggttatacaaccatgtgaatgtacttaatgccaatgtacatctacaaattgttaaaatgctaatttttaaaatgtattgcgcgcacacacacacacacacacacacacacacacacgagtcaggactggccag

SEQ ID NO: 753321 - DNA, 624 bp, Homo sapiens
cacaacaagagggggaggagttaattagaacagttaagaaagctgtaaaactgtataagaaaggcacgtccaaatacattgcaaagtgaactatggcatgatttcgaacaatagagggagtctaagaaaagaaaatccacttaggttccatgctgtgaattgtcgccttcaaatgacacaggagttagggcattgcacccatggagaatgaaatgyaatcctattttacttggcaagaaatgaaaagcaaatagtttaattacatacatttatttatttcttatcaactatgagagataactcattgaattaatcctcaaccttaaatgtattacaaaacagaatataaacatcaaccttgatgatataaaatgagaagagtgtagaaaagaaggaagtaaataataatatcctcatctaatataatagaaagtcaagatataacagcttaagttggtgaagtaagaaatagaagtttaaatatgatatataaagttacaaaggcaagcaacaaaactaaaataatcactgccaaaaatccaaatggagagataaaaaaaaaaaaacttggataagtaatggaagtaaatcctcatctttcatagtggagagttagtagaaata

SEQ ID NO: 753322 - DNA, 598 bp, Homo sapiens
aaaggagctgcttcatcatcagaagcaagctgggcacgattataatgagtggcaaggtcagagtggcagccagggagcttgacctgcagagagctttagagactgttaaaataacacggcatctctacgggcaaaatagatgggtagccaacaacacatttctccatcttttggatggtcaggtaaaaacacgttgctcctaaagccaagacacacatagagcaagcatcytggtttagtatctgtatccatcgaggtctaatcagaaaaatagaaatcatgatacgtcacacaaaggggatttaacacagggaattggttacagaaatattggcaggttgagagggcaaaacaagcatgctgaggtcactcagagatgaataactgtagaaggccgtgccatgttatattatagctcagggagctcaaaggaagaattggagtcaccagaatctaggagcattgagatgaggctcttacttagaaaaatgagatcctggactctgaaccaatgccataatggggtgagactttgagggtcttctgggaagaagctaaataattcgtggccagagggcaggctatggttcactaaaga

SEQ ID NO: 753323 - DNA, 620 bp, Homo sapiens
tgatgggaggattgctgtgtcctcatatgacagaagagtgaatgagaggaatgctttgcgatgtcccattcccaagggctttaatctcattcaccagggaggagtcctcatgacctaatcacctcttgaaagccctacctcttgaggcttgctgctcgggctcagagcagtcttggctgccccagctgtggcacagataggtgaaggtgtgacttgggccatcactctagaaggtataagtgatgagtgttggtggtgtccacatggtactaacttcacaggcttgtagggtagaggtgctttagaggtatggcttcctccacctagatttcaaaggatgttgacagcctcagggctcaggcagagacttgcctcaggagcgggccactgcagmaagacccctactaaggcaatgcttagtggaaccataggggcagggtcacccccaacaccccataagtgtatgtagagctaccagcatgcgataccagcttgggattgctgcaggcacctgactccaaccagtgagagctgctgcgtgggctgtgcccagcaaagctgtgagggggctgtgagggctgtctaaggccttaagggcccaacctctgccccagtgtgtc

SEQ ID NO: 753324 - DNA, 646 bp, Homo sapiens
atcagaattagggaactttattatatgctgccgctactactactggtatcaatagcaaccattttttggacacttagaagctgacaggcattggatggatgtagtcctatgtcatgtactccacaggccaccctcaagctaccaggcccaaagccagcagctccactgccacctgtttcagcaaaatgggatccycagcagagctcgtttcccagaagactcatttctgaaaggaatacagcacaaggctcctgattgtcagcacctggctccattctttacctcctcctggcaagggactgggactttgagtttggacttcagcactaggcagacaggacaacagtgataggcaccaagaatgacaaatgtccacttgtctttctaatacctacacataatcttcttatgtgcttaaactttcaagtaaaaaatccctcaatggaactgaataaattaaaactcactctatcccaaaaggaaaccactcaagagtttctctttttttgcatacagcactgaattcaggaatttggggccaagtttttgttttttgtttttttttaaccaagttttcttccaatcccatattggtcttctgctgcctctggactaaatctgtgaaggtcaccatcacaacacattc

SEQ ID NO: 753325 - DNA, 555 bp, Homo sapiens
aatgtgtccaggagagcaaggacacacatgaaagcacctttatacatttctgcttgcattgagtttgctactgtctcattagtgaaaacaagtcacatggctaaactcagcatcacagtgggggaggactgcagcattacagggcaaggggggtgagatcaccaaaataaacgtaagatttgaaaattttatgttttcatraggatgagtcgtttaacttattccagctagacaaaaagaaaagcaagcagaaattccaaagttctgtttgcggttacattttatacaaaacatgtggtgtctcaaaagcattaatttctcaagtgatctttgaaaacactgggaattaagtgattggtcacagactttgggaattccaaagtttttattattagtagtgtattaatcagttttcacactgctgataaagacatacccgagactgggaagaaaaataagtttaatagactcagttccatgtggctggagaggcctcacaatcatggcggaaggtgaaaggcacttcttacttggcagcagtaagacagaatgaaa

SEQ ID NO: 753326 - DNA, 404 bp, Homo sapiens
gcaccatatgtgtaaccaaattctcttttccctttgccataatgaaaggtaataaaactcaaagaggttattctattagcctggagcctggagtgcaaagatgttgagaagaaccaagattacgtaagtaagaaataaacaatcctgttataagctaaagagttatgggagttgcttattacagcagtatgaccgaacatcttctgatatgtctaaattattttaagaagcatagagtaagaaaaaacttaaaatgttraataaagatcaaataaggtaaggaagatagaagaatgtctaatgaatttatcagtgagaaggtcaatggttcactaacaagaacagtttcagcagagtggtgagagtataagtcagaaagattaattatcctgcaaatcataagt

SEQ ID NO: 753327 - DNA, 542 bp, Homo sapiens
tttgtattgagacagagacacttactatgtattatctaattagacaggtaataactggcactatgagctaatatattttgtagaatatgaggtttacatttaataataagacttcatattctatccattgacaatataataccatttttaggtgaatcttaaaacatatattgtagcattctgaatagggaggaagataatactggttaaaataataatcttcaggctaggcrcggcagctcacacctctaaccccagccctttggggggccgagctgggggcagatcacttgaggtcaggagtttgagaccagcctggctaaaatggtgaaatttcaacactactaaaaatagaaaaattagccagatgtaatggcacttgcctgtagtcccagctacttgggaggctaagacaagagaatcacttgaacccaggaagcagaggctgcagtgagctgagatcatgccactgcaccccagcctgggtgacagagagagattccatctcaaataataatagtaataataatcttcagatatat

SEQ ID NO: 753328 - DNA, 542 bp, Homo sapiens
tttgtattgagacagagacacttactatgtattatctaattagacaggtaataactggcactatgagctaatatattttgtagaatatgaggtttacatttaataataagacttcatattctatccattgacaatataataccatttttaggtgaatcttaaaacatatattgtagcattctgaatagggaggaagataatactggttaaaataataatcttcaggctaggcgcggcagctcacacctctaaccccagccctttggggggccgagctgggggcagatcacttgaggtcaggagtttgagaccagcctkgctaaaatggtgaaatttcaacactactaaaaatagaaaaattagccagatgtaatggcacttgcctgtagtcccagctacttgggaggctaagacaagagaatcacttgaacccaggaagcagaggctgcagtgagctgagatcatgccactgcaccccagcctgggtgacagagagagattccatctcaaataataatagtaataataatcttcagatatat

SEQ ID NO: 753329 - DNA, 542 bp, Homo sapiens
tttgtattgagacagagacacttactatgtattatctaattagacaggtaataactggcactatgagctaatatattttgtagaatatgaggtttacatttaataataagacttcatattctatccattgacaatataataccatttttaggtgaatcttaaaacatatattgtagcattctgaatagggaggaagataatactggttaaaataataatcttcaggctaggcgcggcagctcacacctctaaccccagccctttggggggccgagctgggggcagatcacttgaggtcaggagtttgagaccagcctggctaaaatggtgaaatttcaacactactaaaaatagaaaaattagccagatgtaatggcacytgcctgtagtcccagctacttgggaggctaagacaagagaatcacttgaacccaggaagcagaggctgcagtgagctgagatcatgccactgcaccccagcctgggtgacagagagagattccatctcaaataataatagtaataataatcttcagatatat

SEQ ID NO: 753330 - DNA, 580 bp, Homo sapiens
agtgtcttctttcctgtctctgtaattcattgatatcaagtccacattaattatcatcatatgtaagaatgataattgggattagaaatgtatcctaaaatcagagaaaggtagggaataatttctgctttttattacttactgaccgatttctacttttytgatacaaaaaaaaaaaaaaaaaaaaaaagcaaaaccacatccttggcgtaaaatacaaggtaaatatatctaggctttcttgaaatagaccagaatgcagtagaggggagcatggactctgaatcctgactgccattgttctacctctggctctgcactgactagctggtgatttttgagcctcagctttccctcctttaacatgagaataataatgactatttcatgaggtcattttgaccattaaataagataatatatgtaaattgttttagatggtgattggaaaagtatgtcctgaattcgttgttataatcacgtcatccacacattcaaagactcacaaacttttgtatccaaccaagactctcatctgaacttcacatttcaatacctagatgcctacttgaggaatcta

SEQ ID NO: 753331 - DNA, 492 bp, Homo sapiens
acttaaaatgtatttggtaagtgctagaaaagaatttttagaagtttagttctgagcgtgcctcctgcctgggtacttttttgtggatgactagagtagtaacacaaataaatggacagataatctaacaaatagaccctaggaaaaggcaaacacatgaatccaagggtgcttagatgcttgctcaaagacataggctctttacttaactgttggctggtgtccttgatagccaaaacctatctttcactctctagcatttggatggattagactgaactcaggattcaactytggatgaacttagagaattcaggaaaggaggctgctgtggaaggacggacactcagctcttcaagatgtgtggaaggagggcagagccttctgacagttttgatactgttcacaaggcatataatacagggtcttggattcagatctcactcctggctgttcttcctgggctggacaaagctagattttcttcttgtt

SEQ ID NO: 753332 - DNA, 670 bp, Homo sapiens
ttcatccagccaatagccaagtcaacaacctcgaattcaaccctccaaaacagtctgcattatgatctgactttaacaagaggttgaaggtttactaatcccaaatgcaagtggtcctggaataatgccagaaaaaaggggtgttcaatcttcagaasagaaaccaacaagatctggcccaatgtacatgctttcccacaaacaaaagttccccaaataaaccagaaagcattagttactccataaggaaaaatgcatataattagcaagatgagctgaacctcccccttcttttcatttagaaggcccttgttctaagactccagcatgtagaaattctttgaaaattacatcacttttatttctactgattttattttaaattctaaggatgtgccaaatgagtcagatactaagatttatcttttgaaattatgtactgtgtttcattccgttatcttttatgtgggtgcaattcaaaaacatgagaaatgcctaaactttaagtattttagagtaaaattaaaagaacaattggtagtaacttttgctccatatgggtaagtggttgatgaggttgccatgtttttctggaaaagtaaaaaaattattccaattcaggggaagtatctcatcagagtctttcacatagcctgatgccaaaaagatg

SEQ ID NO: 753333 - DNA, 670 bp, Homo sapiens
ttcatccagccaatagccaagtcaacaacctcgaattcaaccctccaaaacagtctgcattatgatctgactttaacaagaggttgaaggtttactaatcccaaatgcaagtggtcctggaataatgccagaaaaaaggggtgttcaatcttcagaagagaaaccaacaagatctggcccaatgtacatgctttcccacaaacaaaagttccccaaataaaccagaaagcattagttactccataaggaaaaatgcatataattagcaagatgagctgaacctcccccttcttttcatttagaaggcccttgttctaagactccagcatgtagaaattctttgaaaattacatcacttttatttctactgattttattttaaattctaaggatgtgccaaatgagtcagatactaagatttatctttygaaattatgtactgtgtttcattccgttatcttttatgtgggtgcaattcaaaaacatgagaaatgcctaaactttaagtattttagagtaaaattaaaagaacaattggtagtaacttttgctccatatgggtaagtggttgatgaggttgccatgtttttctggaaaagtaaaaaaattattccaattcaggggaagtatctcatcagagtctttcacatagcctgatgccaaaaagatg

SEQ ID NO: 753334 - DNA, 670 bp, Homo sapiens
ttcatccagccaatagccaagtcaacaacctcgaattcaaccctccaaaacagtctgcattatgatctgactttaacaagaggttgaaggtttactaatcccaaatgcaagtggtcctggaataatgccagaaaaaaggggtgttcaatcttcagaagagaaaccaacaagatctggcccaatgtacatgctttcccacaaacaaaagttccccaaataaaccagaaagcattagttactccataaggaaaaatgcatataattagcaagatgagctgaacctcccccttcttttcatttagaaggcccttgttctaagactccagcatgtagaaattctttgaaaattacatcacttttatttctactgattttattttaaattctaaggatgtgccaaatgagtcagatactaagatttatcttttgaaattatgtactgtgtttcattccgttatcttttatgkgggtgcaattcaaaaacatgagaaatgcctaaactttaagtattttagagtaaaattaaaagaacaattggtagtaacttttgctccatatgggtaagtggttgatgaggttgccatgtttttctggaaaagtaaaaaaattattccaattcaggggaagtatctcatcagagtctttcacatagcctgatgccaaaaagatg

SEQ ID NO: 753335 - DNA, 638 bp, Homo sapiens
gaattcaccagtataaatggacaaggcaggaataaattgtttttcactgactagtgaaatcacaatgcaagctaagcaatattacatatagggtgatagctcccgccacaattctctctctcaggtaaaaacaattgaatgtcttctatcaacttttcactatttccatataaaatattctattgtttaaacaatatttctggatatgaaaaagagacagttatttaaataattcccagtcatttagcttctattttacaattccttggtaatgttagagttccctaaccagacactctctaacagactatagttccccaaagatgggccttaaaagatggattctttaacaactgtaamagctgcagcaacaaccgtgaatcttcaagtgtagctgttaagataagatagtttgagggcaggtataataaaaggaaaaagtttaaatatttatttaaaaaataataattcctacttttgattgcctgttatgtgtcaaacattcttattaacactgataatctccttttggtgtaaataaattaactatgagagcgtagttaatacatttttttaagacaatatagctaaaatatagcagaaccaatcatcaaccatgaacctgcctttatcattaa

SEQ ID NO: 753336 - DNA, 641 bp, Homo sapiens
ctgttttcacttcagaatccttacttagttatcagctgacatataaataaaagatgaattttccaatgattaggagactctgtcttggttttagagaagatgaatggaggaattttctgactttaaggacacagaaatacatgaaagaaaaggtttgtcaaagaataattaaaaggatttttactaaacaaaaagaatatggttcattaatgtggtcagtgaggactcaagtaattatacgagtaatttttatatgttttcaggaatgaaaattgactccaaggttctaattatgttaaaccacaacatcartatttcctggatttgggaagagaaaaatcatgtgcagataaaattaataatgccttaccctcttccatgatgtaattaatgcatatggaagtaggggatgactgtcagttcttttctacaatgtaagtttgggaacaactttggcattgttgcaaatgcccagctggctatttctaagaaatgaagtatttgtatgacagagactctgtgttcttaaaggaagttccctattcattattcagatccatgcacatccctggaacaggttcagcaacagaagtttccatgctttaagatggtgagatataaatagttgtgtaaggttgaac

SEQ ID NO: 753337 - DNA, 509 bp, Homo sapiens
gagattgaggagcattaacttaaaacaatttgaggataggccttataatatttggctttcctttccctttaatttcaaatgataactgtgtctactttcactacacttgaatccttaatttgaaactctattctcagtagggtgtggaattgactactgtacctctctatgcttcaccataawtacacaaacacattcacacacacatgcacacatttatacagcacattcaaacataaaagagtgtatggtgatgagttagttgacctccctgccttggaatccattcccctctctagaagtaactattgttacaggtttcttttttttcttttttttttttaataattctagagatattgtttcctacataagcaaatacatgtgtaggcatttatatatacatatatcttctttttacacaaatatttacataatacatacactgtttacacatgctttttaaatttaaatatatcttagagataattctatatcagcacacgatt

SEQ ID NO: 753338 - DNA, 644 bp, Homo sapiens
atggagattacattgaatctatagatcaaagaaagctgacatcttagaaatattgaatcttccaatatgaacatggtatatctctcatttattttggtttttaaaaagtttctctccacggtggtttgttttcagtattcagatttyctgcatcttttgttaaatttgtgtctacataatttatgttctccgatatgggtaaatgacatatcttctaatttgatttccatttcttgttgctggtatacagaaatataatttatttttaaatatttaccttatatcaaaaaaccttgctaaattcacctattagctccagtagatttttcaggattttctaagtatgcttcttttttgaaaaaaagacagttttacttttttcattctaatcttcacatatttttttgctctgtttgcctgattgcattggctcggatctctagcgaaggtttaaatagaagggatgagagaaggcgtcattctgtgtgatctcaggggggaagcattcagtctttcaccatcaagtgtgatgttttctgcagagctttgttatccatggaaactttatcagattgaggaagttcccttttattcccagtttgctaaaagcttttatcataaatgggtactgaattttgtccccc

SEQ ID NO: 753339 - DNA, 618 bp, Homo sapiens
ggcaaatgtcccatggctcttggaagacttggggaacctgactcatgtgatcaaactcacagcagacttcagtgttgaaacagaactgccaaattgttaatttactttgagaggtgccttttcaaggagctaaatgaatggattcccccagaaggatttctggctggaatttccagaaagctgagtcattggaatggcacctgatgggcctcagaggggatctcaggggttgaggagttttgggggctgcagactgcagacaaggggggaacgccatgaaagttagggcctaatctagcctcatccccttggacctgatrgataaatccagacagccactaactgcctggacttcctctttccatgccagtgggtttttaagtttacagttaatagtgaccccctcccttttatgacacatattgctagtctataaaatagaccaaagcagtagtttatgggtgtaaatggatctcatgtattcaactgtataaccgtgacgggcagggttaaaattattaacaagaggagttgtacagctgccatgctcccctgctctcagtcaaaggacaaaagccaaagaggtcagttttctttttctgtcttcaaagggaaaga

SEQ ID NO: 753340 - DNA, 577 bp, Homo sapiens
atgtcattagagaaatgcaaatcaaaaccacaatgagataccctgtcatgccagctagaatggtgatcattaaaaagtcgggaaacaacagatgctggagaggatgtggagaaataggaatgcttttatgctgtttgtgggagtataaattagttcaaccattgtggagggcagtgtggcaattcctcaagcatctagaactggaaataccatttgacccagcartcccattattgggtatatacccaaaagattataaatcattctactatacagacacatgcacacgtatgtttattgtagcactattcacaatagtaaagacttgaaaccaacccaaatgcccatcaatgctacactggataaataaaatgtggcacatatacaccacggaatactatgcagccataaaaaataataagttcatgtcttttgcagggatattgatgaagctggtaaccatcattctcagcaaactaacacagaaacagaaaaccaaacactgcatgttctcactcataagtgggagttgaacaatgagaacacatggacacagggaggggaccatccataccgg

SEQ ID NO: 753341 - DNA, 589 bp, Homo sapiens
catgtgaattaatgaatagattcccatgtaagtattcacatcagtggacaaaaaaagttctaaatattgacaatgacagatttttctgaattgttacagagaaaattaatataattaaaaaataaactgatatacatttagataaaagcggagaattatataaaaaacaaatggaattttcttcacacactgctgaggtcaggcaggatgcctgatgtatgatgaatgcttttgtaggtgaatttctaatgtaataagctaataatgaattatcaatacataagtaatctaagttttgggatttttgcgtgttattttatttaattctcacaatagccctgaaaagaatgactattatcttttccagttgtacagatgataatgataacagacccagcaagtgctgtgattcaaatttaggtctctctgactcctggaccatgtcatttccacwatattacacaatggcataaaacctgccccattaaaaatgttttctagaagaaatagaaaagtcaagaaaaaacgaatccatggttgataacagctgaaatccagtgacagagaagacatgtaattgtataaaaaa

SEQ ID NO: 753342 - DNA, 603 bp, Homo sapiens
atttgtaacttgcatttaccatatcactctaaatgctattttcaaataaacaactttttaaaaaatttcacttaaactcttttgctaattgaaataaaacaacttgtgataaaaaacaaacaaaacaaaacaaacaaaacaaaacaaaaaaccagaaagcattctttcttctaaatgccagtcttcttgaccggcwtttctcatattttttctttcttactcttaattatttatcttgacaacttcattccttttagcaagattcttctcttctacatatgtattcattctttccttcaaccattctatgttcagcgagtgtaggatgtaggagatggcttaggttgtctgaagaaccccacagaaggacagtttcccaatctctcatgtcatgttactcttctgctgagactggctaggataaaagaattaactttgtttatgatacggtgactactataaaacatttatctggaaatattattccacagatgagacacagccttgtcatcctagaattcaggggtcgtaaccaggttagagcaggcctcccatagcaagacaagggatacagacctattgtattgctagtcctttggtgat

SEQ ID NO: 753343 - DNA, 520 bp, Homo sapiens
agtttgctcagaggtatatgctgcagtcctgactcatcgtggcccagagccaggagctgggtcacaggaagcactaactggcctttctcccttgaaaactcatgatgcctttgcatggggtgggaaagaagccacctttgtggtctgaggaaagcaagacatttcatttagggaacagactggtgtcttagaayctcagaatgcaagaggaagagggggctttagaaccctcctcatgtcagagatgggacaaaagttgagaaagggaaaggaatcttcccaaggtcatattgctagtgaggtaagcaggaccagacttttggtcagaatatgcatattgagattttttcttttgtgacagagttggggatgagcataagtaaagaatcaatgtaggagagccagcttggagcataggaagagatggtggtgaggaaatatgtggttaggatatctccagccttatcctagaaagacagtattccctgatttattccaggcaagcaaagcttagtgaaac

SEQ ID NO: 753344 - DNA, 498 bp, Homo sapiens
agtttgctcagaggtatatgctgcagtcctgactcatcgtggcccagagccaggagctgggtcacaggaagcactaactggcctttctcccttgaaaactcatgatgcctttgcatggggtgggaaagaagccacctttgtggtctgaggaaagcaagacatttcatttagggaacagactggtgtcttagaacctcagaatgcaagaggaagagggggctttagaaccctcctcatgtcagagatgggacaaaagttgagaaagggaaaggaatcttcccaaggtcataytgctagtgaggtaagcaggaccagacttttggtcagaatatgcatattgagattttttcttttgtgacagagttggggatgagcataagtaaagaatcaatgtaggagagccagcttggagcataggaagagatggtggtgaggaaatatgtggttaggatatctccagccttatcctagaaagacagtattccctgatttattcca

SEQ ID NO: 753345 - DNA, 520 bp, Homo sapiens
agtttgctcagaggtatatgctgcagtcctgactcatcgtggcccagagccaggagctgggtcacaggaagcactaactggcctttctcccttgaaaactcatgatgcctttgcatggggtgggaaagaagccacctttgtggtctgaggaaagcaagacatttcatttagggaacagactggtgtcttagaacctcagaatgcaagaggaagagggggctttagaaccctcctcatgtcagagatgggacaaaagttgagaaagggaaaggaatcttcccaaggtcatattgctagtgaggtaagcaggaccagacttttggtcagaatatgcatattgagattttttcttttgtgacagrgttggggatgagcataagtaaagaatcaatgtaggagagccagcttggagcataggaagagatggtggtgaggaaatatgtggttaggatatctccagccttatcctagaaagacagtattccctgatttattccaggcaagcaaagcttagtgaaac

SEQ ID NO: 753346 - DNA, 515 bp, Homo sapiens
ccactccctcagcttgcagggaggtgtggagggagaggcaccagcgggaaccggggctgcgtgcggagcttgcacgccagctggagttcccggtgggcgtgggcttggggggcccgcactcagagcagctggccagccctgctggccccaggcaatgagggacttagcaccygggccagtggctgcggagggtgtactaggtcccccagcagtgccagcccaccggtgctgtgcttgatttctcaccgagccttagctgctttcccgcagggcagggctcgggaactgcagcccaccatgcctgagccttccacccactccatgggctcatgtgcggcctgagcctccccgatgagcaccaccccctgctccactggcgcccagtcccatcgaccacccaagggctgaggagtgcaagtgcatggcgcgggactggcaggcagctccacctgcagccccggtgtaggatccactaggtgaagccagctgggctcctgagtctggtggggatatgg

SEQ ID NO: 753347 - DNA, 610 bp, Homo sapiens
tttatttctaacttgaacaaacactgtcaaatacatttgtgaaagataaaagttagatgtcactagatatcacttttaaggtaatgaactttggaatgatatgtgttaaaattctcacaggcatctgaataaaataaaataaaaacaatgaacaacagagtcttctttcttcatcttctttctattcttcccaactacagaatgaaatgagaaaaaaataaacaatggtacgttagccagcaccagtgactttctaaatagaagaaaatggccagctctgtgtatatctgcaacatttgtgtgctatatcttaaacaagtagagaagaacaccttttccttttgtaactcgcaagcttggrtatcagggtgcttgtgaaactgatggttacagccaaatgatcacaccaaccttgtctccctagcaccagaaaagcttcttgttgttgtttttacatgagaggcaattctgggatttaaataaatctctcaagctttaacagcctgtgctagttccacaaatgatactcccttactctcccagacccttggtttccatatctaccatatgggaaagaagctgttatgaaataatacagctgtgaaaatgc

SEQ ID NO: 753348 - DNA, 635 bp, Homo sapiens
tcttctaattccctctcccacttttaaggatgcttgtgactgcattgggcctatctgactaatccagaataatctccctatcctaaagtcaactgattagcaacactaactccatctgcaaccttaattcccctctgccaggtaacctaacagacccacagggttctggggattaggacatgggcatctttggggaggccagcattctgcctgtgataatagcaacacataatggatggaatttaaactgggtaagtaggcaaatgaagaagatggtaggaaggtagagtgaaaaagtggctaggtcagcagattggggaaataatctgatgggattgaaacattgtagcagtagagaagaaattttctaaatggtgccatttctggtaatggaaaaggctagtgtaggaccatgggggtaagtatctgatgtaagtttgtagaaaagatcagatgaggaggtcacggaagtggaattccaggtcrtgggataagtcatccctgtggatgttaaagtcacgaagaatgatgaacaaacttcagtgtaggaaagaagactgatgatgcaagaaaggcataaaccccacaagctagatgagcctgtaagtgaaaaggagcctgtggtggtgcagact

SEQ ID NO: 753349 - DNA, 620 bp, Homo sapiens
agataagctatcaatatacattgtcagggtaaaattcttaaagcttaaagtttgggctgattaaattccctggcctcagtcacattgcaggataaatgctggcatttaacatttgggggttaagttattccactgaattggctaayaaagagttaattttgagtgctacaagtatgcctctttttataatatctcatgctttacctggatggcttacaccataattccccagcattgtatacaaataagtctccgaagcccagagccatcttttttttttttaaagcaatcttctgctgcatatgcctgtagtcccagatactcgggaggctgaggcaggaggatcacttgaggttaggaactccaggctgtagtgcactatgatcatgcctgtgtgtagccactgtacttccacctgggcaatgtagtgagactctgtctctaaaatgaaataaaattttagttttaaaatccgctaatacatcaaaggagaacataatgctccctcccatgattgtatacaaatttacaactttcaaagtgattttccttatatagttacatttgattctctcaataactctgtaaagcagataggaaagattctcattaaagatgaa

SEQ ID NO: 753350 - DNA, 682 bp, Homo sapiens
ataaataattataacattgatagccaatgagtagctaaagctatttattgtaaacaaatggttaaaaaggttattcatattgggagaacatatagagctctcagtaatataaaagttggaaaagccttttcattcagcagttttttcaggaaaaatttgcaatgaagatggcggaaataattaaggatacataaatacctgatgaagtaaattaaagaaacaatatgttatattttaagattataaaattctgttgcaccttttttgaggtataatttctttttttttttgacacggagtctcgctctgtcacccaggctggagtccagtggcgcgatctcggcttactgtaagctccgccccccgagttcacgccgttcttctgcctcagcctcgctagtagctgggactacaggcgcccgccatcatgcccggctaattttttttgtatttttagtagagacagggtttcaccgtgttagccaggatggtctcgatctcctgaccttctgatccgcctgcctcagcctcccaaagtgctgggwttacaggcgtgagccacggcgcccggccttgaggtataatttctgtttcagcataaactcccagtttaaagatattcaaaatatttaatacagatgaccactatggaataaaattttatttttatctgtaaaaattt

SEQ ID NO: 753351 - DNA, 522 bp, Homo sapiens
aaatccatcagatcccctctggacatttcaatcatggatccaaagaatttgtgggagtttttttttgttttgttttgttttcattttctttaaagtccagcaattttacttgaacttggtgttggtcatgatgggtcactattcacaggatgcagcctgctcttttaacaaataatttcsaaggttttgtttttggaagtttttttgaattattattttcggtatttgtattgctcccttgctgcattgtcttttttttccttgagagattccttttatctgtaaattagttcttgtctctatcaacacaattttttaccctctctcctaatttttgcttcatctgacccttccgtccactattatcttctctgcctcctaaaatctttaagacaattattttatcaacaatccccccttctccctaacatctccagatgactctcccagtccgtccacggaccagccttgcctgtaatctgactctctttgaggacaagcagcccctctccaaggaagctc

SEQ ID NO: 753352 - DNA, 522 bp, Homo sapiens
aaatccatcagatcccctctggacatttcaatcatggatccaaagaatttgtgggagtttttttttgttttgttttgttttcattttctttaaagtccagcaattttacttgaacttggtgttggtcatgatgggtcactattcacaggatgcagcctgctcttttaacaaataatttcgaaggttttgtttttggaagtttttttgaattattattttcggtatttgtattgctcccttgctgcattgtcttttttttccttgagagattccttttatctgtaarttagttcttgtctctatcaacacaattttttaccctctctcctaatttttgcttcatctgacccttccgtccactattatcttctctgcctcctaaaatctttaagacaattattttatcaacaatccccccttctccctaacatctccagatgactctcccagtccgtccacggaccagccttgcctgtaatctgactctctttgaggacaagcagcccctctccaaggaagctc

SEQ ID NO: 753353 - DNA, 609 bp, Homo sapiens
tgcatagttaaaatgatctgattagttgagatggcttttgttttccagaaaggtgaatttaacattctccatggaagatgtaactgtcacggggtcttgggcaccatctggtctgagttaggtacaggacaataaaggagacagttaatctataacaaagatcagtgattggaaggaggaraaggtctgttctttggtctctcttagtcatttatagcaacgagaacaatgaggaagacagttaagctctaatctaagaagcagaactgcaaatatgcagccgtggctcagtcgccagggcttaacttctcccatggcataatacttttagacagttctaaaattttattttcttttacagggctcacctgaaacaattatattttaacaaggcaatagtaagaacaacaacaccaattcccaccgagggctaactctgccaggcacagttccaagtgcattttgcatattatctcatttaatcctctgctgatgtgatcgtgttatgtgttattatgtccatttcacacctaagctctgtgtttgtgctccgaatttccatggaaggagccactcagtgctctaacacttggtgtgtgagtcacccca

SEQ ID NO: 753354 - DNA, 609 bp, Homo sapiens
tgcatagttaaaatgatctgattagttgagatggcttttgttttccagaaaggtgaatttaacattctccatggaagatgtaactgtcacggggtcttgggcaccatctggtctgagttaggtacaggacaataaaggagacagttaatctataacaaagatcagtgattggaaggaggagaaggtctgttctttggtctctcttagtcatttatagcaacgagaacaatgaggaagacagttaagctctaatctaaraagcagaactgcaaatatgcagccgtggctcagtcgccagggcttaacttctcccatggcataatacttttagacagttctaaaattttattttcttttacagggctcacctgaaacaattatattttaacaaggcaatagtaagaacaacaacaccaattcccaccgagggctaactctgccaggcacagttccaagtgcattttgcatattatctcatttaatcctctgctgatgtgatcgtgttatgtgttattatgtccatttcacacctaagctctgtgtttgtgctccgaatttccatggaaggagccactcagtgctctaacacttggtgtgtgagtcacccca

SEQ ID NO: 753355 - DNA, 609 bp, Homo sapiens
tgcatagttaaaatgatctgattagttgagatggcttttgttttccagaaaggtgaatttaacattctccatggaagatgtaactgtcacggggtcttgggcaccatctggtctgagttaggtacaggacaataaaggagacagttaatctataacaaagatcagtgattggaaggaggagaaggtctgttctttggtctctcttagtcatttatagcaacgagaacaatgaggaagacagttaagctctaatctaagaagcaraactgcaaatatgcagccgtggctcagtcgccagggcttaacttctcccatggcataatacttttagacagttctaaaattttattttcttttacagggctcacctgaaacaattatattttaacaaggcaatagtaagaacaacaacaccaattcccaccgagggctaactctgccaggcacagttccaagtgcattttgcatattatctcatttaatcctctgctgatgtgatcgtgttatgtgttattatgtccatttcacacctaagctctgtgtttgtgctccgaatttccatggaaggagccactcagtgctctaacacttggtgtgtgagtcacccca

SEQ ID NO: 753356 - DNA, 645 bp, Homo sapiens
ccccacctcttcccagtttagtttctctgatacactacctggtacaccgagctatttggtttgctgttccgcttgcccaaccagaacagcagctctacggcggctttgtctccctcatgggcccccttttggggcctggggcagtgctgggcacgtggctatccccaaataaataatgactgaataagtgaatgaatgtacatgggggctgtgacaatgtgtgaccatgagggatgccttgggggccacatgaggccagaggagmctgggcagtggcttggtgactctgtggagcccctgcctggccatggccctcccgcctccagagttctcctaaggggtaagaaaaggcctccattgctggcaccttcacccaccgcatctcccgttgttgcagccacaattttcttacaaggacagtggctggatttgagcccaggctgtgtggctccagacctaagcccagggctttgtctggggtgtggcccaggggcaggtccttgggtgtgtgagggtggcttggctcagctcctctccctaggtcactgcagcggccctgtgctgttctgttttcccatccagaagtcctgagggtctcagcagaggggcccaggatccaagtccatccactcccagggcgggtcc

SEQ ID NO: 753357 - DNA, 505 bp, Homo sapiens
acctgtacacactcacgcacctgtgtgcatgaacacgcccaccctaggatcctttcctgatggtgggattcttgtgtccaatgacgtgatacagctccctgggaggagcttcaaatggtgcccaccacagagccagtgcccatcttcactgccccgtggacacctgtgaattcgaaccagacatttacctagactctctctcccagcaggagcatcgccagacctctgtggatttgtgctttatccttgtttctctgctccgggtgtctggggaggatttatggaggaaacaacataatgagacctgagtgacttagagcttggggasgtcgaccacagcatcttcagagggaaggaaattcagatggcaatcgtcccagtggatgacttcacgtggtttccctggggaagccccacccccagctgctccttcccgaggccctacctgcccttccaggcccagcccagtcctgcctctcccaggagtctcctctgagctcctggg

SEQ ID NO: 753358 - DNA, 524 bp, Homo sapiens
aaaaaagacacagatgaaatatagtctaatcaggtgagataaagacaggaggcaggaggaaacgatgggaggagggagtgagggaggaaggacaagcgaatgccagtgaattgccggtttgctcatgcactgtcattagacctcacagcaaccctaccgtcagtgcaagtgccgttatgtgcgctattttacagatatggagactgaggcccagagaggttaaagtaackgcccagagacacccaagtaggaagtggtgggggcatgaattgaacccaggtccacctgaattcaaagcctctcacgggtctggaatgaaggaaggacggaatgaatgagtgaacgaatgaatgaattctggagtgaacgcatgagcaaatacatatcactgtcaagtccctgcacatcaggattccatgataactcttcaaacccaaggaagggtccaagcctctctctacctctccctctcccctactttctcattcccaagaattatttaggatccagatcaagaaacctgg

SEQ ID NO: 753359 - DNA, 493 bp, Homo sapiens
gaagcatggatgggagacctcaggaaacttatagtcatggtgagaagtgaggaggaagggagcacgtcctgcattgctggagcatgaggaaaagagagagatggaagggggaagtgctacacactttcaagaaaccagatctcatgagaactctatcaccagacagcactaggsgggtgttaaaccattagaaatcaccccattattcaatcacctcccaccaggttctcctccaacactgggatttacaagttgacatgagatttgggtagggacccagaacaaaactgtatcaaatcccaaactccacttccatagccaagaacttggtggttattgattgaaggcctcctaggggccagccccttcctacatactttgcatgaactctcttgtctcatgtgtaagtaccacaggctaatgtctgcaccttgcaccctctataatgatatctctcattttcatgattgagcagactgtaatggttgttgtg

SEQ ID NO: 753360 - DNA, 493 bp, Homo sapiens
gaagcatggatgggagacctcaggaaacttatagtcatggtgagaagtgaggaggaagggagcacgtcctgcattgctggagcatgaggaaaagagagagatggaagggggaagtgctacacactttcaagaaaccagatctcatgagaactctatcaccagacagcactaggcgggtgttaaaccattagaaatcaccccattattcaatcacctcccaccaggttctcctccaacactgggatttacaagttgacatgagatttgggtagggacccagaacaaaactgtatcaaatcccaaactccacttccatagccaagaacttggtggttattgattgarggcctcctaggggccagccccttcctacatactttgcatgaactctcttgtctcatgtgtaagtaccacaggctaatgtctgcaccttgcaccctctataatgatatctctcattttcatgattgagcagactgtaatggttgttgtg

SEQ ID NO: 753361 - DNA, 690 bp, Homo sapiens
aatgtgaacctgggcagcccagccctgaatcagtcctcacaccacccatgatgcggccctgagagctgctctcaaatgccactagcagagcgatgtcacgaagtgccactgtggctaatactgtacaggattttctctctttcaaagttgactccatgccagtactggttgctctgcaaggtctctcaaatagagtgcctttgatcctgaaccttttcttggaagcctctgaagggcttcactagtctaggggccactgcagatgaccatctttctagcatctcagctgtctgctctcatatttcattatctggtccacaaggctggtaacaaacactcaagataaattctgtcctccctctctggaaaatagaaaatacattaaaaatctcagcctgtgaaactgaaaattccagccaaggggcccatgaggcaggtactgggaaggcccagttcccaggagacagcagagtcctgctccgagataacatcacccttctgcccrcacatgcagaggctgtaattataccccttaacctggggctttactttacttaatgagtaatttgccaaaaccatgctactgtttgaggcatgaacctggtgtgtgaagggttcatgtgcttctatcccacctgtcatcttcctctccaacatctgggatcctgggagaaaatgtctgtcaaccac

SEQ ID NO: 753362 - DNA, 630 bp, Homo sapiens
gacaggggagagacgccatcatgcttctggcttcaacaaatcagaagggtccagggattcaaaggggcagagtagacccagagacccatgaggcggccccagagtggtccaagcgtgagatggcggtgctttggactgggtgtttgaatctttttttagtaacagctttattgagagataatttgcatatcatgatgttcactcttttaatgtatacagttttgtgcttttgattaaactcgggaagttgtgtggtcatcatccctatctattccagagcattgcattatccccaaagaagccctatacccatgagccgtcactccccatccactaccctcccaccataggcagccactgctactgtcrgcctctgtggatttggctgttctggtcatttcatgtaagtggaatcagacgatatgggatcttttgtgactggcttcctctgcttagcataatgttttcagggttcattcacgtggtagcatgtgtcagcattccattcctttttgtggtagaataatagaaatagaataatactctgaatgcatatgcggtagtcccttggtattcgtggaggactggttccacgaatcctgccagcctcccttctcactgaatctgccc

SEQ ID NO: 753363 - DNA, 626 bp, Homo sapiens
ctgtgtaactgagcatggtggctactgcttggggaaggagggacatgcacttggaggcaggtactccaagggtttggcagcacacacgcagagggcttcaaccctctcctcatgtctggaagctagaaacatggatattcatggtaatatttttcatgccttttgtatgtctacactggagtcatctacactggagtctaccaacctcagcaytgttgacattttgggctggttgattctctgtggtggggctgtcctgggcattgtaggatgtttgtcggcatccctggcctctacccactagatgccagtagcaccctccccttctcaattgtgacaagccaaaaagatgtgtccagacattgccaaatgtcctctaagagtaaaattacccccagttgagaaccactagtctagaaaaaagaggacctatggctcggaaatattagatgacttctccaaagtcacagagtcagtaaatgaaagagatggctccagcaggcaggcttttcattgtcagctagtgctctttcaaacctctcagagtgccctcaagagcagatagctttattgttaggattacagtggagttgcatcagacgtaaatacaacggaatacacttgac

SEQ ID NO: 753364 - DNA, 550 bp, Homo sapiens
aggaaaagcagcccctctactcctggcacactctctacttaatgcccttgtttaatcatcttgacaacactcaatcataatatggatttcttgtttaccattgttttcttgcttactatccatcacccctccccagctagagcatcagccccagtagagcaggggccttgggaatcttgtatgcccaggcctgggcactgtgcctggtatacagtaggttctcagtacatatctattgaaggcatgtgaagagtggggctgggcctttcacaccaaagtctctccttctctgcctggctcattctgttttgtgtttttcagtctgcagtctcctctgatcmccttgatcccagctcctccctccctctctggagctcctatccaatctccatttccagggatccctgggagtcctggcaggttcactcattccagactgcagcttcactcattccacacccgtggtgtggccagcctctgctgcagtctcccaggaagctgcctcccagcccttagctcccacccccacctgacaccttctttttggaga

SEQ ID NO: 753365 - DNA, 572 bp, Homo sapiens
ctaaaaaatgaatgtaagatagtacatttaaaattaaacatattaataaccacattaaatttaaatggcctaagcattccaattaaaatagagaaattgttggactgaataaatgagattcaactgcgtgttgtctacatgaatcccaaattaagagtacaggtataaataagttaatactttaaaaatgtacaaatatatacaatgcaaaatatcacttgrataaatccttgaggagatggataccctagtctccatgatgtgcttatttcccattgcattcctgtatcaaaacatctcatgtaccccataaatatattcactactatgtaccaacaaaattgttttaaagcttcagaataaggaatattaccagtgtaaagggaatcagctcacaatgataagtgacttgattcaccaagacataaaaaccctaaatatgcctgcacttaacagtataatttttaaaatatatgaaacaaaaactgaaagaactaaaagagaaataggcaaaatcacaatttttttttcagatggagtcttgctctgtcacccaggctggagtgcaatag

SEQ ID NO: 753366 - DNA, 515 bp, Homo sapiens
gaagttaacaaaaattatacagagatttctcatacacccaacactgtttcccctattgttaacaccttacattattattatggtacattagtcacagctaataaaccaatataaacacattatgattaactaaaacccatacttaatttatatctcgttaattttaacctaatgtccttttaatatttccgttctaagatccgattcacayaccaaatgacatttagtcgtcatgtctcctctggcttctcttggccacggcagtttctcagttatttcttgcttttgttggccttgatacttttgaagagtactggtcaggtattttgtagaatgtctatttactgtgtttatttgatttttttgtttgcttttttgatttgactgttttatgggtttgggggaggaatatcacagaattaaatttactttcctatcacttcatattaagagtacattgctaggctagcaacatgacttattgctgttgatgttaactttaatcatctggtgga

SEQ ID NO: 753367 - DNA, 524 bp, Homo sapiens
actaagctgcccagcttgaagagtctgaactcaagagctttgatcctgcaagaagagtccattcccttgttcttcagtgggaaaaccctgtcacctgagttcatttaaaactgatgcaaatccagagagcaaagccacgctgcattcagaacatgtcttaagacaataggttcaaggaaacagcgttgttactgagcaaattccctttgcaaatttccaggcccttccgtgccaaagcaaggtaatccagtttaatgcgagttgcctttttgggagagaaaaataaaaggcaaaatatttaaggattcctttattctgcttttagcttctgagcccagcaattaattcktatgtgctaaaggacttctgtgtttatgaggcattattatttaatgtaggcctattttaaattgtaatttttttcattaagttgcctcttttcacttattaagaccagttttataacctagcatagactgtattccttgagtaataactatttttcttttaaaatattccttaat

SEQ ID NO: 753368 - DNA, 622 bp, Homo sapiens
tactttgcaagctgaaatggaattatatatattttttgccatcatctgctgtagactatggctcccaaagaatcatgggtaatttcagatgcaaatgtcctatgcaaatccagctgctggttaaaattaggaggaagsccaaggcagatgcagttgcaggctgtaactggaatctccaccgagccttgatttaaaatgcaagtgacgctgcaggctttcaacacggagctacaagcttagtcccaggtcccaaggttctgttgctccgtgcatggggttttgtaaagcaagtgtgggtcacttacctggcagactgggagcggtttttcaggcttgtattccaacccagtggttctcaaccaggggtgatttttgtcccccaggggacatttggcgatgtctgaagacattttgggtgtcagaacttggtaggtgcaactggcatctggtaggtggacaccagggaaactgctaaacatcctacaatgcacaggccagccccaactacaaagactcagcgggcccaaaatgtagacagtgcagaggccgagaaaccttcttcaaacctatgccaacccatgccctggaagttcgctgggatccacgagaggaagagaaggtg

SEQ ID NO: 753369 - DNA, 540 bp, Homo sapiens
cactcggacggcatataggaagatcaggcacttgtacagcttcatgagagaccttagtaagattagtagtaacagcagaaataaaggtcaagtttgcaagcttagcatcccttttaggctgatagttaagatactcctgaggaatgagagtaacacacttaccatgtgctaytgtggaaaaacaaagaggggattactaaacaataaaatcaaggagtcattaagtttaatccatcccaaattttcagttaaggggtatgacagggacacctatcgacctcctgtccaagaagtatcattagataacaaaggcaggtcagcatcccactgtgtaataacattaaaaacaaggggatttagaatatgactccaataaacatgttcttgagctgatctcacttggcaaaggacaagaattaccaaccagcccaacatctgtgtctgtcttacttttctcagaagtttccccagttaccgccagttacataagaaactgattctctgcagttgcaggggcctccacagcggcaagccggatag

SEQ ID NO: 753370 - DNA, 632 bp, Homo sapiens
tagtaaggccaatatgagggcacctaactccgcctgttgcgtagttttaaaacgttcctggattttgtgctgccagttctgcgtggcatcttgccacactatagttgcctttccagtttttcctgaaccatctgtaaagacagaagtggcgtraagcaagggctcagagacaacataaatacaaatttaacaggcacagtttgtaaaaagttcaggagtttagaggctggtcaatgaaagctgatattaccaataaagtcagtcattgctacttgccaatcaagatcacaagctaggagagtatgaaattgtttcttgtttaacagtaggaaaagagtagtggggttattttggccatatgcccagttaggccacaattataatacgtggccccagtcaacattgcagcaaaggtctgagccagatgggttgtagtgcctatattctggcacactttaataaacacgctgatttcagtggcagtggctcggactggagttattgctgcctgacaatccttatttgcattttcaaaagccaattacaacataagaagtttggcagctttaggatagggtgcctgtttttttattgcagcctgcaatcagttgataaattcaatgtatgtttct

SEQ ID NO: 753371 - DNA, 626 bp, Homo sapiens
aataatatcacagggtgtacacacacggtatgcactcactgtgatattaggagtaataactccctacgatattatgaataatatcacagggtgtacacacgttgtgtggactcactctgatattaaaagaaatatctccctaggatattaccagtaatatcacaggttgtactcacatggtgtgcacacttatattaggagtaatatctmcctaggatattacgaataatatcacaaggtgtacacacatggtgtgcaccaactgtgatattagaagtaatatcttcctagtatattaggaataatgtcacagggtgtgcacccactgtgatattaggagtagtatcttcctaggatataacaaataatatcacagaatatgcactcactgtgatattaggagtaatatctacctatgatgttacaaataatatcgcacggtgtgcacccactgtgatattagtcataatatctccctagggtattacaaataataccacagggtgtgcacccactgtgatattaggagtaatatctccctaagatattacaaataatatcacagggtttgcaccctgtgtgatattagaagtaatatctttctacgatattaagaataatatcaa

SEQ ID NO: 753372 - DNA, 626 bp, Homo sapiens
aataatatcacagggtgtacacacacggtatgcactcactgtgatattaggagtaataactccctacgatattatgaataatatcacagggtgtacacacgttgtgtggactcactctgatattaaaagaaatatctccctaggatattaccagtaatatcacaggttgtactcacatggtgtgcacacttatattaggagtaatatctacctaggatattacgaataatatcacaaggtgtacacacatggtgtgcaccaactgtgatattagaagtaatatcttcctagtatattaggaataatgtcacagggtgtgcacccactgtgatattaggagtagtatcttcctaggatataacaaataatatcacagaatrtgcactcactgtgatattaggagtaatatctacctatgatgttacaaataatatcgcacggtgtgcacccactgtgatattagtcataatatctccctagggtattacaaataataccacagggtgtgcacccactgtgatattaggagtaatatctccctaagatattacaaataatatcacagggtttgcaccctgtgtgatattagaagtaatatctttctacgatattaagaataatatcaa

SEQ ID NO: 753373 - DNA, 631 bp, Homo sapiens
ctaggccttcacgttcactcaccactcacccactgactcacctgacgcaatggccagtcctgcaaactgcattgatggtaaatgccctagacagctgtaccatttttaaaatcttttgtatcgtatttttactgtaccttttgtattttwttttattttatttatttttttgagatggagtcttgctctgtctcccagactggagtgctgtggcgcaatctcggctcactgcaacctccgcctgccgcattcaaactgttttcctgcctcagtctcccgagtacctgggattacaggagcctgccaccacacctggctattttttttttttgtatttttagtagagacagcgtttcaccatgtcggccaggctcgtttcgaactcctgacctcaggtgatccacccgcctcagcctcccaaagtactagaattacaggcgtgagccactgtgcctggccccttttctatgtttagatacacaaatgcctactattgtgttaccgttgcctccaggaaatgccatacaggtttgtagtctaggagcaatagcctataccatacagcctgtgtgcatagtaggccgcaccatctgtgtttgtataaatacattctatggtgcttgcacaggtt

SEQ ID NO: 753374 - DNA, 631 bp, Homo sapiens
ctaggccttcacgttcactcaccactcacccactgactcacctgacgcaatggccagtcctgcaaactgcattgatggtaaatgccctagacagctgtaccatttttaaaatcttttgtatcgtatttttactgtaccttttgtatttttttttattttatttatttttttgagatggagtcttgctctgtctcccagactggagtgctgtggcgcaatctcggctcactgcaacctccgcctgccgcattcaaactgttttcctgcctcagtctcccgagtacctgggattacaggagcctgccaccacacctggctattttttttttttgtatttttagtagagacagcgtttcaccatgtcggccaggctcgtttcgaactcctgacctcaggtgatccacccgcctcagcctccyaaagtactagaattacaggcgtgagccactgtgcctggccccttttctatgtttagatacacaaatgcctactattgtgttaccgttgcctccaggaaatgccatacaggtttgtagtctaggagcaatagcctataccatacagcctgtgtgcatagtaggccgcaccatctgtgtttgtataaatacattctatggtgcttgcacaggtt

SEQ ID NO: 753375 - DNA, 631 bp, Homo sapiens
ctaggccttcacgttcactcaccactcacccactgactcacctgacgcaatggccagtcctgcaaactgcattgatggtaaatgccctagacagctgtaccatttttaaaatcttttgtatcgtatttttactgtaccttttgtatttttttttattttatttatttttttgagatggagtcttgctctgtctcccagactggagtgctgtggcgcaatctcggctcactgcaacctccgcctgccgcattcaaactgttttcctgcctcagtctcccgagtacctgggattacaggagcctgccaccacacctggctattttttttttttgtatttttagtagagacagcgtttcaccatgtcggccaggctcgtttcgaactcctgacctcaggtgatccacccgcctcagcctcccaaagtactagaattacaggcgtgagccactgtgcctggccccttttctatgtttagatacacaaatgcctactattgtgttacmgttgcctccaggaaatgccatacaggtttgtagtctaggagcaatagcctataccatacagcctgtgtgcatagtaggccgcaccatctgtgtttgtataaatacattctatggtgcttgcacaggtt

SEQ ID NO: 753376 - DNA, 644 bp, Homo sapiens
ctcaactctggtttttcccactctcaaaatgtaagaatttctgattataatgatctttaagttccaatatcctctgcttctaaatatccaggatctacttatttgcgtgtcagttttgccagctctgaagaagcaggtgcctaaaatctgcatttctatctcctgaataatttcattatcaaatgtgccattctgaatgaatgaattctgtttttcctatgccctttgaatgtatgaaatgaatgtattgaacgtgtctgtgtcctactgaatgtaattccataagaggtttcttactaatttcaacctgtttttcccatgtccttatttaagaatatattttctattcctaaatctctcattttatcacctttattttacaatttgaaagtctggaagawaaaaaggagtgtgattttcatcagacttacttaagaataactccatctacagttcaactccactgtgcctcctccttctcacatcctcatacagggaggcaattttccaagtttagtggaaatgaggacccctcattagaagccctccaccacactcccctgtcccttgcagaagtaggagataatgtatgtaaaagtactttacaaagggcagattgataatatcaccataataggactgtt

SEQ ID NO: 753377 - DNA, 574 bp, Homo sapiens
cccctcgggatttcttccaggaaggaaagcaaaacacaacaaaacaaatccagactccacgtggggctggaacccagtcccagccctgctgtgttctagctggtcccgggtttggacgccagcgaaggaaggcgcgccgcgctctccatcggggggactcgagggcagcgccgtgcggggaacatcccggccagccccggccattcgaggggacttgcgtcccagaggaattgccctcatctctcccaccagcgccgacaagctcaaacaatggcgcggacgcccaccctggtrgcctaaccaggacctggccccgctcagccgccaggccttccgggacaagccccttcctggcactttctcttggagcgctttggggagaagggagggggactgggctcatttggaggagcaaaagacagccctcgcggaaaaagaaagaaaaatcagcaaaatcgccttagcagttcaaccaaaggtcaacagcagcgtttccccagcagctgacaggtcaaatgggcaggaaacaactgcggggaacaaagccccccgctgtccggcaggggcgaacccg

SEQ ID NO: 753378 - DNA, 644 bp, Homo sapiens
aattcaatttaaccaatatttgactgcatatgtaataaatgcaaggtacttgcccaacagggaattaaagtgaatatgacacacttgacatttccagaaagttagaatttgtttgaaggtaattatgctgttacaatggaatcaaatgtccgtagaattcctactttgttaccaggcaggtaaacaagrgcttgttttcccaagcatgtcacatgttgcacctgcaggtgggtggtggaggtgaggcctgagcctaggagcagaggaagaagaaccagtcacccctgattcagatctagaaggtgtcacttaggcaggaaacatgagaatgggtgggcaatcctgcttctggagggaagagaaggtcggagaaaatggcacaagctccaagagatgtcgcctgcggttttaatcttctggctgctgggcatgaagcagttaaagagaaacccaagacagctgcagccaggggctccataatagccacgcagaggaagcgcatagaggtcatttttctatgccacgaagggagacttgtttcagctgagacccaatctggatgctgttctgctcaccaggaagccaggagctataaaaccctcccagtgccacagcatgcgtgactcagaggcagctgagcagga

SEQ ID NO: 753379 - DNA, 639 bp, Homo sapiens
  misc_feature 579: n = A,T,C or G
tgctgtttgttgtttcttctcactcttgtattgccttcccctctatttctatcttctctggatttaattgaatttttggtattattccattttatatgagttttagcttatcaatatacaacattttgaatttttaaatagctgtcctagagtttgcaatgtacatttacaactaataagtccaccttcaattaacactatttattactttatacagttatattttagatcactttgggaatatgatacaataaaaggtattttatctttattcctcctctgatgatttcctttctttagtaagtctaaatttctattatatattacattttcttctccaagaataagttcctttaaaagttattgcatggtasatctcctggaaatgaatttttttagtttcctttggttggagagagactttatttctcctttattttgaagaataatttcattaaacataaaattctagtttggtattttgttcttactatactttaaatatttaactccactctcttgctgtcatgttatcttatggggaagttactctaattattatcttttttcttctatagntaatgtcatcagtcatctacagagactttctacaaatattctacaaagattttttccttg

SEQ ID NO: 753380 - DNA, 636 bp, Homo sapiens
cttcataacaaaattaaaaatagtattaacatatgatccagcaatcctactactgggtataaatacaaaagaaataaaatcagtacataaagagatatgttccttttcatgttcattggagcattatttacaatagccaccatakggaatcaacctaagtgtccgtcaactgataatagtcaagaaaatatgatatatacagaaacacaaacaaacccaattgaatattattctgccttaagaaggaagggagtcctgccatttgtgacaatatgggtgaatttagaggacattatgttaaacgaaaataggcaggcacagtaagatgaatactgaacgatctcatttatatgtgggaggtaaaaaagttacagtcatagagaaaagagtagaatggtggttaccaggggctggtagatagaggaggaggattagaataacactggtaaaaggatgtatacagtttcggttagttacaagaaataaatctgagagatcatacaacatgttgactgtagttaaaagcaatgtattgcatgcttaaaaattgcttagaggaaactgtattttcatgacaaagaaataagtaagtggggtaatgaatatgttattagctttatttggtcattccacagt

SEQ ID NO: 753381 - DNA, 467 bp, Homo sapiens
actatttataattattatgtcctcttaattaataattcctttactgttatgatatatctcatataaccaaccctctttattcctggggatattcttgctctgatatctacattatcagaggttagtataaaaactccagatttatttaaatagtgctgacatacatatcttcttaaatactttcatttgtaacatttgcatattcatattttaagtggttttcttgtargcaggagatatctgcatatctccatttttgaactgtccatctgttcctttttatgaggatgtttggaatatgtacatttattgtgataactgatacactttggtttaaatccaccacttatttacttatagtttatttgccctatccatccattatttattccatttttctcatttttataaattttgcaattttataaatcaatttgttacttttgttaccttttgagatactcttt

SEQ ID NO: 753382 - DNA, 617 bp, Homo sapiens
gaatgcttctgtgtagtttttatgtgaagatatttccttttgcaaaacaggctgcaaagagctcctaatatccacttgcagattctacaaaaagggagattcaaaactgctcaatcaaaagataggttcaactctgtgagttgaatgcatgcatcacawagaagtttctcagaatgcttctgtgtagttttatgtgaacatatttccctttccacagtaggcctcacagggcttcaaatatccacttccaaattctgccaaaagagtgtttaataactgctcaatcaaaagaaagtttcaactatgtgagatgaattcacacatcagaaagtagtttcttagaatgcttctgtgttttgatgtgaagatatttccttttcaaaaataggttgcaaagggctccaaatatccacttgcagatactacaaacagagagtttcaaaaccgctgtatcaaaagaaaggttcaactctgtgagttgaatgcacacatcacaaagaagtttctcagaatgcttctttgtagtttttatatgaagatatttccttttccaccgtaggcctcaaagcgcttcaaatatccacttgcagatcctacaaaaagaatgtttcaaaatt

SEQ ID NO: 753383 - DNA, 358 bp, Homo sapiens
tgatttttatgtgaagttatttcccttttcaccacaggcatcaaagtgctcaaaatgtccaattgcagattctacaaaaagagtttttcaaaacttgtctatgaaaagaaaggttcaactctgtaggttggatgcacacatcacaaagtagtttctgagaatgcttctgtctagtttttaatatgaagacatttccttttctaccttaggcctcaaagcrctccaaatatccacttgcagattccacaaaaagagtgtttcaaaactgatctatgaaaaggaagtttctactctgtgaattgaatgcgcacaacacaaagaagtttccgagactgtttctgtctagtttttatatgaa

SEQ ID NO: 753384 - DNA, 587 bp, Homo sapiens
ttcagtattgtgcaatatttagtacttgttctagctatctcttgctgaatagtaagccattccaaaacttaaggaattatttattgtttaatattgtttattgttattatttgttcagtgattttaaataatgttatttctcatggttttgtgggttgatgggcactacaaaagttctcttttggagtctttcttgcagttgctgttggttggctgctgctgaactcacctgaargctccactagactaaagagcctagacgggtcactcatatggctggcagtgcatattggctgctgagtgtgatgcctatctgacctctccatgctatctggagtgctcacaacttggtagttggtcccaagacacacaggcaaatactacaaagcttcttaagacctagccttggaggtcctagaatacaacttctgctccatcctattggtaaagcaagtcattgtgaccagcacagattcaagaaattggagattcgactccagctgtcaatgtaaagagcagcatgtgcatgcagggaggaaagaaattgagggcatcatcttgaaaactatcatatcacattattattc

SEQ ID NO: 753385 - DNA, 587 bp, Homo sapiens
ttcagtattgtgcaatatttagtacttgttctagctatctcttgctgaatagtaagccattccaaaacttaaggaattatttattgtttaatattgtttattgttattatttgttcagtgattttaaataatgttatttctcatggttttgtgggttgatgggcactacaaaagttctcttttggagtctttcttgcagttgctgttggttggctgctgctgaactcacctgaaggctccactagactaaagagcctagacgggtcactcatatggctggcagtgcatattggctgctgagtgtgatgcctatctgacctctccatgctatctggagtgctcrcaacttggtagttggtcccaagacacacaggcaaatactacaaagcttcttaagacctagccttggaggtcctagaatacaacttctgctccatcctattggtaaagcaagtcattgtgaccagcacagattcaagaaattggagattcgactccagctgtcaatgtaaagagcagcatgtgcatgcagggaggaaagaaattgagggcatcatcttgaaaactatcatatcacattattattc

SEQ ID NO: 753386 - DNA, 354 bp, Homo sapiens
tcatcatagtccgtaatgcctggaccagaagtccttgttctaagagtatcttgtggcatgctaaaaatgtattactaactaggaaatttaaaacttttttgttagtgattttaagagagctgactagctcatcaccacaattcacacagattaagaatggagattactctgctgagtggattcayagtgatcagaaaaaaaaatcgcaaaagagggaaggagatagagaaggggaaacatactgtcaatccctacaattaaagtgattttttgaatggtttgattttgtatttgcaaaggaaaggcagcttattgtgatggaataagaatcccacttctgtatatatatataca

SEQ ID NO: 753387 - DNA, 354 bp, Homo sapiens
tcatcatagtccgtaatgcctggaccagaagtccttgttctaagagtatcttgtggcatgctaaaaatgtattactaactaggaaatttaaaacttttttgttagtgattttaagagagctgactagctcatcaccacaattcacacagattaagaatggagattactctgctgagtggattcacagtgatcagaaaaaaaaatcrcaaaagagggaaggagatagagaaggggaaacatactgtcaatccctacaattaaagtgattttttgaatggtttgattttgtatttgcaaaggaaaggcagcttattgtgatggaataagaatcccacttctgtatatatatataca

SEQ ID NO: 753388 - DNA, 354 bp, Homo sapiens
tcatcatagtccgtaatgcctggaccagaagtccttgttctaagagtatcttgtggcatgctaaaaatgtattactaactaggaaatttaaaacttttttgttagtgattttaagagagctgactagctcatcaccacaattcacacagattaagaatggagattactctgctgagtggattcacagtgatcagaaaaaaaaatcgcaaaagarggaaggagatagagaaggggaaacatactgtcaatccctacaattaaagtgattttttgaatggtttgattttgtatttgcaaaggaaaggcagcttattgtgatggaataagaatcccacttctgtatatatatataca

SEQ ID NO: 753389 - DNA, 484 bp, Homo sapiens
tatactctattagggcatgagtttgtcttaactgaagaattggacaaagcattagctagtttttgaaatgttatcagagtcaatcctagatattataatgcacggtaagtggtaatgaagtgtaaagacaaagtcttgttgatggtgctggtagtcactaatttttcttgttagatagctctttattgtcatgaatttggctactaatacttagggatggtacatactggtcaataacttcaaactaacacgctttcttatgaaatgtatgtctttaacaaactcttaagttaactaatgataatagaataccagatcctyatactcaagagtttcagtcttctaccaaacttttgcagatgctctagttgtgttttgtttgtttgtttgcttgtttagttttgttacttgatttgttactttttcttcgaacacagaaatggtgattgagacaaaaagtgcttgggaaattggaaaggaatag

SEQ ID NO: 753390 - DNA, 622 bp, Homo sapiens
ctgagggtgtgcatgtgtatgggtgtaagtgtgccctgatgcacacaagcatccacaaaggaggcgatgatcccgcctggcacccacttggcttctcctagacccactggagcagaaggagcactccccagggaacagaactgccagcccagggacgctgacaccctcctcccatcctccccacactccatcccctgaccactctccttttggggttatcgcttacatgaatgtggcatggcgttttattrgtaacaacaataatatttattggccccaagtttctcatttgtgcaatggggatgaggatacccactttatagatgctacctctcatcctgacaagaagaacctcacagcgggggactgtttccccattttacagataaggctgtcgggctgagtggccaccgcttgcttgagaagccagagctgggaacagggtctgaagtcaaatacagatctatggggcgctgagcttcctgtgcccccagcaggaggagaggatggggggcttccatgcagggcctggcaaggggtgtgtgtgtgtgtgtgtgtgtgtgtgtgtgtgtgtgtgtgtgcagctgtgtgcacatgtgtgtgcacatgcgtgtgtgtgtgc

SEQ ID NO: 753391 - DNA, 625 bp, Homo sapiens
taatttttataaaattatacataactatatagagggatcttttgacatctgtttaataatgataatgtgaaagagaaggcagtaataatgacttacatttactgattttaggtcaggtactatgtatttgcttccatgaatgattttattttcttaaccattgtataagatggctactcttttttttgtaagctgaagtggttaagtaacttgtttaagtcattctgctactaaatgggagaaccagaatttaaaagtctgtctggttctcaagttcaatttctttctttattttatttatttattttttttracacagggttttacctgtcactcaggctggagtatagttgatctgagctcactgcaacgtctgcctcctgggctgaagcgatcctcccagctcagtctttcaagtagctgggactacaggtgcataccaccacacctggctaatttttgtgttttttgtagagacgggattttgccatgctgcgcagactggccttgaactcctgagctcaagtgatccacctgccttagcctcccaaagtgttgggattatgggcatgagccaccacacccggacaagttcaatttcttaacctacactgtatgatactgt

SEQ ID NO: 753392 - DNA, 588 bp, Homo sapiens
cagttgagggacattctacaaaattaactgacctgcagtcagttttaaagacctgcagtctttaaaactatcaaggttatgaaaattaagaaaacattgaagaaatgtaccagagtgaaggagacaggacaggacaattaaaggcagttcatgaatcattttgcaataagaggacattattagaaaattggcaagacttgaaatgggatctgatgtagtagtgttatcagagttaatttctgattttgatggttgttatctagttatagaggaaaattcccttgtttgtaggaaataaatgcctaagtgtttataggggactggacattatattggcaasttgctctcacattagaggaaaaaaaaatactttgtactctactgtacttagaagttttctgtaacttggagattgtcctcctctagaaagttaaaaagaacaactacctctgctaagggattgacttcttcttctgttggtggttttcaggtggccagtagttaaagggagaaacattttgtattgctgtacaaatgctattaagaggagcctctataatcagtcctgttttgtgaattatttatgga

SEQ ID NO: 753393 - DNA, 637 bp, Homo sapiens
tagtgcacccatcaacactaattctagaatattttcatcaccccccgaagaaaccacatacccattagcagtattgtctctatggattttcctattctggcctattctacgtatatttaacgtcagtagaatcatgcaacatgtggccttttgtgactggtttctttcacttagtgtgattttttttgaggtttgttcatcttgtagcatatattcggaaagcattttttcaaaaaccacttatcttcttcatttgaaaaaaaaatacaacttctagttagcttctgacagkcacagcaacaatgcattcctcccagaaaggtaccttttctcagccttgttttatggggtaaattctggcttcttttcttagctacccttctgtcctctcctctctccttccctcccctccccttctctgctctctctttcttctttctttcttatggaaaataactatcttcctgttcttcattgttctccaggtctcagtgttactgaaaaaggggtctcatctcagacctcaggagtgggttcttggatcttgcgtaggaaagaattcagggtgagtcacagaacacagtgaagttaagatagtttagtagagactgcttttattacagagtaagaaagttat

SEQ ID NO: 753394 - DNA, 624 bp, Homo sapiens
gtgatagacagctatttcacaacctccccagggtgcgcaaaagtcacctgctataaatagctcctcagcactcacgtcagagtcctcagttgaagggccaggtgaaaatataaattgcctgaaatatgtcctctgcattctaattccataggtgactatttgctgaaaattctcagtaatcctcctgacaatttcactataaatatactttaaaactttttttaaccattttctgaagtagtaggagaggtagtgtggtgagggttaagaacrctgcccaccaggaacaggaaaccaggattctcgttccccaatcagtcacgtaagagccaagtaagtcacttaagcctttaagaataaaattcctcatttgtgaaagggaaatgataatacccaactcaaagggtggcagtgagggttgcaaataatgcattccgcatcaggattttatcttataaaaatgacgtgacatttgtaatatcaaaaaaaaaggaaggaaggaacctaaaaaaaagaggcgattcatcaaaacaatcttaatgcattcattcaaagctgtatacatcatgtagccatgaaaaagatgtaatggaaagatggtcttgatgcagtaagtttaaaaag

SEQ ID NO: 753395 - DNA, 624 bp, Homo sapiens
gtgatagacagctatttcacaacctccccagggtgcgcaaaagtcacctgctataaatagctcctcagcactcacgtcagagtcctcagttgaagggccaggtgaaaatataaattgcctgaaatatgtcctctgcattctaattccataggtgactatttgctgaaaattctcagtaatcctcctgacaatttcactataaatatactttaaaactttttttaaccattttctgaagtagtaggagaggtagtgtggtgagggttaagaacactgcccaccaggaacaggaaaccaggattctcgttccccaatcagtcacgtaagagccaagtaagtcacttaagcctttaagaataaaattcctcatttgtgaaagggaaatgataatacmcaactcaaagggtggcagtgagggttgcaaataatgcattccgcatcaggattttatcttataaaaatgacgtgacatttgtaatatcaaaaaaaaaggaaggaaggaacctaaaaaaaagaggcgattcatcaaaacaatcttaatgcattcattcaaagctgtatacatcatgtagccatgaaaaagatgtaatggaaagatggtcttgatgcagtaagtttaaaaag

SEQ ID NO: 753396 - DNA, 740 bp, Homo sapiens
gatggtggtgtaaacaaacctgctgttgtgtgagtcatataaaagtctagtgtgcacagttatgtatagtatatgatacttgagaataaatgactgttattggtttatgtatttactatattatttttgttgtaattttagagtactccttttacttaaaaaattaaaaagttaactgtaaaacagcctcagcaggttcttcaggacctattccagaagaagggattgttatcataggagatgaccagctccatgcctgttactgctcttgcagacaccttccaggggaacaagagatagaggtggaagacagtgatattgatgatcctgagcctgtgtaaacctaaacctargctaatgcgtgtgtttctgtctttgcttttaacgaaaaaagtttaaaaagtaaaaaaaaaaatttaaatagagtaagtttgtagaataaagatattaagaaagaaaatattttttacagcagtgcaatatatttgtgttttaaggtgtatattacaaaaggactaaaaagtttttaaaggtttataaagtataaaagttacagtaagctaaggttaatttattattgaggaaagaaaaatatttttataatttggtgtagcctaagtgtatagtgtctataaagtctacaatattgtacactaatgtcctaggccttcacattcactctccactcactcactgactcaccctgagcggcttccagtcttgcaagctccattcatgat

SEQ ID NO: 753397 - DNA, 546 bp, Homo sapiens
caaacctgctgttgtgtgagtcatataaaagtctagtgtgcacagttatgtatagtatatgatacttgagaataaatgactgttattggtttatgtatttactatattatttttgttgtaattttagagtactccttttacttaaaaaattaaaaagttaactgtaaaacagcctcagcaggttcttcaggacctattccagaagaagggattgttatcataggagatgaccagctccatgcctgttactgctcttgcagacaccttccaggggaacaagagatagaggtggaagacagtgatattgatgatcctgagcctgtgtaaacctaaacctaggctaatgcgtgtgtttctgtctttgcttttaacraaaaaagtttaaaaagtaaaaaaaaaaatttaaatagagtaagtttgtagaataaagatattaagaaagaaaatattttttacagcagtgcaatatatttgtgttttaaggtgtatattacaaaaggactaaaaagtttttaaaggtttataaagtataaaagttacagtaag

SEQ ID NO: 753398 - DNA, 599 bp, Homo sapiens
agtaggttttgtgaaatttctcaaaaagctgctgaaatttttcttccattttgaatgtttggctttcaaatatcttgttaatcataataactttatattattactagttaacatcttaagacataacatgccagccaactaggaagaattttatcattaatggcagtggatataaattcataatttaaatggtcttcttgataactttggatttgaagggactacctgctggtctaattatcctaccattcttttyttttaacctcatattgtggctgatgtagaatttatatttagaacagaagggtttgctctgccattttctttaggtttattctgctgttgtctttctttcacctatttttttacagaaatatttttaaagccaatttttccaatatgagggttaacttagttaaaattagataatattatctaaaaatccctttgctgggcacatgttaatggaaatgtccagtctcacaggaagcaatcaattgagccagcactgttatcccttccacactttttttgagacagaatctcactttgacacccaggctgggagtgcagtgtcacgacaatagcgcactgcagcc

SEQ ID NO: 753399 - DNA, 607 bp, Homo sapiens
cacacacacctttgattcgtcaccctcattcctccagtcatttaagtaggagctgataaaagaaagccttcagggttcacagtattgccttggtggggttttttttttttgtatgttgcaagaataaacacaatagrggaaaattccaggcaaacgtggccattgccttgcgcgacaatagaggaaaattccaggcaagtgtggccattgccttgcatgacaatagaggaaaattctaggcaagtgtggccattgccttgtgtgactgccccactcatgtccatctggtcctggggcctgtagcctgcctgcacctcacagtcctaacagagctgttgacatccgtggagccccagaatttcaccaactgctagatgtatctttgggaagtgtattttgtggaacatactcagaacatgaggctgtcctttctacagctttcctccctagaccttctcaataactctgttcttaaatgtagacaagagcctgggatcatgaaaagcattgaaacctcagtaaccccgggacaaatggagaaccaaaatcctgtgcactggtgggtccttgggggaggagtaaaggggagtctaggagtcagggggcc

SEQ ID NO: 753400 - DNA, 625 bp, Homo sapiens
ttttgccagaaaacctgctgctcttccctttttcagtatattggatcatcatccatgtcacagcccaaattagaaacttcagtaacatctttggaacattctcactcatctctttcattcaataattaccaagtgctatctcctaaataccttcagaatctccatgttcttctycactgctattgccagtgtccttgtacagacacttgtcatctgtagtctaaattataacaaaatcttcctacaactgcctcattgccttcagtcttgacccagttactccaaagcattcactaacctgcaaccagagaatctgtcaaacacacaaatctgatcatgtcactccccagttttaaatatcctagggtaaattcatacttagagttgtatcagaagtaattcctgcctgcctctctaacctacagtttagctcacactccatagtgcaactgtacacaatttttagttcttcaaaagcatcgtgctctcaaagacttcagggtctttatacacacagtttgctctttctggcaaacttttccatagcctcttcctctggctaacttctgattatttttcagttcccccacttgaacaccaattcttcaggaatgcatcactttat

SEQ ID NO: 753401 - DNA, 581 bp, Homo sapiens
tggtttaaaccaaaatcttttctcatttctgcagaagctttgggctgatgcttccattcttattcccttgctattagtcctccagatggctgccaggaggatcatttaaaaccataaatcaagtcatgttacttccctgctacaaaccctccaacggctttccatttcatttagtataaactccatgcccttggtcatggcttaaacgtcctgtgaacttttgcaacctgtattagtctgttttcacattgctaataaagacatacccaaaactgggtaatttgcaaaaaaaaaaaaaaaaaaaaaaaagaggtttaatggactcacagttccacatggytagggaggcctcacaatcatggtggaaggcaaatgaggagcaaagtcacttcttactgtggtggcaggcaagagagagcatgtgcagaggaactcccctttataaaaccatcagattccgtgagacttattcatgatcatgagaatagcatggtaaagactcccctcaatcccccatgattcaattatctcccactgggtccctcccatgacacttgggaattatgggaggtacaattcaa

SEQ ID NO: 753402 - DNA, 647 bp, Homo sapiens
atgaatgatcagcacacatcttctttgataacctttcaactttattaatattaatgtttcatatgtagttttattatggctttcttctgattggaatttaatatagagaggttttattcatgtgagtgttaatggcattttgaataagctatgggagaattacaatgtaacactgctggatacagaatgattcttttagacaccaagactaataatttttaacaatatcgaaaaacattgtaggaaaagcttgaaccatgctggcaccagggacagacaagcatgaaagattaatgtaatcttgcatataatgacacacattcttacacaaaaaatccatctgcaatgtcatgtcagtcagcagaaatctttgatgggtggatacagctgggctgtctcttctggcagagctgcccyggaaaatgctaaatgtggttgtgatgcttggtgccatctgcagtgtgcccgtttatcctgtcttcactggcatttacgatactgcatagggcatcagtgactgtggagacagcgatacagagtgacagattcatttcctcggagggtctgagctctggtgggcctgtgtgccaccctccttcttgggtctgggtctcttataattggtgttggctttactttgtattttc

SEQ ID NO: 753403 - DNA, 539 bp, Homo sapiens
aagttaacattcaaatagtgaaatatttaaatctaataacttggaagtcaaattggctttgagaaaatgtcatttttagtagactaatgttggtaattgttaaatgcttaccttccacataacatatgagatcaayagaagtacaataagtccaagtagcaagctacttgaaataatcactatggtgaaataacgtttgggtctttgatgatgtagtccttccagtagaacctacgtgagttaagaaaaataaaactcaaaaaccaaaaaaaaaaatcagtttaaaacgttgcttatatttcctttaaagccctgccataatccccagtagtatttagaactgcccagcccattttcttgctggttctaatataattgcaggaaacactggtaactgtttagcagaaacagtgagtgtaatgggctgtatccatgacttttcctccaatctattcaattctcactgctgcccaattcacctctctgaaagaactgctgtattgttccctcctgccagttgtggaaaatgccaactctca

SEQ ID NO: 753404 - DNA, 496 bp, Homo sapiens
ttttgcaataatgcatgactcattcatttctcattaccttcccactgattttttttttttttttttttttttttttgccttgagccagcaagaaacttacttacatgagaggagggagaaacagagacagagtgagtttaggaatacagtacttaaatactgttgcttgattttcattggttatcycctttcttacgggggccaatctaatgcagccttccttgtgaaatcccccccttccccccaccttccctgctaggggcttcaaagggtgtctgttgctaaaaactgattgcaggcagtatgtaggcatctttcattcagaagggacattaatatcttgaatagagaagaaagcttttagaaatgtatcatttgtcaaaattgcatgccttttaaaaaatgataaagagagaggctgggtgttttgtatgtaagcatcgaccctttctttttatttctgttcagacgcaagtttttagaagctagaatatag

SEQ ID NO: 753405 - DNA, 496 bp, Homo sapiens
ttttgcaataatgcatgactcattcatttctcattaccttcccactgattttttttttttttttttttttttttttgccttgagccagcaagaaacttacttacatgagaggagggagaaacagagacagagtgagtttaggaatacagtacttaaatactgttgcttgattttcattggttatcccctttcttacgggggccaatctaatgcagccttccttgtgaaatcccccccttccccccaccttccctgctaggggcttcaaagggtgtctgttgctaaaaactgattgcaggcagtatgtaggcatctttcattcagaakggacattaatatcttgaatagagaagaaagcttttagaaatgtatcatttgtcaaaattgcatgccttttaaaaaatgataaagagagaggctgggtgttttgtatgtaagcatcgaccctttctttttatttctgttcagacgcaagtttttagaagctagaatatag

SEQ ID NO: 753406 - DNA, 593 bp, Homo sapiens
atttgtattcaattttagggtttgcttgtgtgtgtgtgtgtgtgtgtgtgtgtatgtgtgtacatgtttttgtttttgtttttgttttgagatggagtcttgttctgttgcccaggctggagtgcagtggtcccatctcagctcactgcaacctctgcctcccgggttcaagcgattctcctgcctcagcctcctgagtagctgggattacaggcacctgccaccacaaccagctaatttttgtatttttagtagagactgggtttcaccatgttggccaggctggtctcaaactcttgacctcgtgatctgcctgcctcagcctcccaaagtgcttggattacaggcrtgagccatcatgcccagctgggtttgctttttaaaaatcatttttctttaccttttttgtttcaatacgtgaccatttacatggttcaaaagtcacaactcagactacaaatcagactcagaaaaatctcactcccatctctatttcctccacagtgctcttcatccactccttatcatattattatgataataattatgtaaataaggtgctcttcatccactccttatcataattattatca

SEQ ID NO: 753407 - DNA, 593 bp, Homo sapiens
atttgtattcaattttagggtttgcttgtgtgtgtgtgtgtgtgtgtgtgtgtatgtgtgtacatgtttttgtttttgtttttgttttgagatggagtcttgttctgttgcccaggctggagtgcagtggtcccatctcagctcactgcaacctctgcctcccgggttcaagcgattctcctgcctcagcctcctgagtagctgggattacaggcacctgccaccacaaccagctaatttttgtatttttagtagagactgggtttcaccatgttggccaggctggtctcaaactcttgacctcgtgatctgcctgcctcagcctcccaaagtgcttggattacaggcatgagccatcatgcccagmtgggtttgctttttaaaaatcatttttctttaccttttttgtttcaatacgtgaccatttacatggttcaaaagtcacaactcagactacaaatcagactcagaaaaatctcactcccatctctatttcctccacagtgctcttcatccactccttatcatattattatgataataattatgtaaataaggtgctcttcatccactccttatcataattattatca

SEQ ID NO: 753408 - DNA, 626 bp, Homo sapiens
gccaggaaggtcgagactgcagggagcccagacgacatcattgcactctagcctgggcaacagagtgagatcctgtctcaaaaattaaattaaattaaattaaaatgcaatatgtttatgaagtctttataattcatccttaaaagaatatactacgttatatatgttttactacaacaaaataatatgcttgatgaacattttttccaatgttcgtgttccaatgttcatgttccratgtttccattttttccaattcaacaacttagacttttaaccattcatagcacttgaaattccagatattaaaaaaatgtaaccatacgaacactctttggagaatttttactttttataagtacaagttctggaaaataatcaactatacttttagtggagattttccttgtcagttatctttccaactgtaattcagtggtctcagataaccctcacctccttcagcagacccactatataacctccttaaccttttcttaaaagaaaaattgcaaatgatgtttttcttcttgctattattcattctttggcagaaattattcctaacccatgctttccccatactccaacatagttttgtagcactgacctacttggattcttgc

SEQ ID NO: 753409 - DNA, 611 bp, Homo sapiens
ttgcatattaggcctggcatggtggatcacacctgtaatcctggagctttgaagaattacactttgaaggttcctcctaaggtgggaggagtgcttgagcccagaacttcgagaccagcctgggcaacacagggagaccctgtctctacagattatttaaaaattagctgggcatggtggcwcgcacctgtggtctcagctacttgggaggctgaggtgggaggatcgcctgagcccaggaggtcaaggctgcagtgagcagtgatcacaccaccacactgcagcctgggaaacacagtgaaaccctgtctcaaaaaaaaaaaaaagttgcatgtttatcttaaatgtactcttaccaatgaaaaaaactattttgggacagatcttttacaaattatctaatattaatgtaaataacatacatcaattttccttcttcccctggtacaaacagataagacctgaaaacactggactttttctattaagattttgatcaacctttaactaaaaattatttcaaaaaaaagtttaaaaattgtcatatgcctctgaagatcaattattatacttgaataaaggtaaaagaagaagttttgattagaagagtg

SEQ ID NO: 753410 - DNA, 438 bp, Homo sapiens
catacaataacagtgggagactgcatcactctactgacattattagacagatcactgatgcaaaaaattaacaaaaatttttaagacttgaatgcaacattggaccaaatggatctgataggcctctatagaactctctaccccaaaacaaaataatataccttcttcttagtgccacaaagcacatactctaaaatcaactccacaattggacataaaagaattctcaaaaaaagtcaaaagtaccaaaatcataccaaacacccttttggactacagcgcaataaaarcagtagtcaagactaaaaaaattgctcaaaaccatgcaattacatgaaaattagacaatctgatcctgaatgatttttgggtaaataatgaaattaagacagaactcaagaagttctttgaaactaatgaaaacaaatatacaacata

SEQ ID NO: 753411 - DNA, 548 bp, Homo sapiens
tcagtaatgccaagtcagaagggtagaagaaaaattggaaatattaattgggagagttgtagtcagattttagaagaaagtaaaagtggtactcaataagggagtactgtaatttcccagtgaaacaaaattactctttatattcagctctctttacaattcttaatcacaaaaaagtctggtctcattagatttggcttaattatttatgtaagtgcagcaagaatcgcaattaactgcaaaggccttatacgttttcttkaccgaaacttttcataagaatctcaaatttgattttaaatattctttcaaggccaagaagccaagccaagaacttaccaccaaagttcatttgcaatacctagagatttgtgtgaatttattctcttcttgaggtccccaagatattctgaggttcctgtacctaccagaatgggaacttctttactgggaacggtgtaagccaggtgtcaggctgtttttttcctagaaggctttattaagctttggcttcataaagtcaaccttgcttccttatatttgattct

SEQ ID NO: 753412 - DNA, 548 bp, Homo sapiens
tcagtaatgccaagtcagaagggtagaagaaaaattggaaatattaattgggagagttgtagtcagattttagaagaaagtaaaagtggtactcaataagggagtactgtaatttcccagtgaaacaaaattactctttatattcagctctctttacaattcttaatcacaaaaaagtctggtctcattagatttggcttaattatttatgtaagtgcagcaagaatcgcaattaactgcaaaggccttatacgttttctttaccgaaacttttcataagaatctcaaatttgattttaaatattctttcaaggccaagaagccaagccaagaacttaccaccaaagttcatttgcaatacctagagatttgtgtgaatttattctcttcttgaggtccccaasatattctgaggttcctgtacctaccagaatgggaacttctttactgggaacggtgtaagccaggtgtcaggctgtttttttcctagaaggctttattaagctttggcttcataaagtcaaccttgcttccttatatttgattct

SEQ ID NO: 753413 - DNA, 619 bp, Homo sapiens
attttgttgtcaaaatctaccatcccatgctgttctttctctttttgtctgtttcctcactaccatagatttcggagtgcctttgcatcatcttcttaactctgtatacacctttgtaaagaaatcctaggaaggatttttatgtggtacatgtacgccacrgaatattatacagccataaaaggaacgacatcatgtcctttgcagggacatggatggggctggaagccattatcctcagcaaactgacacaggaacagaaaaccaaacaccgcatgttctcacttataagtgggagctgaacaaagagaacacatggacacagggagaggaacaacacacactggggcctgtcaggggttgaggtggggggagggagagtattaggagaaatagctaatgcatgctgggcttaatacctaggtgatgggttgataggtgcagcaaaccaccctggcacaagtttacctatgtgacaaacctgcatgtcctgcacatgtaccccagaacttaaaatgaaataacattttttaaaaatgcctaggacgttctggatttaataagaaattacatgcaaacaaacaaacaaaacacaagaaaaaaatcaggcaagtgttaa

SEQ ID NO: 753414 - DNA, 442 bp, Homo sapiens
gtgagtgttaagttggaagtttagggtattgattcgatatctttattcttccttaacacaagcatttgcaatgataaatttcactgtaaaaactgctttggaggcattctatgaattttgacatgttttgccactatttttattaaaacaaaagtttgaattatgaaagtgtcaaagtattatttcctcacagtttggttgactcattgattactgtsgtggtgtggtgcttacttttgacatatttgtgagtttctgaaattgatttttgctactgatttttaatcttatcccattgtggtcaaagaatatactttattcttatttattaattatttatgtcattttatatatattgcaattttattatggtgtagcatacggtctatcctggagaatgttccctgtgcacttacagaaaatgtatattctattgttgaat

SEQ ID NO: 753415 - DNA, 488 bp, Homo sapiens
gtggtgaggcaattttgttgttgtgagaacatcatagggtgtacttacacaaacctagatggtatagcctactatgcacctagctacatggtatatagcctactactcctaggctacaaccctgtacagcatgtgactgtactgaacactgcaggcaatcagaacacaatggtaagtatttgtctatctaaacattgggaaggtacagtaaaaatatggttttacaatattatggggccactgtcatatatgtgggtccactggtgaccaaaatgttgctatgggatgcttgattgtatttyctttttataattgggtggggtggaggaacaatgttttgaagagactcatacacagagaaatccagcttattctttctgcactaaggtacaaaagtaacaaggaaatgattaagatttatctttgtaaatctaaaatatcatcagaaacgaaagctgggcatccactcaaatacgcttaaaatgttg

SEQ ID NO: 753416 - DNA, 632 bp, Homo sapiens
ggtagaagaggcatctgtcccttcatcagtgttgagctcctgggaagcaggtcccttgctttgccacagtacaagtgccacagtacaaatgctacctaggaatagaatggagttgagtcgaagtagcatttctgattttgcgatgttgctaatgctgtcctctaaatactatagaaagaattctttttcttttctttgtttactctcaccttttggcaataatttccacttgtttttctttcctgctttttctctctgtacttttccttgcccagcagacactgctgattgtgacagctttttcaagggcacaacaccttactctgtttcctcctgcctttgctctgtaaggctgctctggcatggcccaaactttgagatgacttttcctttctccttgccaattttagaatctttctgttcarcatcatcatctgatagagatttgggactaagtaaaatgaatgttgtatgattttccctgtaattttagatccccaaatactgctcttggccaactacactattccctgtggcttttttactccaccacatttgagtaatattgttggcatggacataagtaaacagtttgaaaatgttgtgttttgtaaactagaagatggatgggc

SEQ ID NO: 753417 - DNA, 632 bp, Homo sapiens
tattgcagaacagcaaatgttgctgcctgatccttcctctggaagcttcatctcagaggggcactcggctgtatgaggtgtcagtcagcccctattgggaggtatctcccagttaggctactcgggggtcagggacccacttgaggaggcagtctgtttgttctcagatctcaaactccggggtgggagaaccactgctctcttcaaagctgtcagacagggacgtttaagtctgcagaagtttctgttgccttttgttcagctatgccctgccctcagaggtggagtctacagaggcagggaggcctccttgagctgctgtgggctccacccagatcgagcttcctggctgctttgtttacctagtcaagccttagcaaaggtggacccccctcccccagtctygctgatgcctcacagttggatctccgactgctgtgctagcagtgagcaaagctccatgggcgtgggacccaccaaaccaggcgcaggatatagtctcctggtgtgccatctgctaagaccgttgtaaaagtgcaatatcagggcaggagtgtcccaattttccaggtaccgtctatcacggcttcccttggctgggaaagggaattccccaacccattgcacttccc

SEQ ID NO: 753418 - DNA, 521 bp, Homo sapiens
actaggttacacctattaacaaatcttttacctttgataacagcacatgcatttgtattctgcctcagcaatccaaatatcaacaaagaaaaaaccacggacaggtaagattagaaccagatatcactaagcagagagctatttcagcatattttgagcaactatagtcaggaaaaatgatgatagttactcattgtatatacactgtattagccagggttctccagagagacaacaaataggatctaggtaggtaggcaggtrgatagatagatacatagatagatatagatatagatgtagatatagatatgtatagagatgtatatctgtatagatatgtatatctatatctacatctatctatctttatctatacatatatcaagaaagagacagatagacagacagacagacactggcaggcaagacatccagaaaagtgttgcagtttgagtccaaggtggtctgctggcaagaagtcaaccttttgcttgtatggtcttcagctgattggacga

SEQ ID NO: 753419 - DNA, 563 bp, Homo sapiens
ggctggccaaggctggagctggctccctctgtttgcgggggggtgtggagggagaggaactcgcgggccagtgcttgttctgggtgggcacgggcttggcgggccccgcactcagagcggctggcaggtcctaggcagtgaggggcttagcacccaggccagcagctgcggagggtgcgccaggccccccagcagcgccggcccactggggacacgctcgaattctcgccgggcctcagctgcctccccgcggggcagggctcaggatctgcagcctgcsatgcctgactgtggggtcccccgcagcccaaaccccctcgatgggcaccatcccctgctacacagcacccggttccatctactgcccaaaggctgaggagtgcaggccggcagtgcgggactggcaggcagctccgcccacggctctggcacaggatccaccaggcgaagccagctgggctcctgagtcaggtggggacttgaagaacttttatgtctagccacaggattgtatatgcaccaatcagcactctgtgtttagctcagggttggtggatgtgcca

SEQ ID NO: 753420 - DNA, 517 bp, Homo sapiens
gcgtgtttatgtcggtctccaataattgaagaggtaaacttcagacccacaacacttaggcttgcttctttcctctcaaagaatcactctaaaattagtaaaaaaaaacttctgcgggccgggcgtgggggcttacgcctgtaatcctagctctttgggaggctgaggctggcggatcatgaggtcaggagatcgagactatcctggctaacacggtgaaaccccgtckctacgaaaaatacaaaaaattagccgggcgtggtggcgggcacctatagtaccagctactcgggaggctgaggtaggagaatggcatgaacccgggaggcggaccttgcagtgacccgagattgcgccactgcactccagcctgggcgacagagcgagactgcatctaaaaaaaaaaaaaaaaaaaaaaaaaacttttgcttctgggaagatgaattagacatagcttttcctattccttctcttaagtgcaactagaaatttgaaaattatgtgtctgaaaatcatg

SEQ ID NO: 753421 - DNA, 488 bp, Homo sapiens
ggttaaactctatgataatataataatagtgtgtgtgccttgggagataagtaatatgaaactgtgagacaactctgggtataaagtaaaaagtgggaaaaattgttccccacataatatgataagttacacaatattatctaattcctatgtattgctgataataaatatttttcttccctgawaatagtcaaacaaaaatgtgtaaatgcaagctaaattacatttggaaaataatctaattttctaattgaatacaaaggaaattttgaaaaatttaggttataaaaatttattatttaagtatgaaattgtagaagaaataatgtatcatggcactaaatgtataaactgtgactagttgttttctatatttttccatttataaggaattaatattcagtctagttctatggtatttaaaatatatgtaacaagaaatctattggacatatcaaccaacaaattttgaaaagctgaagatatta

SEQ ID NO: 753422 - DNA, 660 bp, Homo sapiens
tttagggctgtataactatgtgtgtatctgtcagtcactgtcacagtttcttaatccactcctcctcctgaaatctgtattatatctctctctgcccttgaagctatttttcttcttgtattatattttgtttgatataaatgttgttacctttgttttctttagattttaattgcctgtttttctttttacattccttaaattggattctttcttagagctcctctttctctttatttaatgtctctggactcaggatgaggaagtgttgaccaggggacacgcagcagtggatattgtgtttgcatgaaacaaaatctacttttcacccaattttgattcttgtttcacttgatattactctgtgaccctgaacttctgctactatcagttgggatacaatactctacgggtccctcacatttaagcccatattatgagcaaaggcactgtctaccctcattctgaaatgccttttcaaggatgtctacatggtraacagccttagaagaagatgaaagtgtctcccttgagagtaaaaaggtttgcttatgtcctggaacataagaggtaatgtttctcacccagtgaaaagggaaggtttgtctacagcccattacaaaagatacagtttcctaagctcaagtttcctttcctgta

SEQ ID NO: 753423 - DNA, 482 bp, Homo sapiens
gggggcaggacagtgggtgcagcccaccagtgtgagctgaagcagggtgaggcatcacctcaccagggaagctcaaggggtcagggaattccctttcctagaagagggaagggtgatagatggcacctggaaaatcgagtcactctcaccctaatactgtgctttttcaacggtcttagcgaacggcacaccaggagattatatcccgtgcatggctcggagggtaccatgcacatgaagcctcactcgttrctagcacagctgtctgacatcgaactgcaagacagcagcaaggctgggggaggggcgcctgccattgctgaggcttgagtaggtaaacaaagctgccaggaagctccatctgggtagagcccactgctgctcaaggaggcctgcctgcctctgtagactccacctctgggggcagggcatagctgaacaaaaggcagcagaaacccctgcagacttaaatgtccctgtct

SEQ ID NO: 753424 - DNA, 553 bp, Homo sapiens
tgaaccccacacttcgagtattcttctgagacctcaattgctgatatgttaaggcaagtgacatagtcccacagttcaataaggctcatggttggtttttctttttcatattctttctcctatgtgctttattttggataaggtctttcatatgtcttcagtttcaaggattttttttcttctgaagtgtccaatgtgcttttaataccatccagcatatatttcatttcatttattgtatgtttcatctctagacattctagttagaatgttgcatatagtctccagacagaaaaccctaattggtgaattcctagctcctggtattctgctcagtttctctgggcagttccttcaacttacagaaccctgtagtacatatctcatctacttctgcatsctccaaactgagtctgagctttcagaattggttgaatcccagagaagtttttgtctttcatctgttgggctgtacccaactctctttccccagtgttcttttcctgccagccataaggtagataacagatattcattttggaatgatatggcc

SEQ ID NO: 753425 - DNA, 580 bp, Homo sapiens
tgccttggggcttgaactgctggctctccagtctccggcctgccgcctcaccctgcagatctcagggtttgtcagcctccgtgatctcatgatccagttccttaacacagatctcgttccctctctctccccgctccccacacatcctcttggtcctgcgtctccacaggaccctacaccagctgtcatgaggcacagaggggtgagcaaggtgcgggtgaggaagagccctcggagcccgtcccaactccgccacggctgtcactcctctctttgtaggcagaggtcccttggggtggcccacttagagccccaggaaaagayagggaacacagatgagatcagctccttgcattttggggaaacggaggcacagcaactgttggagaagggagccctgggagccctgagtgccgcaggcttctgtggccctggcagctcggcccagagtcaatggactagggccagccaggggactttccgacaagggccagctggtggtattttaggtcttgggggccgtgccgtctctgttatgagcacgcagccctgacgtgcttgaaagcagccacagacggtg

SEQ ID NO: 753426 - DNA, 580 bp, Homo sapiens
tgccttggggcttgaactgctggctctccagtctccggcctgccgcctcaccctgcagatctcagggtttgtcagcctccgtgatctcatgatccagttccttaacacagatctcgttccctctctctccccgctccccacacatcctcttggtcctgcgtctccacaggaccctacaccagctgtcatgaggcacagaggggtgagcaaggtgcgggtgaggaagagccctcggagcccgtcccaactccgccacggctgtcactcctctctttgtaggcagaggtcccttggggtggcccacttagagccccaggaaaagatagggaacacagatgagatcagctccttgcatttyggggaaacggaggcacagcaactgttggagaagggagccctgggagccctgagtgccgcaggcttctgtggccctggcagctcggcccagagtcaatggactagggccagccaggggactttccgacaagggccagctggtggtattttaggtcttgggggccgtgccgtctctgttatgagcacgcagccctgacgtgcttgaaagcagccacagacggtg

SEQ ID NO: 753427 - DNA, 580 bp, Homo sapiens
tgccttggggcttgaactgctggctctccagtctccggcctgccgcctcaccctgcagatctcagggtttgtcagcctccgtgatctcatgatccagttccttaacacagatctcgttccctctctctccccgctccccacacatcctcttggtcctgcgtctccacaggaccctacaccagctgtcatgaggcacagaggggtgagcaaggtgcgggtgaggaagagccctcggagcccgtcccaactccgccacggctgtcactcctctctttgtaggcagaggtcccttggggtggcccacttagagccccaggaaaagatagggaacacagatgagatcagctccttgcattttggggaaacggaggcacagcaactgttggagaagggagccctgggagccctgagtgccgcaggcttctgtggycctggcagctcggcccagagtcaatggactagggccagccaggggactttccgacaagggccagctggtggtattttaggtcttgggggccgtgccgtctctgttatgagcacgcagccctgacgtgcttgaaagcagccacagacggtg

SEQ ID NO: 753428 - DNA, 580 bp, Homo sapiens
tgccttggggcttgaactgctggctctccagtctccggcctgccgcctcaccctgcagatctcagggtttgtcagcctccgtgatctcatgatccagttccttaacacagatctcgttccctctctctccccgctccccacacatcctcttggtcctgcgtctccacaggaccctacaccagctgtcatgaggcacagaggggtgagcaaggtgcgggtgaggaagagccctcggagcccgtcccaactccgccacggctgtcactcctctctttgtaggcagaggtcccttggggtggcccacttagagccccaggaaaagatagggaacacagatgagatcagctccttgcattttggggaaacggaggcacagcaactgttggagaagggagccctgggagccctgagtgccgcaggcttctgtggccctggcagcycggcccagagtcaatggactagggccagccaggggactttccgacaagggccagctggtggtattttaggtcttgggggccgtgccgtctctgttatgagcacgcagccctgacgtgcttgaaagcagccacagacggtg

SEQ ID NO: 753429 - DNA, 620 bp, Homo sapiens
cgctccctggacagcgggtggctcacagcacgtgctaggacccgtccactgctccttagcaggcatgacgctaaccctccccacctgcttgcttctgcctttgaccctcacccggcccttcacaccctcgctgcttccactccggcctcagttcaaaggtcacctgttcgttccctkgtccatctgctggggagtcactttggtcaccctctgacacaatgccctgttgtgtgtttttcccaaacttaagctgatatgttcttggccactcattaaccagcgagttttctgatcccagggccttgcctaagggatccatcccaggaccccccaggaccccccaggcccacggagcccagtgtagatggaggaagcccctctccaaagccagggcactcacagagctcacacttcaggccgaacttcttcccaatcttgttgattctgaccataggggtgtccccgattttcttcagaatatctggcaagatttttggagattttgccctgaaacagaggagtccacaattattcaggaaaaaaaaaaaaaaatagtaccagccctggcagacattgtcttacacaaatcaacactcgaagaactggaaaaaaaaaaaaaa

SEQ ID NO: 753430 - DNA, 484 bp, Homo sapiens
tccctttgtaattaataagtgtcttgagcctggtgctgtggcacatgcctgtaatcccagcgctttgggaggcggaggtaggaggacggcttgagcccaagagttcaagaccagcctgggcaacagagtgagacccctgtctacaaaaaaatgcaaaaattarccaggtatggtggcatgtgcctatagttctagctactcaagagactgaagtgtgaggattgctttaacctgggaggttgaggctgcagtgagccagagtcttgccactgcattccagcctgggaatagagcaagaacccatctcaaaaaaataaaaaatgaaatgtatcttgtggcaggtactttgagattatgtacatttcctgtttctcatactttcacaaactagtgttagcatccatcgatgattcctgtctgaaacggcttactgtggtggttgccgaatggtgatgtttgaaagctgtcgtcatcctctacacgt

SEQ ID NO: 753431 - DNA, 477 bp, Homo sapiens
ctagctactcaagagactgaagtgtgaggattgctttaacctgggaggttgaggctgcagtgagccagagtcttgccactgcattccagcctgggaatagagcaagaacccatctcaaaaaaataaaaaatgaaatgtatcttgtggcaggtactttgagattatgtacatttcctgtttctcatactttcacaaactagtgttagcatccatcratgattcctgtctgaaacggcttactgtggtggttgccgaatggtgatgtttgaaagctgtcgtcatcctctacacgttagagaactcttgtattttagagctttttctgctccccatctattcatttatgtatttatatttttaaagaaaaacttattctgacccttattaaagatagcaaggcacttagtgctttgggaggcaaggcaggacgatagcttgaggccaggagcttgagaccagcctgggcaacaaagtgaa

SEQ ID NO: 753432 - DNA, 477 bp, Homo sapiens
ctagctactcaagagactgaagtgtgaggattgctttaacctgggaggttgaggctgcagtgagccagagtcttgccactgcattccagcctgggaatagagcaagaacccatctcaaaaaaataaaaaatgaaatgtatcttgtggcaggtactttgagattatgtacatttcctgtttctcatactttcacaaactagtgttagcatccatcgatgattcctgtctgaaacggcttactgtggtggttgccgaatggtgatgtttgaaagctgtcgtcatcctctacacgttagagaactcttgtattttagagctttttctgctccccatctattcatwtatgtatttatatttttaaagaaaaacttattctgacccttattaaagatagcaaggcacttagtgctttgggaggcaaggcaggacgatagcttgaggccaggagcttgagaccagcctgggcaacaaagtgaa

SEQ ID NO: 753433 - DNA, 576 bp, Homo sapiens
aatctccaatatcaagatcactgaataattagataaataattttagttaacaagcactgaagaattagataaataattttagttaacaagcactttcaagggcttgcatcatgtctaatagaactgtatagaagggaaaatttgctttaaagttggtatggattaaatttttattttttttttatttttgagacagagtctcactcagtcacccaggcgggagtgcagtagcccaattttggcttactgctacctccacctytcagcttcaagtgattctcctgcctcagcctctcaagtagctggaactacaggcgccctccaccatgcccagctaattttcatatttttagtagagacagggtttcactatgttggccaggattgtctcaaactcctgactcaggggatctgccggcctcaggctcccaaagtgctgggattacaggcatgggaccccctgcccagcctggaataacacttttaaattcatacatatgcacacacattagtattttataccagtaagtagcatatcatgctatgaaaatcattggcatcaaatgtgtaccaaga

SEQ ID NO: 753434 - DNA, 569 bp, Homo sapiens
tatgagctaccccaaaacaatttacttaaattatttttttaatctatgcttttaggtaggctaaatctatgtgttccctatagtcttttttcagtaactttacttatgaatatgttcattaaagaaggtaatttttacaactattgtaaaattttttgaatttgtgacatctaatgatatggtttggctgtgtccccacccaaatctcatcttgagttcccacgtgttgtgggagggacctgctgggaggtaattgaatcatgggggcaagtctttcccatgctgttctcatgatagtgaataagtctgatgagatgtgatggtttttaagagaggtgttcccctgcacaagctctctcattttctgtcccaccatccacacaaratgtgacttgctcctccttgccttctgccatggttgtgaggctttcccaaccacgtggacctgtaagtccaattaaacctctttcttttgtaaattgctcagtcttgggtatgtctttatcagcagggtgaaaatggactaatacatctaatatgtttgaatgaatatttcattttaggatttt

SEQ ID NO: 753435 - DNA, 675 bp, Homo sapiens
agtttgtgcatcataatgactcagggatccaagctgactgaggctctatctccacttgtttccatgatcacaaacacaggaggagagggaaatgtgaaggacatgctggtttcacaagattttgctcaggagacagatgtcaatttccctcacagttcattgatcaaagcaagttgaaaggagaagatagatatgaatggggtagagaattctaatcctctcctaaagagataatgaatattgctcccaaatattttccccaaagctaggagaagaggcttcaaattcaacaaatcaggctgaaaagcctatactcttaatcctatcaatctatctgtgtaattactatacataactatatgtgctmtctcggaacacatacaaacatacacatactcacacaaatacataagtagatgtatattcctttttagcgtattacaaaatgtaaaaccatttccagatttctgtccacatctagatctccctttgccccaatattacaaacttggtgttcatactttcaatgtgcatattttcataatttcataataaagttatcaataaaaatatattatattgtgtttcatatttaaataaaatgatatttttgtcacttgcttttgtcacttttactccacatcacatttgaattaactacagattttgttaatt

SEQ ID NO: 753436 - DNA, 601 bp, Homo sapiens
agaaggggcagaagtaaatctctgagtcctggggcattcttctgtacagagctgtacatcaaacttttgctgctaatgaatataattcatcaagaagatttttaaaaattttatatagttacatagactgctctcctgttgtggaaacatctgcttagaacctcagaaattaaggtatttaagcttttmtttcttaaataggacttaataacaacaggcagaattcatatttaattgtgaaggcttaattgttgtcatttctagttaacttcaaattaaacttataaaatacacacccatgcatgtatgcacacacacacacacacacacagacacactttttaaaaaacttgccaattccaatagtgagaaacaaatcacagaactcttttaacatgtccatggctatattgattctttaaactttatgttttcatgtacatttcaatttgcagatggctataaaattgacataagtatgataacataaagcaattttagaaaacttgagagcagcaattcattcagtggataaaacaaatattaataaaatttatctaattacatttacttcttctgtatttctgactataaaactagg

SEQ ID NO: 753437 - DNA, 601 bp, Homo sapiens
agaaggggcagaagtaaatctctgagtcctggggcattcttctgtacagagctgtacatcaaacttttgctgctaatgaatataattcatcaagaagatttttaaaaattttatatagttacatagactgctctcctgttgtggaaacatctgcttagaacctcagaaattaaggtatttaagcttttatttcttaaataggacttaataacaacaggcagaattcatatttaattgtgaaggcttaattgttgtcatttctagttaacttcaaattaaacttataaaatacacacccatgcatgtatgcacacacacacacacacacacagacacactttttaaaaaacttgccaattccaatagtgagaaacaaatcacagaactcttttaacatgtccatggctrtattgattctttaaactttatgttttcatgtacatttcaatttgcagatggctataaaattgacataagtatgataacataaagcaattttagaaaacttgagagcagcaattcattcagtggataaaacaaatattaataaaatttatctaattacatttacttcttctgtatttctgactataaaactagg

SEQ ID NO: 753438 - DNA, 552 bp, Homo sapiens
ttttaaagctgaagatcactttgtaaaaatgaaatcctatactatgtcaaataaataaaacagacccatggttctaattccactaccattcacttagtacacaggaaatagtccaagtgggagagtgatttactttggggcactttgctattttgcagcatttatttttgtggtaacaatagaagtgaatggtagcaatgtgtccccttatgtatagggggacactgaagctttcagmccttgataggtagatgatgctaagtagtttaacacttacagttgaagtatctttaaaagttcctttgtttctactttgctttggagaattatggattagatgtttaggaagagaatgtgaaagctatggaaggctctcttgttctcagttacagtaagagacttttgggaatgtttacatgatttcaaaaacttgtctcctcctaatgtgtggcatttcatgataattaaaaagcacaccatcttctgcttaatggaggatactcctatgatagtacatgaaggaatttataaaaacacagaattatcaaacta

SEQ ID NO: 753439 - DNA, 604 bp, Homo sapiens
ttcccttaaattcaataaattgattgaaaacaagttaaaaacaatcagttcaatagttgacaagtggtaaatgcacaatcttagttttgtgatggcgtcaataaaggttagacatcaaattacaaacagaaaatggtttagttcctctgtactctttcaccagtattcttgtgcagtgtaaagctctctagatatttatataaattcrggtacagctttacttcaaattataaatttagttaaaacatgttagaaaaaaaaatcagagaataaaatttggcactgagtggaaaatggagccagaggtacattttaattcccattcacagatcaaaatgactcaactgctaagaaatattttaatcttattttcctgctaacatttgaccccaagtgacttgccttttgtgctataccaggcaaaaatgtctaacaatgaaaaatgagcatttgtagttgctcatttcaagtattcccttgaaagagattatgaaaagtgaaagtgggaggttttgtgtctcttcctctttttttttttttttttgcaaagatgtatcttttataattttcagtgagttacaaaaacgttacaaaagtaaaaaag

SEQ ID NO: 753440 - DNA, 606 bp, Homo sapiens
attttctaattaaagccataaaaaactaccatgtattaatagagacctttttttaagtttgaaaaggaattattataaggctcttcatcttcttgttttgctgttggagcaattccaaatgaggctattcatggttaagatctttctagaatggggaccaagctcatmggctaagtccagagacttgaagatctggctttaaccccatgccagcacttaactggttttatgagataggtgttagctttctggttcttcattccctcatgtataagctagggataattatgctgattttacagcagttatgaaggattaaatatatgtgacacatctgcccatagtgcatactcagccaaagtaattccttaagtgtttctgtgtcttttcatgtcaaagttgagaaaaaacaaaacaaaacagcagttctaatatttggggatgagtttgtaccacggagctcatttctatagatacttttagggctttcaagggttttagtaaaactcactgaatattttcttttagattttagtataacatggtgctgtatctctacttttcttccagttaaagatttagaaaaaagaaaggatccaaagccca

SEQ ID NO: 753441 - DNA, 620 bp, Homo sapiens
gaaacatacacctagtttgctctagtatgtttgccaaacatactagaggcttcaaaggcaactcttagatgacagtactggataattctggaatttattgtcagcacactctagccatttgagagaactagcctgatgtgagacatagattttctttctttctttctttcttttttttttttgagacggagtctccctttgtcgcccaggcaggagtgcagtggcacagtctcggctcactgcaacctccgcctcccaggtccaagcgattctcctgcttcagcctcmcgaatagctgggattaccggcacccactaccatgcccaggtaatttttatatttttagtagagacggggtttcaccatgttggccaggctggtctcaaactcctgacctcaagtgatccacctgcctcagcctcccaaagtgctgggattacaggcatgagccaccgcacccaaccggtagattctctttcatttagatccaattaacttggaatctgtgcttccttggtcagaagtttgggggaaataatcttttgtcttgtctatgaagaaacaaatcagaagtagaaacaaagtgagagggagaaggtttagattttgtaaaggaacag

SEQ ID NO: 753442 - DNA, 659 bp, Homo sapiens
tgttaaagaaattagtgtactgtaatccctttaaaattgtgtctgattcatcacttcatttttctcagcactttgtatagtttatacatgatagatgcttagtatatatttatggaacaaatagacttaccagatttgtttaaaatataaaccaacagtgaaagcttattataagtcatcttattatcctacgcattttactgagggtcagtcattcattggccacagttaatatgagtctcagttgattggctgctctcccagcattaacaggctcctacggtaataccattgatagtcgataccattgtgaaccttaggcrcaatgtaatgcacttattaaataataaagtttaattttccttttactatcttgttctaacaggtgaaaagaaacttggtactgttatcactccagatacatggaaagatggtgctaggaataccacaggtatttcttcttttagaaaataggaatttaaccgaatacttactgtgaataataccttagtttttacattatttgtacaatgaaatgttatgtgttcaaagtattttatctattaaacattaaagaatactgggtcctcaagtgatttaatatcttctatttagttctcagttacttgtacgggttcctaatatcaggagatagcaaa

SEQ ID NO: 753443 - DNA, 666 bp, Homo sapiens
aaataaccactcaattttttttatcagttatttatttactcaacaaaacatttagtgaaaaatattgtgtgctgagggtgctagacactcaggctgcaaagccaaaaatgtcctgaaaataatttttctttttagatcagtgatcatagagaaataatcataataacaataatgatgatgaaacaatgatggtgcaaagaaggacaatgacagctcacacttacagtggttaccatgtgccagccagagggcactgttctaattgttcacatatgtgaactcatttaagctattgtgacagcactatgaggtggttactattatcctcactttacagaggaggaaatggcccagagaagtcatgtaactccccttgaccacacagcttcaagaggtcaaactgtcctgctggcccaggyactaactccagcatttgcctctcatcagcacatatagttgttcccctagcagttgtattcagagtattctcgaagctcaggaaaagaaaagcaggtcagacttaggtagtgggtaggggatattagaaaagcttccaggaggaggtgctctttgagttgaatatttaagtatgaataagagcaatgaggtgaaaaggacgggtgtgggacgttctttactcttgggaaggaaatgcagtatctaaag

SEQ ID NO: 753444 - DNA, 508 bp, Homo sapiens
tagattagatgctaaaaattctttttttttttttcagacggattcttgctctgtcacccaggctggagtgcgacggcatgatctcagctcactgcaacctctgcctcctgggttcaagccattctcctagcttagctgccccagtagctgggattacaggggcgcaccaccatgcccagctaatttttgtatttttagtagagatggggtttcaccatgttggccagaaaaattcttatatgttaagtatcaaagacttaatgaagcagcttggtataactgttarctttgtccctgcaactaaaaaaacaatccccagcattcatctgcgtatcttgctttcaacatccattgctcctatataattcacttctatagtaattgcatctcatgtaaagagagttgtttctatgttcaaatcatgttatatggccatgaaaaatccagagctttggtttaaaacatgttccattaaccctgctgagtctgtattttctgctttgtcagg

SEQ ID NO: 753445 - DNA, 475 bp, Homo sapiens
caggatggggaaaaggggaagaaaccaagagaatggactcaagactgaattacagaatgtctacgaaggcactcaatgcccacactcatctctaagcctccttctaccacagcactgttggcctccaggatgcaggtagaaaracaccctccactatactgatctcataactttaaaaaaacttcagccttgctcccagatatatctttatttttccaaattaatatttgtatgctatactaatgcattatctatattataaagcataaaatagaaattcaagatgagaaaaattccaaatagaaagtctaatacaggcctctctcaattagcattagaatccgtttctgaaaaattacatgttccacatgaaaatactaatcatgagcatattctccttatttaactgagaataattataacgtgtcaactcaaaattcctaaccagtttcctaaaagtaactataacacagta

SEQ ID NO: 753446 - DNA, 627 bp, Homo sapiens
ttcctatttttcccagtgttgatttccttattctcctcttttcttagttttgcattcaatccagtcttctctccttctgcccaactttctcaaacgggtcaatgttcagaagcaatcttgctaaatcagatgatgtgtatagcaattgtgctctgcaaatgtatagtccttttttgaagagtcttttgcattccttcttcctagaatgtttttgggcaaaaattttttacacctgaaaggcatgaagcaaaggctcacttgctgaattggcttcagtggcaaggcttcatctgtgctccaattcactggtttggaatttggccgagctcaggatcgtcttgctgttttgaacatataaaatgcttaaaayggttgtgaatggaaagcatattaaagaagctagagcaagaacagccatcatgagaacctgcaatacctcaatgctcctcaaaatactatttcagtattattggtagaaacattgctgaatttccattagttataaaactcgttgaagccaactctgctgaatctgagaaaggacgtttaagaggcacaactgtcccaacataggtgaaggtaggaaaatgagcgatctacctaaaatgtatgctagaccatgctatt

SEQ ID NO: 753447 - DNA, 622 bp, Homo sapiens
gaaaacaatagtctatttgctatacatattttacactagctaaaattgatgactattaatggaaaatatagttatgaattgccatccagaatattttaagaaatacaaagattttactggactatttagctgtttttctattgacaacattttttggttaaggatgtcccctatttgcatattgtattcttttcttcagagttaagatttgaaatgctattacccaaaacacattgatgatgacgatttttttaaacccatatattacatatatattaatccctattaatatccattagaatgtgacctccatgaggccagtgaccwtgtgtgtttgtccaatgtcataacctcagttcccagaagagtatataacatatttataacagatatgcaataaatatgtgttaaatgaaaaaatgaatgcattatctattgcattctgcactttactgtctactgtcagcattttattcgaggtatacaccttacctcttcaatagattgtaagttgtcctataggcaaggactataacctatggttatttttgtcctaatactagttaaaacaatattgggtccagagtaggtggttattaattattcaaattatatttaacca

SEQ ID NO: 753448 - DNA, 539 bp, Homo sapiens
ttgagtaatctcatattgtgggagaaaacacacgcatacacatatatatgcacacacttttatcatttattttactttatttaagcagatgaaagaaaattaattttaaaaacccataaacaagatatttcagaagagaaagacaaccaacaaagcaacttcattgtaagcaagaaaagatgtagcataaatgaaaaggtaataacagcctaaaaagtcagagtgttgaacagtgaaggattttrttgaaagagatttgattttaagtgttaataccttccaatttcatacaaaataccagagtaaaatgatgacaattttctacctagtcatggtattcctgaaaaatcgacaaatcccttaattgttaaggctttcaaacttctgttcttgagtatcttatatcatctgctgggtatttaaatttcatgatctgtcctgtaatgtttcattgaatgcagaagatttcttttaaaagatcatcattataagctatgtgtttgcatcgctgccatttgtcagaggagaagtaagtgtgg

SEQ ID NO: 753449 - DNA, 530 bp, Homo sapiens
aaatattattcagaaaaaaattagttggacctcacacataatgctttggaatgtttattatacaatgacattgacagttttatgcctgtacaaacttactatatgttccattgagtaatctcatattgtgggagaaaacacacgcatacacatatatatgcacacacttttatcatttattttactttatttaagcagatgaaagaaaattaattttaaaaacccataaacaagatatttcagaagagaaagacaaccaacaaagcaacttcattgtaagcaagaaaagatgtagcataaatgaaaaggtaataacagcctaaaaagtcagagtgttgaacagtgaaggattttattgaaagagatttgattttaagtgttaataccttccaatttcatacaaaataccagagtaaaatgatgrcaattttctacctagtcatggtattcctgaaaaatcgacaaatcccttaattgttaaggctttcaaacttctgttcttgagtatcttatatcatctgctgggtatt

SEQ ID NO: 753450 - DNA, 635 bp, Homo sapiens
catgctttgatgaagtaagctgaatgttggagaggcccatatggcaacaaactgtggtcctcagctcaactgcccacaagaagctgaatccgagtgagcttggaagcaatcatttccccactcaaacattcagaggaggcctccacccctaactaacaccttgattatggcctctgagagactctagagcaaaggacccacgtaagttgtgcccaaattcctgaaccacagaaattgtcagataataaatgtgtgttgttataagctactaaattctggacaatttattatgtagtatagaaaactaatgcagcccccaaatgtcctcctgagagttagaatatattccagttcatctaggatcaacaagcattctattaacaacatctttccaacagtaacacaacagtctgtgagtaaacgtagagcagtgactttgtcattgtgccattatcttttatttttaatagaaayctatggctgcagagtaaattcccttaatcttttttgaataaaccaatatttaaagataatgtgattatatatataatcaattcccatgtacagctgctgacaaatttagggtactcatatataaccttttaaaaagtaaaagttccctagaataaattaaa

SEQ ID NO: 753451 - DNA, 663 bp, Homo sapiens
acagaggaagagttccataagggatccacaatgatgtcacctgtctagtatcttaaaaggatacctctatttgctctgtcacgggaaaaggatgaaaggccagaggccagtgaggaggttcttcaaggacccagatgaaagatggtgatggctttcacaaggacaagtaaagagaagaagtggtcaagtgaatattttgaaggtgaggccaagagratttcctggcggcttgtacacaaggtgtgagagatgtctcaaggttttggcttaactaaatgacaagatgagtttcgctgagatggaaaacactgggaggactagatttgggaaaagggagagaccagaagctttgattcagacatgttaagtttgagatacttattgaagagctagctagtaagcagttggatatatgatctagaattcaggagaatggttcataatagagatataaatctggggattattgctgggtatatagatggtattggaagtcatgagagtgcagaccacatcaagggagtaagggtagacagggaggaggaaaagtcgacaactggctttgagagcccctagtgttaagatattaggaaaacgtagataaatcagcaaagaagcctacaaaggagtagtcagtgaggtaggaaaaaaccagaaaggtgt

SEQ ID NO: 753452 - DNA, 698 bp, Homo sapiens
acactggtgaacttttggtgacataggtcctatattgaaaaagagtagtgtttgttattcctctcaagcttcttagtgtcttaaggatcttgctgtaaaacatcatttgttattgttgtgctccattatcctcttccctttttgagtgctatgtttattttaaggaaaaggacaaaatagtgggatttggtggagaatcttctatcccaagaatagaaggcgtatgctctacatacaaattctggaagcagggctttgaagtatcctccctcctagaagatcaaagtccaggaaagtgaatacaaggaggaagaagagtagaggggggaaggaaaaacacaaaattaaccagcatattctaggattatatggagagaggttcttcaatttgccactctgcaatcatctttttttctcatgtgtcttcaygtttaaatagataaactttcctcaaacatgcgattatttcttgacactgtaacttagtgcaaataattcactcaaccttggatcacccgcccactttctgttttagaatgctgattaatcatccagagagtgctcacccctctgagaaacctttcctggtactggggttgccctttctctctttattctcccactgtactttagacatctgtgctgctggaggcagatttatctggcagtgagtgaagcctgaccttcaggatccctca

SEQ ID NO: 753453 - DNA, 654 bp, Homo sapiens
aatgactaaaaaaataaagttacagatttgcatcaagttgcctctaacactaccaggtaatcaaaagtgaaggcaaactggttcaaaacttgttctaagtgacttgtttgagaactgatttgtattttaacaaataaatagaatagacagtcttgtccaatagcagcatgtcttgaaattgaataaagatagaatctaaatactgctgataacatcacaagtcaccctccctacacaactccctcttaactattgcatttttaggcttttaaggtcactcaagtacatctattaaaaaacaaagctgggattatgtaacacgccatgcactatgcttagttcttttctgaaccatttgcctgggaatgcaccacccgtgaagcaaaaaccagaaggaacatgaaaataggtaggactttaggcagcggtcttttcattcatattatatcagtagcatcagttcatcactgaaaaatgagaaaatcttgrtatgctaaatgagtacaaatcaccaccacataacagagacaaccatacctattcttaacatcttttaaataaactctcccaggtatttttcttcacagatgtgtgaatttattttttaaaactatggtgactctataaatggcgtttcaagatcttttttttttt

SEQ ID NO: 753454 - DNA, 537 bp, Homo sapiens
ttcttgatcctatctttttttccacacttttgtaacttttgaaattcaccacgattctcttcatctttttccttcactgaaaacctggctctcctctgaggacacggtttcccttgcagtctttcaagcagtggctgtattttctcccatagctctagaaatactgggatcttaggttggaattttagtctatttacatttaatataatcactgataaagttggatttatggggtttttttgtatattgtatgtcttacgtctttttttgtgtctctawtcttcaaatactgtttctttttgtattaagtagctattttctgtgttccattttcattttcttattgtttcttttactttactttttaactattttcttagtagttgccctgaggcttacaattgatatcttattttgaaacaacctagtttggattaatatcaacttaatttcagtagtatacataaactttgtcctagtgtagttccagtccctttctccctcctttgtgctattatagtcatagcacaaagtcac

SEQ ID NO: 753455 - DNA, 549 bp, Homo sapiens
acctttttggcaccaaggactggtttcatggaaggcaatttttctaagggcaaggggatagtttcgagatgaaactgttctacctcagatcatcaggcattagattctcataaggagcacataacctaaatgccttgcatgcacagttcacagtagggtttgtgctcctatgagaatctaatgctgcggctgatcggacagggggcagagctcaggcattataatggtggctcacccaccgctcagccaccgctcacctcttgctgtgtggcccagttcctaacaggccacggaytggtaccagtccatgacccaagggttggggacccctgatataaggagcagttaaagacattgggaatatttagtacagagaaaataagtctcagctaggactcaatatttgaagacctgtcatacagaagatggtatcagcatacctactctataaggctacaggagttaagaccaattggaggaacttaagtagagacaggtttactttatcctaagaaagaccttctaacagtctgaagtcagcaaggctat

SEQ ID NO: 753456 - DNA, 496 bp, Homo sapiens
tgccctcccttcatctgtgcccatcagaatatcaaaggcccattttttagtctccaaaattttaaactcttagaagatggaaaccaagtatttcttttcacacccatcagtgggttatgggtggtaagcaccaagcacatgttgaatacataaatatctttcatcctctcttttcctctattcctacatataactaagagtgactgtatcccytagataaagaggccttccaattgtatgatactttagactttccaaaggttatggcgtagcagtcccaaacacctcatctgaagccaggctgtctgggttcccaccattgctgtgccagctgtgtgaccttggacaagttacataacctctctttgcctcagttttttcatcaacataaagggaagaataaaggtacttatttcataagagtttctagaaggattaaatatgttattcgtaaaatgctgaaaagtatgtctagcacatagtgagcattatataa

SEQ ID NO: 753457 - DNA, 595 bp, Homo sapiens
agttgtgtgaccttggataggtcacttgacctttctgaccctgtttcctcatctaaaaaatggtgagtgttccaccagagtacacctaattacagagattaaatggtacctgggttgaaagggatctggaaataaagctagaaatgtctcactgcatatacatttctttgaagtactgttttgccttacaaattcacgtaggtgttgcattttaacaccatattacctatttaatataaatttaatattttaaattacttaccattaggtaagatgtatcatactgtcctgaggtatcctctctttctctggaaccacatgccccagcttggaagtagagccctgcatgtaaagtgccttgaatgctaaaataagaaatttggatttttctctcgtaagtaatgaggaacyggggaatgatcagattagatggtgtatagtagaacctttcagtctagagtacgtacttatgtccttagggaaggtggtggtgctaggtagagcagttcttgaagcctcaagatactaaaactgatagtggtaattcaaatagtcatattcatttcacttatccccagacctctctcctactgtt

SEQ ID NO: 753458 - DNA, 566 bp, Homo sapiens
tcccttttgacctatttcttttttaatatagttcatctacttataactattatgcccatgcaactgccattaacacacttgagtgtttatgcttgcaaaaatatgtatagtgtcacctcattaattgtgtaaagtgggctgtgaaatatcctgtcatgtttttatgtttcttaaataaacccccttttctaaatgtaaataaatctcttaaagattttttttccagaattaaattttaaggatttttatcttttcggatttcaacatycagaattatggtgttctgaattagaatcagcttcctttgtcaggtagtttcatacttaatattggccatctgtgtttagtgtatatcatcacatagttagaagatgaatggagctgatggttgagatggctgagcaaaacttcagttgtcttttatttcatatgcatgggatttgtgcctgtaaatcaaaactttctgccttcttcttccacttagcagtgtgtgctggcctgcaaaacatagatttatatttgaagttcttacaacgtgtccaaataatcatatgccattagttttt

SEQ ID NO: 753459 - DNA, 614 bp, Homo sapiens
tagtgggacaagatgtgaaagtgagaaacaatgatatttttaaagtttaaaagttaaaaaaaaaaaaaaagagccaggtgtggtggctcacgcctataatcccagaactttgggaggccaaggccggtgaatcacttgaggtcaggagttcgagaccagcctggccaacatggtgaaaccccatctctactaataatacaaaaattgactggacgtggtggcctatgcctgtaatctcagctactcaggagrctgaggcaggagaatcacttgaaccaaggaggcagaagttgcagtgagccgagatcatgccactgcactccagcctggatgacaaggtgagactccatctcaaaaaaaaaaaaaagtagaaaataattgctaaatagaaaaaaaaacttttggaataagaatatcaagaaagaaagtaatttttacagctgtacaatgtgtttgtgggtacttttttcttccattaatttatttatttatttatttatttatttattattttttatttttgagacaggttctcactttgttgcccaggctggagtgcagcaggacaatcatggttcactgcagcctcgacctcccaggctggagtgatcctc

SEQ ID NO: 753460 - DNA, 626 bp, Homo sapiens
caaagaagggctggaaacatcaagaagacatggaacatttggtgagcactgtctgtctctgccaaaatgcctcccaacctcccatttgcctttgcctttctatcgtttccctggaagtcaaatagtcttttataggattattagctattaatagcatgtataataactactgatatctattaatagcatgtgttcatgaatcacttgcacatatcctttccacaattatttataggaattcttatttgttcattagagctatttatatataaaagctattttaggatttcttaatgatttcatttgtcatccgttctagtttttttctgtttgatttgcatttaatgttatgtatttggctggcatggagaagtttttattttaaaataatctgttttctattcattacatttgactagcaataatcagatttttrttgttgttgttgcttttaaacctgctttcttatcaaaatactacacattcacctatatcttcttattcttatggttagactttttacattttacttttcaataaaaaatataaaattattcgttgctagccaatggaaaatatgaggaactctcccagaacctaaacatgagattacataatgaaccaga

SEQ ID NO: 753461 - DNA, 611 bp, Homo sapiens
actccagcctgggctacagagcaagaccctgtttctgggagaagaaaaagggaaaaagaataaagggtattcaattaggaaaagaggaagtcaaattgtccctgtttgcagatgacatgattgtatctttagaaaaccccatcgtctcagccccaaatctccttaaactgataagcaacttcagcaaagtctcaggatacaaaatcaatgtgcaaaaatcacaagcattcctatacaccaataacagacaaacagagagttaaatcatgactgaactcccattcacaattgctacaaacagaataaaatatctaggaatacaacttacaagagatgtgaakgacctcttcaaggagaactataaaccactgctcaaggaaataagagaggacacaaacaaatggaaaaacattccatgctcatggataggaagaatcaatattgtgaaaatggccatactgcccaaggtaacttatagattcaatgctatccccatcaaactaccatttactttcttcacagaattggaaaaaactactttaaattgcatgtggaaccaaacaagagcctgcatagccaagacaaccctaagcaaaaagaataaagctgga

SEQ ID NO: 753462 - DNA, 611 bp, Homo sapiens
actccagcctgggctacagagcaagaccctgtttctgggagaagaaaaagggaaaaagaataaagggtattcaattaggaaaagaggaagtcaaattgtccctgtttgcagatgacatgattgtatctttagaaaaccccatcgtctcagccccaaatctccttaaactgataagcaacttcagcaaagtctcaggatacaaaatcaatgtgcaaaaatcacaagcattcctatacaccaataacagacaaacagagagttaaatcatgactgaactcccattcacaattgctacaaacagaataaaatatctaggaatacaacttacaagagatgtgaatgacctcttcaaggagaactataaaccactgctcaaggaaataagagaggacacaaacaaatggaaaaacattccatgctcatggataggaagaatcaatattgtgaaaatggccatactgcccaaggtaayttatagattcaatgctatccccatcaaactaccatttactttcttcacagaattggaaaaaactactttaaattgcatgtggaaccaaacaagagcctgcatagccaagacaaccctaagcaaaaagaataaagctgga

SEQ ID NO: 753463 - DNA, 658 bp, Homo sapiens
ttgtcaggttttggtacctgggtaaaactggccttgtagaattagtttggaagtattccctcctcctctattttttggaacaatttgatttgagaaggattggtattagttcttctttaaatgtttggtagaattcagcagtgaagccattatgtcccaggcttttcttttccgggggacttcttattgtggctttgacctcattagttgttattartctgttcaggttttggatttcttcatgattcaatcttggtaggttgtatgtgtctaggaatttatccatttcctctagattttccaagttattgcgatatagttgctcatagtagtcactaatgttccttttagtttctgtggtatcagctttaatgtctcctttaaaataaatctctgattctattcatttggggcttttttctttttttcttcattagcctggcaaaaggtttttcaattttatcttttcaaaaaaccaactttttgtttcattgaacttttgtattgttttcttcatttcaaattcatttatttctgctctggtctttattatttcttttcttctgctaattttaggtttggcttgctcttgcatttctagttctttaagatgaaccgttaggttatttgaaatttttctacttttttgatgtagaag

SEQ ID NO: 753464 - DNA, 532 bp, Homo sapiens
ggaaaacatggaaagggttgttggtttgcaaagtgtggtccctagagagcaatgttagcatcacctgagaacttgacagacataaaaatactcaagccccaccccagaccaactgaatcagaatttctggaggtaggcctcagcaatctgtgttttcaagcccaaaggggattctgacccacatataagtaccctggctaacaaaccaggactgctggccatggaagaggcagagaggcagcagagtggagctagtaggaatagagcctcggtgccaggctgcctgggtccaratccaggctttgcagcttcctagctaggggaccttaagtgaattggttaatatttttggcgttggtttctttataataatagacttcatgcataattagcatatataaagtgctcaggaccaagcctaatacatataaacactacataagtgtatgttttatgcagtgtgggccagcaagggagatggtaggactgtgtcataggagaccctggcctttgagcatcaggatggagcagg

SEQ ID NO: 753465 - DNA, 588 bp, Homo sapiens
acccacatctaatgtgggtacatgagatgtgcatctgctatgtacctaaaaaaactgagtttttatttatttttattttatttatttatttattttgagatagagtctcactctgtcgcccaggctggagtgcagtggcatgacctcggctcactgcaacctccgcctcccgggttcaagtgattccactgcctcagcctcctaagtagctgggattacaggtgcacaccaccacgcctggctaatttttgtatttttagtagagacggggtttcaccgtgttggtcaggctggtctygaactcctgaccttgtgatccacccacctcggcctcccaaagtccaatttttttaattaaaaaaaataataataatggctgtttattctgagattgcctcatcaagggagtcagcacagctactcacatttgggcaaagattcaaaggcagacagagaagcaggaaaagttttgtagtggaaaacagggaaggcttcaggtgtgctctgattgcaggctgtcagcatggggaagctgtaacggggctaatagaagcggggtatcctacatgattagttaggggtgagtgc

SEQ ID NO: 753466 - DNA, 588 bp, Homo sapiens
acccacatctaatgtgggtacatgagatgtgcatctgctatgtacctaaaaaaactgagtttttatttatttttattttatttatttatttattttgagatagagtctcactctgtcgcccaggctggagtgcagtggcatgacctcggctcactgcaacctccgcctcccgggttcaagtgattccactgcctcagcctcctaagtagctgggattacaggtgcacaccaccacgcctggctaatttttgtatttttagtagagacggggtttcaccgtgttggtcaggctggtcttgaactcctgaccttgtgatccacccacctcggcctcccaaagtccaatttttttaattaaaaaaaataataataatggctgtttattctgagattgcctyatcaagggagtcagcacagctactcacatttgggcaaagattcaaaggcagacagagaagcaggaaaagttttgtagtggaaaacagggaaggcttcaggtgtgctctgattgcaggctgtcagcatggggaagctgtaacggggctaatagaagcggggtatcctacatgattagttaggggtgagtgc

SEQ ID NO: 753467 - DNA, 627 bp, Homo sapiens
ctgagtccttggaggtccacggatcccagtttgaggaatggagcacagtctggatgaaagaaggagattggtaaaatctgataaggtcatggaaggctttggaacaaggatatagttgaagctaagtgggaagacaagaaggatctagaaagacaagcagaagagaggacttctactatccatcttgatagtaatacaggttatctgtgactcagccaacctcatctgatgcaatatggatatttatgaatcaattgacccaatctgacaccatgctcctcttcttatcctatcccataagtcttctttcagttgctataactaacaatcagagctgtctcttttaaagtcatttgcagcattatttccctggatacaattcccagcccctgacacactttgyaaggctggctccttctcttcaattaagtcttatccaaaataaactttttcagaaaggtcttctctgacaccttaatcttattaagtttccccgtattattcttttacatcatcctctattttcctttgaagcttgtatttcctttgaagcttctgtaacaaattaccacaaacttaataattaaacaatacaaatttatcctctggaggtcagaagtcctaaag

SEQ ID NO: 753468 - DNA, 560 bp, Homo sapiens
accatatacaaaaatcacaaccaagtgaattaaagacttaaatctaagacctcaaactttgaattactaaaagaaaatattggggaaactctcgaggacactgaactaggcaaagacttattgagtaatatcccaaagcagaggcaaccaaagcaaaaatggacaaatgggtttacatcaagttaaaaacttctgcacagcaatcacaacaatyaacaaagtgaagagacaacccacacaattggaggaaatatttgcaaactgccaatctgacaagagattaatagccagaatatataatgagctcaaacaactttataggaaaagatcaataatccaattaaaaaatggacaaaaaatctgaataaacattttttgaaagaagacatacaaatgacaaacaggtatgtaaaaaggtgttcagcatcactgataatcaaataaatgaaaatcaaaagtacagtgagatattgggcatagtggttcacgaccgcaatcccagcactttgggaggtcaagtcaaggcagaaggatcccttgattccaggagtttgagaaca

SEQ ID NO: 753469 - DNA, 631 bp, Homo sapiens
gcccaggttcccctctggctttccttgcaacagaggatccttgttactgctgggtggggtggaagttcagggtccccacaaggcctctgctggttccactctggcttggaagggcagaggttccctgtcattgcccctacatggcttccaatgacaccgtggagggacaactctttacagctggatttgctctccattaggycacctctgacacaaccacagcagggaggggaagggaaatcttgtttccatcaggtcaaagtggaagtccaggctctccacttagccttggctagcaggggtaaggccacagtttttctgtggtgtttgaatacaatagagtggttattgactgtattagtccattttcacactactataaagaactacctgagactgggtatattagtcagagttctctagagggacagaactaatggaatatatatataaaggaaaatttattaagtgttaactcacatgatcacaacatcccacaatagaccatctggaggctaaggaggaaggagagccagtctgaatctcaaaactgaagaacttggagtccaatgtttgagggcaggaagtgttccagcacaggagaaagatgtaggctgggaggctaggccaa

SEQ ID NO: 753470 - DNA, 589 bp, Homo sapiens
attatgccaagtaagagtcatttattgtctgtggatgtcatgggacatttccgttagggagtttgagtaaaaaaagtcaatgtcggccaagcgcagtggctcacgcctgtaatcccagcactttgggaggccgaggtgggtgggtcatgaggtcaggagatcgagaccaccctggctaacgtggtgaaacccgtctctactaaaagtacaaaaaattaggctggtgtggtggtgggcgcctgtagtcccagctacttgggaggctgaggcaggagaatggcgtgaattcaggaggcagagcttgcagtgagccaagatcacgccactgcactccagcytgggtgacagagcgagacgccgtctcaaaaaaaaaaaaaaaaaagtgaatgtcatgacatactgagtggtatatgacagagtacagaatatgtagctggggtaaattctatgcagtgttgagagttttggaaacactgttttgtagctcttttgaccttagagcatgggcattgggatcagatagatctgggtttgagtttcatttctaccactcattatagcactgccccaattgccccttagaactgat

SEQ ID NO: 753471 - DNA, 634 bp, Homo sapiens
atagtatccaaaacatcatggtattggcatgaaaatagacacataaaccaacggaacagaacagaaaacacagaataaatccatgtatttacaaccagctgaaatcctagcactttgggaggccaaggtgggctgactgcttgagtccaggagtctgagaccagcctgggaaacatggcaaaaccatgtctttacaaaaaatagaaatcagctgagcatggtggtgcatgcctgtcatcccagctactgaggagactgagaggtaggaggagcacttgaggctgggaggtcaaggctgcagtgagctgtcatcacaccactgcactctagcytgggtgaaagattttttttgccttagtctagggaagactttatgtctaaaacctccagtgcacagacaacaaaaacaaatggacatacctggttattccttccagtaacataaaaaatagacaaatgggactctattaaactgaaatctgcactgtaaaagaaacagtgaagacacaaacctgttgaataggagaatatatttgcaaacatcctctgacaaaggactaacaggctacataaggaacacaacaatttgtgaaaacaccattaaaaagtgggcaaagaactgaatagatagttc

SEQ ID NO: 753472 - DNA, 621 bp, Homo sapiens
gtcatttgtaaacagctgtaaagtccatgtgtcacaggagccatttatctcttatgaggttgggaagaacttcttgcccagcttgggattacaccagcaagaggctactcacaatgtagagaagacaaacactgaaactaagcatggcccacccyttcatgagggaaagactcattacagctgcgaagaattcataaaacctttttttttttttttttttttttttttggagacagagtctcactctgttgcccaggctggagtgcagtggcaccatttcagctcactgcaaactccgcctcccgggttgaagcgattctcctgcctcagcctcctgagtggctgggatcacaggcgcctgccaccaggcctggctaatttttgcatttttagtagagatggggtttcaccacgttggccaggctgctcttgaaatcctgacctcaggtgatccgcccacctcagcctcccaaagttgctgggattacaggcatgagccaccgtgtctggcccacaaaacctttcggcactactcactcacttgttccaccagaagcttttcactagagaaggatgttacgtgtgcagtgaatgtgggaaatcctttagcaaatgtaatac

SEQ ID NO: 753473 - DNA, 609 bp, Homo sapiens
agatggcacctactgttttcccttctgttccctcttgggtccccatttgttcattcattcatgcactcacttgctcaaacaatatttattaaggagctactatgtgccagatactgaaaatatagctttgaaccagacagataagtccctgccctcctagaactttcattcagctggggagacagataaacagatgtataaatacatacataaaataatctctgatggggacaggtagtattgggaaaataaagtaaggtgatgtggtagaaaggaatctttgaaagtctttactagccagccatttaaaagcaatgttctcacaattattatacacacacatgtatatatgtgcacatgtacacacacacatatgtatatatgtgcacatacacacatatagtcatccctcagtatactcaggaaatcagcgccagggcccccacatacaccaaaatcagtsagccctccatataagcaggtttcacatccctcaaatactgtatttttggtctatgtttagttgagacaaatccatatataagtgggcccatgcagttgaaaggcatgttgttcaagggtcaactgtacatgtatacatatatacgc

SEQ ID NO: 753474 - DNA, 462 bp, Homo sapiens
caggttggtgcactctaccggacccctctcgctgtcttctgtttagagcaggaaagcccactgcacagagcctcttagtgtctgctctttctcatgtgatacaaagctgtttttccttctctcgcttacttcctgctccaaagccacttggatagaacactgactctttgctaggtaaattctggcctcccatccttgatttcctcatctatgcaatggggataataattgtccctacaatactgaattttgggggaatcaaatgaggatgccacctctatggatatggtttttattacagttacaatcakacaaacacttgatgacagtgccccttatgtaaccattgacccctcctgtggacccagaggtgcctgcgttcagcacaggaaagtggaggtgcagaggagatggtttcctgcctcactgggcccccaggtattgctaccaagcagcccaccc

SEQ ID NO: 753475 - DNA, 473 bp, Homo sapiens
ccaggctggagtgcagtggcacaatctcaactcactgcaacctctgcctcccatgttcaagacattcttgtgcctcactttccgagtagctgggattacaaatgtgcacctccatgcccggcacatttttttgtgtatttaggagagacggggtttcaccatgttggccagctggtactgaactcctggcctcatgtgatccacctgcctcggcttcccaaagtgctgggattataggcgtgagccaccatgcctggcccattattttttcattcaataaatatttactgtgttcctatcacaacacaggccaagatytacaagctgtagattcagcatgcacagagtgtacaaaagtccctgcccttgggaacttacattctaaggaggtctcaagacagaagcacactggtgttcagtgtaatgtagaataatggagagaaataattgatcatggagagcctccctgagga

SEQ ID NO: 753476 - DNA, 612 bp, Homo sapiens
acttcttaatttaatcatatctacaatgtcccattttccatataaggtaacatttacaggttccagggatcaggatctggatatctgtgggagccgccacaggttacctagtttttccactaggtaaacagacccaygagtgttttgttaaagtgacatcagaatcaaaggcaccgtggtgtgtactgtcttcatttgggttccttctcagaagcggagcctgagacaaggatttgagtgcaagtagtttatttgggaggtgatctcagaagggcagtggggaagtgagacagggaagagaaggcaatcagtatggagtgtgttcgggagcaggttactgctatgagcaactggggctcaattctactgggggccttagggagacaggcaggggactgggatatttatccatcaactcctggggattttcaccactctcttcttcctgcttaccccaaacaacttcccatggttggagaagcgctctggcatagacacaagactctgtagtgggaagctgaaagcatgagcaggatcgacgaatgggcgggattgatgaatgtgggcagggaagtgtcctctgctatagatagtgtgagagaacagctgtgt

SEQ ID NO: 753477 - DNA, 519 bp, Homo sapiens
  misc_feature 8: n = A,T,C or G
atataganagtcatctgatcttaaatatgaggatggggccctgataagcaaaatcattatatgtagtaattattatatgtagtaaaagtaacgtacatatatatattatatatatgtagtaaaagtaatgtatatataaatcatgttattccttttactatatatatagaaaaagtaatatatatattrgttctttgatatatagtaataataatatattgttatatatataatatattactatataatagtataataacatataataaaagtaataatatgataatatttaaaacgattatttgcacaataaagttatgtatgtttaattttttaaaaaataattattttaacaaattcgtcatctgaatgaaaaattagatattttgtccgaaatgactctacaatggctttggaagttctaaggcatctatgtctatcagatttttctgatattttctgtattttttagaagctctttaagtttatatacatttctgagacacaagtaatcagtta

SEQ ID NO: 753478 - DNA, 519 bp, Homo sapiens
  misc_feature 8: n = A,T,C or G
atataganagtcatctgatcttaaatatgaggatggggccctgataagcaaaatcattatatgtagtaattattatatgtagtaaaagtaacgtacatatatatattatatatatgtagtaaaagtaatgtatatataaatcatgttattccttttactatatatatagaaaaagtaatatatatattagttctttgatatatagtaataataatatattgttatatatataatatattactatataatagtataataacatataataaaagtaataayatgataatatttaaaacgattatttgcacaataaagttatgtatgtttaattttttaaaaaataattattttaacaaattcgtcatctgaatgaaaaattagatattttgtccgaaatgactctacaatggctttggaagttctaaggcatctatgtctatcagatttttctgatattttctgtattttttagaagctctttaagtttatatacatttctgagacacaagtaatcagtta

SEQ ID NO: 753479 - DNA, 641 bp, Homo sapiens
tcttgttcaattataatgcaatatgctcttagttaaaaaaaaaaaaaaaaaaaagtgacgtctggctgggcgcagtggctcacgcctgtaatcccagcaccttgggaggctgaggcgggcagatcacctgaggtcaggagttcgagaccagcttggccaacatggcaaaaccccatttctactaaaaatacaaaaattaagtggacgcggtggtgcacacctgtagacctagctactcgtgaggctgaggctggagaatcgcttgaacccagggggtggaggttgaagtgagccgagatagcgccactgcactccagcctgggagacagagtaagactccatattaaaaaaaaaaaaaaagtaactgaaattttaagctaaatcaccttagacaaactgttctttgaaaagttctccattataaatcacttctttaatgacaaaaaaaaratcactttttaggaattctcttggctgctattctgccaaatgttatcccactgtgcctacctgcttcaaggcatgaaaagttctattattcccattttagaattggagaaattgaagcacaataaagttctctttaaaacactttctcctcatctttttttaaaatttcaaagccatagaaaagttgaaag

SEQ ID NO: 753480 - DNA, 530 bp, Homo sapiens
taaatatgagataaatagaaaataaatgtttccataactgttgatgagtaaatgaaagtggtctgggtaatgtttcccaaccttcagtgcagtatagatcctataaaggtctaaacatctaacaattcactcagaaaagtagaaaataaacctttctaaccatcttgcttcattgaaatctctatttactatgtgtggttgattttttaaatctctggattagactaaactcctactcctgtctacattctctccmgctcttccttctgctgccttctgctttaagagggcaaacttccttccgctttaggcagcattctcccacaataagggctcctatctcattcaaatcttcctttcttcatccagaagagtttccagagcccaccttctccatgacagctacacatttctaaagcactgtttgtctaccaactcctccttcttggctagtaaatacaaaataaagctagggggtaagagagtgatagaggggcaacagcaaaagttacaaatgttccctgaaggaa

SEQ ID NO: 753481 - DNA, 609 bp, Homo sapiens
ctactaagaagtatcccacccaaaatgcctatagtgtccctgctaggaaataccactttgagccacctggccttcacaaggttactgtgtgtaaacaactccaggtaaaatgctctttgttgtacaatatccttcctctcctcatctctccaacagctccaatctctattttattgttattatttttttagacagagtcttactttgtcacccaggctggtatgcagtggtgtgatcttggctcatggtctggacctcctgggctcagtcaatcctccccactcagcctcctgagtagctgggactacaggtgcacaccacttcacacccaactaatttgaattttttgtagagatgagatctcctacgttgcccaggcttgtctggaacccctggggtcaaggggtgtgcccrcctcagcctcccaaagtgctaggactataggcatgagctaccaagcccagcccagtctctcttttttatactgtcacgaatattttttggaagataatttctactactcccaactctctcctgacaagtttcttcctttttaaatgggttccaagctggccagatttcaaatgatcctcccaaagtacgccggga

SEQ ID NO: 753482 - DNA, 628 bp, Homo sapiens
cttaattcctctggagggtaatttgtgaagacctgggctgcaggtgaagtctaagttagagggagaagaggaacttctcaaggagagatatgagtgcccattgatgggcacttctcaacccttcagtgtgagctcatcatgtgccccataattggtgtccttctcaactttccgtctctgtcaaggtctccataaacattcaagtttccccaggcttgggtgggtcagtcccaaatcttgccagtacttcccttatagaatctattggattcatccctccctcccagccccagccccgtctcttgagtgcagcagcattcctagtctgcagacccagcctccagacagatgctgctgccccscttttgccaaagaagacaaatagttcttccttctggggtggagccagtgtagcacagtgattaagaccatgggtttcagagtcagttggccctggttcaagttccagtgccactacttcctagctgtgtggcctggagcgagttgcttaacttcactgtgcctcactttctttttgtctgtaaaatgagaattctaattacacccagcccatagtgttgtcccgaggattagatgaggctatacctgcacactgtaagcatctggt

SEQ ID NO: 753483 - DNA, 628 bp, Homo sapiens
cttaattcctctggagggtaatttgtgaagacctgggctgcaggtgaagtctaagttagagggagaagaggaacttctcaaggagagatatgagtgcccattgatgggcacttctcaacccttcagtgtgagctcatcatgtgccccataattggtgtccttctcaactttccgtctctgtcaaggtctccataaacattcaagtttccccaggcttgggtgggtcagtcccaaatcttgccagtacttcccttatagaatctattggattcatccctccctcccagccccagccccgtctcttgagtgcagcagcattcctagtctgcagacccagcctccagacagatgctgctgccccccttttgccaargaagacaaatagttcttccttctggggtggagccagtgtagcacagtgattaagaccatgggtttcagagtcagttggccctggttcaagttccagtgccactacttcctagctgtgtggcctggagcgagttgcttaacttcactgtgcctcactttctttttgtctgtaaaatgagaattctaattacacccagcccatagtgttgtcccgaggattagatgaggctatacctgcacactgtaagcatctggt

SEQ ID NO: 753484 - DNA, 595 bp, Homo sapiens
agggttgactttcatttattgggctggcactcggtggcgttggtgttactggaaagaggtcctgatccagaccccaagagacggttcttggatctcacacaagaaataattcaggataaatccataaagtgaaagctagtttattagagaagaaacaaaagaatggctactccatagacagagtagccctgagggctgctggttggctattttttttttttttttttttttgagacktagtcttgctctgtggcccaggctggagtgcagtggcatgatcttggctcactgcaacctctaccgcccaggttcaagtgatgctcctgccttagcctcctgagtagctgggattacaggtgcacaccaccacgcccagctactttttgtttgtatttttagtagagacggggttttgccatcttggccaggctagtcttgaactcctgaccttgtgatccacccacctctgcctcccaaagtactgggattacaggaatgagccaccgtgcctggccagctatttttatagttatttcttgatcatacgctaaacaaggggtggattattcgtgagttttccagaaaattccctttt

SEQ ID NO: 753485 - DNA, 612 bp, Homo sapiens
actatggatgtgaaatggcttgtatagatacataggcagagatgactcagcctgtgtgagctgtaactgaagccaaccagagtgcccaggtacttggaacgctgtacttataaaaaccttgtacttgtagaacttacaaaaaatatttcycctttttaaggtactgtgggagcctgcatctatcaactcctgccttgagccaatcaggatgccaggcctttcacagtctgctcaggaaaaaggccaccaggtcaacaaacccttctgacaacgcagttcagagctacagcagcaccctgtgatcatttcccaccaccctcatattctctgaactttaggctgcagcatgattactgcaaaaccatccagtaggtgtcatcaaagatgtaacccttaacagtaagacctcaaacactccagactgtgtagtttctgagcaattctgattgtgggctcaacttggttcccatcaaaatagtaggttacaagaccaaaccatgaatgctgcatctagaaagtggattaatgacgcagttctcaaactgtgtgctgaggcaccctggggcattgctggatatttatttattccctttgcccctctgtgtgtgtgtg

SEQ ID NO: 753486 - DNA, 590 bp, Homo sapiens
ctttagtttggtagggttttcccctgggactatggcccacgactctggagggggtggcactttgactcgggtgtgatgagttcatcccttttccgctgtacgaacagcagtctcggtagttagcagcacaaagtaggttccttcctaggctggctcgagtttttcttctttcctccctttgatgagaaygtgatcttcaggctggtgctggtttactggaaattctaggggcggtacctgtgctaaaagacttttagttttgagggaaaggaaagtggaagataaaccaagtatataatttctaagaaactgaccttttgttttaaatgtggggacattagcaatggatttgatagtccttggtgcctttctgctgagaaatttcctttagcatctattttttattagtttttagaccaaggaaagccaaacaccattttatatttaatagtgcttcttgtatgatttttataccagataagctaaatttcacctttatattggtgtgctattaatgttaaacttagttttaataaaactttgtgtacatatttattcaatttttaatgttggaccatgaggtaagattt

SEQ ID NO: 753487 - DNA, 635 bp, Homo sapiens
gagtgtttcttatggtaaagtccatattttcttgaaactctttatatgtattggtgattggaattgctaaacagttatcacacttgtttccaacaggaaaatccacatgcaaacactcaattgaaggagtgggtttaaatccagctggaggaatggaactgcaaccagtcgcaaaaataagaatattggccrggcacggtggctcacgcctgtaatcccagcactttgggaggccgaggcaggcagatcacgaggtcaggagatcgagaccatcctggctaacacggtgaaaccccgtctctactaaaatacaaaaaattagccgggcgtggtggcaggcacctgtagtcgcagctactcgggaggctgaggcaggagaatggcgtgaacctgggaggcagagcttgcagtgagccgagatcctgccactgcacttcagcctgggtgacagagcgagactccatctcaaaaaaaaaaataataatatcttccattgttgttgtagatttaccatcttcaacagcctatgagtaactgttccaaaaccccaaagcttttacatcaggtaatgtgtgtactgtaaaaagatcactaaggatttttgcagaaagactctcaggtttacgacacaggat

SEQ ID NO: 753488 - DNA, 635 bp, Homo sapiens
gagtgtttcttatggtaaagtccatattttcttgaaactctttatatgtattggtgattggaattgctaaacagttatcacacttgtttccaacaggaaaatccacatgcaaacactcaattgaaggagtgggtttaaatccagctggaggaatggaactgcaaccagtcgcaaaaataagaatattggccaggcacggtggctcacgcctgtaatcccagcactttgggaggccgaggcaggcagatcacgaggtcaggagatcgagaccatcctggctaacacggtgaaaccccgtctctactaaaatacaaaaaattagccgggcgtggtggcaggcrcctgtagtcgcagctactcgggaggctgaggcaggagaatggcgtgaacctgggaggcagagcttgcagtgagccgagatcctgccactgcacttcagcctgggtgacagagcgagactccatctcaaaaaaaaaaataataatatcttccattgttgttgtagatttaccatcttcaacagcctatgagtaactgttccaaaaccccaaagcttttacatcaggtaatgtgtgtactgtaaaaagatcactaaggatttttgcagaaagactctcaggtttacgacacaggat

SEQ ID NO: 753489 - DNA, 635 bp, Homo sapiens
gagtgtttcttatggtaaagtccatattttcttgaaactctttatatgtattggtgattggaattgctaaacagttatcacacttgtttccaacaggaaaatccacatgcaaacactcaattgaaggagtgggtttaaatccagctggaggaatggaactgcaaccagtcgcaaaaataagaatattggccaggcacggtggctcacgcctgtaatcccagcactttgggaggccgaggcaggcagatcacgaggtcaggagatcgagaccatcctggctaacacggtgaaaccccgtctctactaaaatacaaaaaattagccgggcgtggtggcaggcacctgtagtcscagctactcgggaggctgaggcaggagaatggcgtgaacctgggaggcagagcttgcagtgagccgagatcctgccactgcacttcagcctgggtgacagagcgagactccatctcaaaaaaaaaaataataatatcttccattgttgttgtagatttaccatcttcaacagcctatgagtaactgttccaaaaccccaaagcttttacatcaggtaatgtgtgtactgtaaaaagatcactaaggatttttgcagaaagactctcaggtttacgacacaggat

SEQ ID NO: 753490 - DNA, 608 bp, Homo sapiens
cccttctttgcaatgacatctttgaacatcacaatgctcatagtgctgcagaagctcttgataagcattttcctctaattctcaggatgcatctttttcaggaatatgaattcccattctcaacatctctttctgaaagatgtcactattattgcatattgtacacctaaagaaaaacactcctgcatttattgcttgaacctgtaaacagtctctatgaaaccaagcgttcttacaacaagcactttgtaatatgttataacttagaataggctcaataaattcygagcaaatggtgcatggtaaggagtctctataattattagatgtaattatttgaacaggtcgatggttccaacaaaatgatgtgaaattgccagtaaactggaaaatacattctctctgaagtccacatgggaaataacttcgtttacattagggtgcaacacatccaactgaagcaccatttttcttgcaaagacagcatttcagtttagaaactctattcacttccttcctggtatcttctaatagaaaaccacaaactccttctttacctctctgccaaattccacttgacatcaacaaagaataataatgtacggtga

SEQ ID NO: 753491 - DNA, 552 bp, Homo sapiens
tttgctacagtattgtgtgtttgtttggccatcagagaatcagaggagggaggtgtccagccagacacaagccatgaacactcgtgcctgcttccaagggctctggccacaaggtggcaccatgcagcaacgcgtgtccctccagttgtcttctctcgggggtggttgaggggcagctctgctgcaagcaagcttattctgagagctcagcagatacygtgccaaaggccagatgcaggggctctttctcacctctcgccttttgccgagattttgcaatcatcgagattgctggtgcagccctcagacgcgatttctgcagccagcccttcatgctttctctgccttccctcctcagtgactctcttcttctccaaatcctggaaactcccacaaatgtcactttctctgggaagcctaccctaatcaccccagaatgcgttccctgaacaccgtgtgcttctagtattacacttacttatcaacaagtctttactgcgcgcctatattgatcagtgccaggcattgttctggggaaactgcagtagacag

SEQ ID NO: 753492 - DNA, 539 bp, Homo sapiens
ctcgccttttgccgagattttgcaatcatcgagattgctggtgcagccctcagacgcgatttctgcagccagcccttcatgctttctctgccttccctcctcagtgactctcttcttctccaaatcctggaaactcccacaaatgtcactttctctgggaagcctaccctaatcaccccagaatgcgttccctgaacaccgtgtgcttctagtattacacttacttatcaacaagtctttactgcgcgcctatattgatcagtgccaggcattgttctggggaaactgcagtagacaggacagctgagggccctgcctgcagggtgcttacgttctgatgaggatgccagcagcartcagcacctggcctcatttcaaatgctggcacgtgctgttaagaacatgagcaggtcacaaaggaataattataaagagaaaaagccagtgagtggggtgtgtgaatcgaggagggtgagagggtgtatctttagtgctgtgaggaagcctcagaggtgtccatggcctggggaaagagagct

SEQ ID NO: 753493 - DNA, 510 bp, Homo sapiens
actttggacactatacaatctatccagttaacataacgtatggatcctgacctcctcaagcttaaaaacactgacaacttcttaaatacttacattggctacagaaaaatatattgaagaagaataaataccagttttaacttgccttttttatatatattaagaagcttagtttattcaaaacatctgtccacaagcctttaaactgtaagaaggcaagcaattaattacatgttaaaatttataaccaatattttcattttatgtaggttgagtacagaattgggtttgtgtaccacatgggttctttgtgttacagaaagacttctgagcatatacrtgtacgtttgtgcccatgccatagaatttgagcctcattttactaatagggccattatagagctttataactctccacctctacagcccatagtcagtcataattacatagagacccagatcaagaatgctatccagaatcgcaggattgagctcctagtggcaaaatgt

SEQ ID NO: 753494 - DNA, 501 bp, Homo sapiens
tgtgatatgttttcatcataccctcttaccctgacatagaagtatctctccccagcattcttttgctattctttgggaaagtgccatgtttttgcttttatttattttttaaggaagaaaggaatttaagccttttggattargatatttagctcccaagactttttaaaatgctcagtctaattttttttattgtggtaaaatatacatacctaacataaaatttaccattttaaccattttaaagtgtacaattgtcattaagtacattcacagtgttgtgcagccatcactgctatctcattccaggacttgtttattaccccaaatggaaaccccatacctattgagcattaattccccatcccctcctcccccagctcctggcaactactaaccaccatctttctctatggatttgcctctcctggacatttcatatgaacggaatcctatcatacatggccttttgggtctgagctccttcacttaatgcacttt

SEQ ID NO: 753495 - DNA, 619 bp, Homo sapiens
gtaggcctgctttcattttcagtggcagtggataaaaattcggtggcaactttggaggtgacacctgcccagatacattacataccctggaaacctccccatggctccacttcctgaagaaggtctagtatttgtggtcctgtgttgagaagaacccaaaatgcctgtggccctttccccagaaacttagggtttaagttagagatatcctaaccctccctttctcaacagttgaacctgccaaaaacaaaaacaaaaattgctaaaatggcattactgaaagtcaagctgcctggctcacagaaccaagggagakaccagaggctgggcagccatggcttgtcctgcaccaggattgttccctgtgagacgtggatggcagggccagccactctgcagtcccctccccttcagctcctgtgaggcagggattctaagcatgaggaaaggctgttcacccacctccacaagaaactgaatgtgagtgaggcgccaggcctctcaccctcctccttgacttgccgacacactccctgtctcagagaaattgattttttctcccagtttttattgaggtattattgatgtacaataaactatggagacttaaggtgttcag

SEQ ID NO: 753496 - DNA, 622 bp, Homo sapiens
cataattcaaatataatacttgatatgtaattaaatctatttacttttttttggtggaggagggggctataaaggcagaagtgcctcagaagtcacaatgtcaccctggcttcccttataatttttaatctaactttgacagcagaactaccctttgaaaactacaatttcaacagagggtgcagagttgcttgaacatccccagcacatgctgtgttttaaaacaaacaaacaaaaaacaagatgagctcctaattgcccgtactgataggggaaaataattgagccgggttaactcagactacartctttttccattacaatgcagtgttttgtgactttattttattcttaccttcctaatgatgaacttgggttcctcaaacataccccagccaggctgttgggggaactcagccttcagtatgttggggcagagaaattggaattaatttctcattgatacttaaccaaggtagatagcctgagaatatcaagaatggacatttaataagttgttggaaatgcatacataataccaagaaaaatctggtgagaatgggttaataattttatcttccaaaaatattccttggacctgtgctatacttggtatggaaaa

SEQ ID NO: 753497 - DNA, 550 bp, Homo sapiens
tttccttcatctccttagcccctggctctttctccagcccataagcctctgtccagctggctggagatgtgcatggtacatcattagccctcagtggatctgagcaagcatgacaagtctcagcgtcatgacagcagcagccctgctgaggacagggctcccrtccctactgcccagtgctgcctggcctgagccttcctgtgcttcctccacagggcagcccatccagtacgctcgctccacctgcgaggccggcgtggctgagctccacatccaggatgccctgccggaggaccatggcacctacacctgcctagctgagaatgccttggggcaggtgtcctgcagcgcctgggtcaccgtccatggtaggagcctctgggcacctgggtagaagcacctttcctgcaggcacttctgctttggaggaagggcacatttgtagaaaatggtatcatgagctcaaatccagggagcagaggtgcacatggcactactccacaccactggcagcggcaggtgccgtgacagaggagtggctgctgcaacc

SEQ ID NO: 753498 - DNA, 611 bp, Homo sapiens
ttccacatgcagttcaccccctgccctcactgccctcctgagatatgagggctcctccccagacagcctccagctgtggatgagaaacaatggcttagtgcttcctggaaattacctggggagatggagagctgccaagccaamcctgccagggtcatcagctcaaggccgacagtcaggcccagacacagcccggctcttcctccagcctccttcacccttcactgcagagggctgtctctctccctgtttctgctagttccacttccacacagccctgtccattctcaccaggggcagggcacagggatcccgcttctcaggttcctttagaattctttggtaccaaccttaggtcctttgaggatgagactcacttactctaggtgcctggaatttcacagctggaagggacctttgaaactactttcaatcccacctccagcccagaggggtgtggctgtatgccctttgggatatttgaggctacctcaccctagaacatcaactttactcaaagatttgggtgaagcatttttatattacaaccaaaaaattcagatcattgtataggataccaactgtaagtagattttacaaataaataggag

SEQ ID NO: 753499 - DNA, 484 bp, Homo sapiens
aagctggacttttttttttttttttttccaagcttgagaaaagtcattaggcattgacaaggctgtgtcaggcctgagtgccagccatggtttcctgcttccccatttagccaggtgagggtcaagagaatctgtttagggtatgagtcaagatagtgagccatagtcagctaggttcctctggttacttttattattaagtcattttgacagcagaattaaggaagatggaaaaaatactacccacggttgagtgcgagtctgtgaagtctttggccatttgtatgtatggtattgccatggttgcaatcatgagtatgtaatataggactcttacccctggcgttygtgtgtttgtctgttgcatagtgctgcctcgctattttaatgcctcccctggcccatcatgtgaatgctggcctgcataactgtgccctacggtgttgggctcactgcatagttccacttctccctactgtgagaa

SEQ ID NO: 753500 - DNA, 530 bp, Homo sapiens
gatgaagcaatgtgtcccaagtccaggtaaaaaagcaaactagggtttgcacacaggtagtgaacttcagaattcttcttcctctccattacgttggaaagatgaacaaagtagaaatggaacttttcatttgctgttaaacgacagcaaagaaaaatgcttccgaatatggcaattaataggctagtaggcccatccccaaagaaagaactaaggccctcttcttttttcccaattttttttttttttgagaccagtctcactctgtaacctaggctggagtgcagtggcgcgatctcggctcactgcaacctttgcctcccrgttcaagaaatcctcctgcctcagcctcccgagtaactgggattacaggtgcctgccaccacacctggctaatttttgtattttcagtagaaatggggtttcaccatgttgatcaggctgatctcgaactcctgacccatctgcccgcctgggcctcccaaagtgcgggattacaggcaccagccattgtgcccggccctcgttcc

SEQ ID NO: 753501 - DNA, 615 bp, Homo sapiens
ccgctaaacctttatcaggttctgctacaagggaacctgaccaggaggaaacagaggcaaggagggctaagaaactttcccaggagcctccccagaccacacagtagtagatttgaacccaggtagtctgagctcatggtctttaccactgctcttcatacgtaaagaacttgttatgtgccaatgaaagttatgtctcaataaacctcagctctagcctccttgctcagttgctgagcattgaaagtcaatcagacatgattcttgtgcttctcatagcctgcaaactcatggacgagacaaacatagtcaccagtggcagccagtggttacaggcataaacacacrcacacacacacacacacacacacacacaaacccacatacatacacatatataagcctacacacacatacatatacaaacctatacaaacacattaacacacacggaaacctatacacatatgcacattcacacatgcatatgcacccaagccatacccttacagtggaatcccctacagctgctaaaaaagaaagtcataggctgcatgttctaggaatgtatttgttaatggaataaaaaaaataaacaatattttggaaatttca

SEQ ID NO: 753502 - DNA, 621 bp, Homo sapiens
aacaaataaattacaaacaaaattgcaaacctgatcatgttcaagttaacagcattaatttaatgtagtaactaaaactaaatttcttctcatcatgtgacaatcatactgccttctaaagagcattctcagtatttggcctgcctttctatcttgtgtacaattcaattcttctgcaactctcccttataaggtggccatccataggaaacaccatattcttatactcaatttttatattattattgaaatgaaaaaacacaggaaaggttttcatagtgaagtatcctaccccagagaatgcacctatggattccactttgataaacactctgtaaccaatggatggatttgcccattygcccagatggtgattgtttgtactcaggctccctaactaaacaggaagctgctggataacgtgggtcagtttctattcccagaacctagaattcttgtcctcagttattgttgtagttgaatgagttgttctgagagtaggagtatccatatccaaagagagaatgtttgagggtgagcaacctctgtctgggaggctggccacaggcccagtggggtgtgcacaccagctggctctctgacttcctgctcctctccata

SEQ ID NO: 753503 - DNA, 634 bp, Homo sapiens
gaccaatgcctgtgtttcctcacttcaggacttttgacttctaaccgtgtccctgactcattctgccaccgctaaagtacacaaaggcataaaagataaaatgggttttttttctccagaaaaaataaaatgtttaaaggagaagtttaacatataagagccaagaaaatgttgattaaaggttaggagtttttatatgtcatatacatcatgactctataagtcaaagaagtgtggaaagtgaagctcagagaccctaagtgacttctccaaggctattcagtcatggaggaggagctgggatttcaccctgggtctgacctccaccttcttcctcctccctatagcaccaaagaacaaagggagaatatttcagccatcttctagtatccagtggattggcagaattcttttaggaagggatataatcaggaaatttccatctccacagaaagtattactaaagaaaatgcatggtaattaaarcataaaggatttcacttaatcctaaggaagagctttccagggataaggttaattaaacgctaacgagattttgttttaaaaaaatcaaaagcctcgaaaattctgctttcagatttctgtttatgaaacatcacaggaaaacagcaag

SEQ ID NO: 753504 - DNA, 634 bp, Homo sapiens
gaccaatgcctgtgtttcctcacttcaggacttttgacttctaaccgtgtccctgactcattctgccaccgctaaagtacacaaaggcataaaagataaaatgggttttttttctccagaaaaaataaaatgtttaaaggagaagtttaacatataagagccaagaaaatgttgattaaaggttaggagtttttatatgtcatatacatcatgactctataagtcaaagaagtgtggaaagtgaagctcagagaccctaagtgacttctccaaggctattcagtcatggaggaggagctgggatttcaccctgggtctgacctccaccttcttcctcctccctatagcaccaaagaacaaagggagaatatttcagccatcttctagtatccagtggattggcagaattcttttaggaagggatataatcaggaaatttccatctccacagaaagtattactaaagaaaatgcatggtaattaaagcataaaggatttmacttaatcctaaggaagagctttccagggataaggttaattaaacgctaacgagattttgttttaaaaaaatcaaaagcctcgaaaattctgctttcagatttctgtttatgaaacatcacaggaaaacagcaag

SEQ ID NO: 753505 - DNA, 633 bp, Homo sapiens
gacagagacttccctagcaaggttggggtttgggaggtttgtggatgtgaggtttgaagagagtgagtaatttacttgatgttttctctttcatttaaaggttgggaaccaataattcaactcctcaggtaattacttttcccaaagccagtgtgttctcctttagttgcttcttcaaacaatcacattaacagcataatctgcatttattctttgcacataatgtcactcaggcactggcatttaacgcgtgaaaacataaaactagaaagcctgtcgaagatttttttcttgtgcttttttatggatttctctttctacttctaagagctatgtttgtatcattaagagcatcatatggttattattttaggaaaaaaggtaatattaaaatcsaaagttcccacatttgtgaaataacactggattctgacaaccaagtgcttctgtgtccctgaagaaaagcagttttgaaaatagttatcgtctttattcagcttgtgaaaaatcattttcctttaccattttaaaataagagaaagatgactgaattctggtgctaaaaaggtattttaaaatctgatatacaatataagatgaaagatgtttgtacctcatgtaaactgaaaaggt

SEQ ID NO: 753506 - DNA, 669 bp, Homo sapiens
ggtgccttgcccctcagcctgcttctagatagcacttacctctgcatattaggatattaggagacagcctccaggagggacagcattaattggaccacaggatgctctgtacccttctctagggccttgggtgtcttgtcaattttatattttcataacttagaagcagtactcaagtgttttgaaaaaaatcagaaaaaaactgctcctgagtgactttctgtgtctactagacaaaggagtggtggctggcagtttttcttatttaaaaacaaaaaagtgtatgtgtttgcacacatgtgcacgtgtgtgtatgtctatctgtttctccaggtacccctctaccaatgaatggaaggttggcctatgagacccagagtcagagatgcagccaggcccccrgtatggcctggaactaggcactaggatgacatcagactcttcacattttccccacactctgctgtgcaggcttttttgtttcctctttttattcattctgtgaaacatggtaactgacatctggtttttaatgtttctggttcacctaccccaaaagaaaattctgtcttggtcctaacgttacatttctatgtgaggggctgtgattagcctgcctcaggtcagttgcccatctgagttccaatcaattttgttcaagtgggcaag

SEQ ID NO: 753507 - DNA, 636 bp, Homo sapiens
tattctaattggtcttgaggtgtctctattgaagactaaagccaagataaacatacacacacacacacacacacaaacacacacaccacagaatactaagcagccgtaatatgtggctttattttctttatccaaccaattgttgatggccactaggttgtttctatgactttgttattatgaataacgctgccctaaacatactagtgcagatgtctttttgatagaataatctctatttttagtgggggtaaatacccagtagtgaggctgctggggtgaagggtagktctatttttagttctttgagaaatctccatactgttttccatgcggtttgaactaatttatattcccaccaacactgtataagcattcccttttctctgccaccttgctagcatctgtatattttgactttttaataatagccattctgactggtgggagttggtatctcattgtggtttttatttgcatttctctaatgatcagtgatgttgagcttttttgcatatgcttgttgaccatgtgtatgtcttcgagaagtgtctgttcatgtcctttgcccactttttaatggggttgtttgcttttgcttgtaaatttgtttaaactccttatagattctggatg

SEQ ID NO: 753508 - DNA, 594 bp, Homo sapiens
tagaaactcaaattccagcattaagcaatagatcaatgtaataaacatgcacatgtaaaaaaaaaacaacataaccttccaccttaagaaaatggaaaaagaaaaacaaagtaaactcaaagcaagcagaaaaagataagagcagaaatgaatgaaataaagaatagaaagataatagagaagatcgagaaaacgagttagttctttgaaagtgagaagtcggggtaatagccaaaaacctttgtatcatttttgaaggcagacaccacagggaaaggcttttactggcaggcctaaagggagaaagctgcccccttgcctccccagattttgtgcacagttggtgcattgccatctctgatgagagttacagtcaagaactaagacctcgctgacctgtcatgctcttacatatgtcagcattcctggactaggyccccattcagaggtctctttatttggagccatagcagaggccttctttgggtacctctgcagagattccttattggggaaaggaggaaggaaacactaaagatactttttttcactctgactgaatactcaatacttttccactccaagtccttttcc

SEQ ID NO: 753509 - DNA, 558 bp, Homo sapiens
tttttatatcctcctttttgcacttttgcatttttaattttttaacaaaaaaatgtatctcatgatttttaaaaaaaggagtgaaagaatattttttcttctgattttggagaggggtgataagaagggtttaattcgcttcatagtcgtataatactgtcttcacaattctgccatgcttatttaatagccagtcaaatctagtatttggctttacagataactatgaaagtcttgagtcgagttaggtataaactgtcagtgcaagtttcatattaaactagctgtgcctattakacataaaaacctcttcccctgacacatataagcacactccagttctgctttggatacctggctgtggttttcctgttgaggattgcacacatttagcaaatataatccataaaccattcttggcttccaatgtgttcatctctctttgtaagtcttgatactccagggaggtctccattgagatggtctgtatctctgcatactggccactcgttaatccagctcttgttatctgacacagttgtgaatttagacccaact

SEQ ID NO: 753510 - DNA, 627 bp, Homo sapiens
agcctggatgagtctgggtttttcttgtgctcagaagggagggagtgtgtgttgattggttcacaggtggccatgggcagcccagaaaaagcaccataagctcttactctggccttagactccatctggaactggcagcctggccctcaggcttcaggcagtcagtggcttgaaggtggggtttcaccagggaaccacccctttccatccaggaacctgtctgcctcccactgtcaacatgtggtccatggtgccgtggctatttgtgctgaggggcacctgcagacccactgctgagctgccctcaccccscacctggcctacctcccacactcatggatgcccagaggtggccaagatggcagtgggtatgtggggggcggggtagtgtgtcagtgctgccccaagtgtttacacacccaccaggttgtgacagcacccaggcttggccataactttgctccaaaatcagatcaggcaccaggagaagccagggagcaggagcaggcccttctaagcctgaagagggcaggatggctttctgggcttctgagtgcacagggatgcccagatctggtgccatggctaggaggctgcaactgcacctgagagtgcagggatcctgcc

SEQ ID NO: 753511 - DNA, 588 bp, Homo sapiens
atgtgatctccattaacatgggatgaggactcattactgattggagggtaagaaagtcctggctccctactaggtcttcttttacatcacccggcagtggggttgggatgtctcctgacagcctcactaggatggatgtctaggctcctcgctccaactttgctggccagtgaaggtgaggctaccatttgtttctgtggtgcttagctggagtgaagtttgtattttcagaaagttttctgccttgctaggctgccgctttcctggtcctttggttggtggttttttttttttgktttttttttttttttttttttgtctgagaccattggcatttcctggttgctgttttcttccattccatgtctgggatatatgaggcaaaaagaaaacctagggaactcactatcttgagtggttcctcaggtctcaaggcttttgtccatctgactttttctcttgacctttcagagttgtcttatgtgattgatagatagacataaatgtccaaggcttttagtttactactcagtgggagaaagagtgaaaagcatttccgttccatctttccagaagtggaattcaccc

SEQ ID NO: 753512 - DNA, 534 bp, Homo sapiens
cagttgtttgtgaataactcagttttactcttagacttttcagaatccaccaaaattcaatgttattccaggagttattttcatgtcacttactcattatcaaagtgatttttcagattgaaggactgaaaatgttttctcataaactaagtcccaatttaagtctcagggagtatgttagttggaaacaaaaaagttattagcacattaaactctaccaccaatataaacatttaaaagtagagtaaatatgtacacaaagtaaaagcttacaaagataccatacttatattaaccaaatcctacatgattctaccacaaagaagtttcattcccatctttyttattcgtgtgttcattttgaatgtccttattttaataatgtgatgaacacccacagacctattacccagaccaagagctagaacactaacaaggactcatgtttacttatgtccttcccttcttccttccccagaggtcactgccagcttgaattttatgcttagcattgtcttgctttccacccctgta

SEQ ID NO: 753513 - DNA, 596 bp, Homo sapiens
aactgggagacacctcccagtaggggccaactgacaccttatacaggcaggagcccctctgggactgaagcttccagaggaaggatcaggcagcaatatttgctgttctgcagcctccactggtgatacccaggcaaacagggtctggagtggacctacagcaaactccaacagacctgcagctgagggacctgactgttagaaggaaaactaacaaacagaaaggaatagtgtgaacatcaacaaaaaggacatccacaccaaaaccccwtctgtaggtcaccatcatcaaagaccaaaggtagatacaaccacaaagatggggagaaaccagagcagaaagctgaaaactctaaaaaccagaggactcttctcctccaaaggattgcagctctgcaccagcaatggaacaaagcaggatggagaatgactttgatgagctgacagaagtaggcttcagagggtcggtaataacaaacttctccgagctaaaggaagatgtttgaacccatcacaaggaagttaaaaaccttgaaaaaacattaggtgaatggctaactagaataaacagtgtagagaagatcttaaatgacctg

SEQ ID NO: 753514 - DNA, 596 bp, Homo sapiens
aactgggagacacctcccagtaggggccaactgacaccttatacaggcaggagcccctctgggactgaagcttccagaggaaggatcaggcagcaatatttgctgttctgcagcctccactggtgatacccaggcaaacagggtctggagtggacctacagcaaactccaacagacctgcagctgagggacctgactgttagaaggaaaactaacaaacagaaaggaatagtgtgaacatcaacaaaaaggacatccacaccaaaaccccatctgtaggtcaccatcatcaaagaccaaaggtagatacaaccacaaagatggggagaaaccagagcagaaagctgaaaactctaaaaaccagaggmctcttctcctccaaaggattgcagctctgcaccagcaatggaacaaagcaggatggagaatgactttgatgagctgacagaagtaggcttcagagggtcggtaataacaaacttctccgagctaaaggaagatgtttgaacccatcacaaggaagttaaaaaccttgaaaaaacattaggtgaatggctaactagaataaacagtgtagagaagatcttaaatgacctg

SEQ ID NO: 753515 - DNA, 593 bp, Homo sapiens
aagtgctgttacaatatcacttgggctctgggcctcagtgccctgatgtatgacatggaagataacagcagctgtctccgaggaccactgaggggcttaaaagaggcgatacatataaaggtgcatataaagcgcctgcacagggcctgatgttttgccaggtggtggctacttttgttaatttaagaatgagtgatctcttgaatttgtggcctccatagcaaatgaaaagtagcaatggaggaaaacccactggtatctcctctgtaagtttcatctctgaaacaggaattagcaccattgttaataacatgcgagtatctgaatttgagttgtggtaatgttcgtgtcctggtgcgttttcaattggtgccatttcagaaggaggcattygtgctataatggaaagcttcagtgcaaaacgtctgaaagaaagtctgatgtctgttgtttcgtttaagtcaagttctgacaacggtacgttctagagaattgcagatgttctcagatcgtgtgatatttctctaaaaaccatgtctgatgtttatccgctggagcaatctggtatgatgaggaggataaggctctttttt

SEQ ID NO: 753516 - DNA, 571 bp, Homo sapiens
  misc_feature 85: n = A,T,C or G
ttttaatgtcaaacattaagtactgtctatgtattaattcatttaatcctcacaaatacttacaatgtaggcactagttatatgntctagtttaaagaaaaagaaaggcacagaagaaagagaaataatttggcaaaaccatggtcaatgttggaagcagggttcaccttaagaattgatgacagagcccaggctttacccagtacacactttattgtctctctagcaaaagtaggctttggacagaaaattgtaaaatgttctttctagtggcccagaactctaatttaacactttccaataattatcacactcctggatkctagctattatgtccttaagaagatgtttcggggagaaaatattttgtcttgcaataaacaccgaattgatttttgttatctcatcatgcccagctcaaaaagcatacttttgcatatgggattaatcattgtctaatgggtctcacaggcctctttatcccagctcaccggtctccagattgtggaaaaacatgcatggcaaaggtgataatattagcctagattttaggctgcctcagcctctcccc

SEQ ID NO: 753517 - DNA, 547 bp, Homo sapiens
tatgatggtgtttctccatgagcagtccaccatgtttggctcaaaatactcacgtgctctctgaaatgaaagaactctggccccatcccatatttatttaatcagaatcactatagtgagggtagaggttataattcctggaatctttatttttaagagtttttttgtttttttgttttgtttttgtttgtttgttttgagackgagtctcactctgtcgcccaggctggagtgcagtggtgcgatctcggctcactgcaacttctgcctcctgggttcaagcgattctcctgcctcagcctcccgagtagctgggactacaggcacgcgccatcacacccatctaatttgtgtatttttcgtagggacggggtttcaccttgttggccaggatggtctcaatctcctgccctcatgatccacctgcctcagcctcccaaaatgctgggattacaggtgtgagccaccgtgcccgactttaagagattcttttttaaggttccttccttttacgtgttatgaaagtatttttatttctccattttgt

SEQ ID NO: 753518 - DNA, 590 bp, Homo sapiens
tgccctctgggccctggtgagcttcagaaacatcaggaatgacctttggtgtcaagaactgatgactggattaacccttcttggtgtggtgctttttatccttgcagttatgtctcctaaaatctatcctacaaatgaacttgaggtcatgggttagttctgctcaccccttctctggatcttatttctgatttactgagtatcccctactgaactggtgactcctgctcaatatcttcatacatctgagtcactgaccacatcagatggaggagatagaaatcctgggctaaacaacaaacaactcgttgttgttgttgagacagggtcttgctctgttgcccaggctggagtgcagtggtgcaatcatgattcacttcagcctctayctccctggcttaaggaatcctcctgcctcagcctcctgaatagctgggactgaaggcacacaccaccatgcctggctatattttttcttttattttttggtagagatggggtcttcctatgttacctaggctggtcttgaactcctgggctcaagggatcttcctacctcagccttccaaagtgctgagaatacaggtgtg

SEQ ID NO: 753519 - DNA, 613 bp, Homo sapiens
aataacctgaattaacaagttttaaagatccattgcctgtggaacaagaaagggaggaaaaaatgtcaaatgactagaatgcttttagtccctgatcctgggaaggcggttattgatacccacaaccagattccctaaagtgagaagagctttgtgagagaaatcaagctcccctgaggtctgtgacttttgaaatgtctttaggacattgaaaacactgatctagagccccgaggagcagccacctctcagctccaacatcctttctatctcacgtcccacctcttccatgaagcgtgccctgacccctcagtctgcactgtgttgtccgtcgctgacccattgttgtgggtggacacagtgccctagtgttctgtgatgcagtctcctattatctcatatgttgggttccgctgagctgagctctccctcactagtgatgacatctgtattatttatgtctgagaaggttrtgaactcctgaagcttcatctgagttccagtccctggggatttgggggaatttaactccattgaggattagaaggtcattgcttctctatgattttggctatgcccttgatgtctctaagatgaagaagcaacaacaatg

SEQ ID NO: 753520 - DNA, 661 bp, Homo sapiens
tgtttctcatattagactatgggctgggccacatgggtttagatccttagtataactcattcagtttttttgggtcaagtgtgtgtattctttgaaggggaacagataccttcatacaaattggcttacataaataaataagagattcataattgaagtgaaagatcatttaaattcagagagagcagggtatcaaaacaggaaggcagccaactccattgacgtgaagctgtgtttttgagattgcttttagatgcaagtttcaggatattcaactctttctacttcaacaataggcttttatcctaatagacagaatatctggaatcagtcartctggagttgattcaatgcctcaatggtgtgatctcatttttctcttctggcatgctaaggttgtccactgtatcttccctattaataatagggaagatatagatattaataatagagaaataatagttttaccaaatcattttctagcacatggcaggattgaactttctagtgccttcatggtcaggtggttccacatgagtaatttgttccagagaattcagaacagaaggaacaaacgccatttatggtcaagaccagttaaatgtaaggttgagatcctcagagtttccttcccattagcaaagcaacaagcagcattcaa

SEQ ID NO: 753521 - DNA, 661 bp, Homo sapiens
tgtttctcatattagactatgggctgggccacatgggtttagatccttagtataactcattcagtttttttgggtcaagtgtgtgtattctttgaaggggaacagataccttcatacaaattggcttacataaataaataagagattcataattgaagtgaaagatcatttaaattcagagagagcagggtatcaaaacaggaaggcagccaactccattgacgtgaagctgtgtttttgagattgcttttagatgcaagtttcaggatattcaactctttctacttcaacaataggcttttatcctaatagacagaatatctggaatcagtcagtctggagttgattcaatgcctcaatggtgtgatctcatttttctcttctggcatgctaaggttgtccactgtatcttccctattaataatagrgaagatatagatattaataatagagaaataatagttttaccaaatcattttctagcacatggcaggattgaactttctagtgccttcatggtcaggtggttccacatgagtaatttgttccagagaattcagaacagaaggaacaaacgccatttatggtcaagaccagttaaatgtaaggttgagatcctcagagtttccttcccattagcaaagcaacaagcagcattcaa

SEQ ID NO: 753522 - DNA, 593 bp, Homo sapiens
ttattaataagatctctcgtggcagaggcctgaaaatcaaatgcaaatatgtaataagacagggtatgcttttaacacagcccacataggcattgctgaagtattaggaacggttttatatatggcctggtactggctcagtgctaattcatagaaataaattcagccaagggccttgatacccatctcatgacaaagagctgtttgcaattagaaagaattggacagatgtttacttctttgatattggtaaggtacggtggacagttattgcccttggtgtkagactaggcttgtgtgaaattgatgcccttatatcgagggtagaaattgagactataaagaccacctcagtgatcccatagagcatgaaggaagccaggagagagtggttcaggaatgattccaacatgacgcacctgttggccaagaggaaagtaccaaaaatagcacaaccccccagtctcccatggaaggaaataagaatgtagctgcccttatttgtaataaacactgctcattgtttttacagacatttataacaacatctgcttgttgttggtttcattgttgtttgcttttgtgttttttgt

SEQ ID NO: 753523 - DNA, 673 bp, Homo sapiens
  misc_feature 147, 215: n = A,T,C or G
ccagttgaagcctggtgaacttcctgagctggtaccatggagtagggattctggggggggccatggcagctgatcttgcaagcagagttaacaaagatgagggaaagttgcaccctagaagaaactcttgggctgtacagcgagccnaggtgaagtcctcagcaggattctgatccacgcacgcatgtgaggttagccaaggaagaaccacctcnaaagggagtgagggaaaagtactcagagctcacacaggtgccaattcccaccagccagaatgggaaggtcactgaagcatttgtaagtcctccaaagcacaaggctttcttgtgaatggcaagagatgaaatttcttccacccagtactgaaggtaaagcccactccagtctccagcccctctgaccagcccataacagggtccctctcaccagtctgatggatccaggtctatcccatgctggttgtcrttattgtgggcttgagtttaaactctgctcacacactctgacacgatatataaagacataaaagcaaacaaacgaaaacagcaggagaatttggggcctgtctcttgcatctggtgaggcagccacaacttgtgttatgtgcccctgcacacaccaggaagcctcaaaataatgatggtaacatcaacttatttggtgagcgccccca

SEQ ID NO: 753524 - DNA, 617 bp, Homo sapiens
gcataggccacagtttctttatctagtcatcttgtgacagacacttaagttgtttccatattatggttattgtgaataatgctgcagtgaacatgggagtgcagaaatctttaataaagtgatttcatttcctctgtgtatatacccaaaagagggattgctagatcatatggtagtttaatttttaatttctttagaaactttcataccattttcctcagtaatggaccagtttacatttccaccagtagtatgtaagggttctgctttctccattcccttgctgatacttgttagctcttgtcttcttgataatagccatcctaacagaaatgaggygatacctttttgtgattttgatttgcatcttcctgatgactaatgaggatgcaagcatttttatatacctgtcaacataaaatggatgacagctataaaaaaggaatgtgtattcaggtcctttgtgtggtttgtaaattaggttttttgttctaaaaatgtgctcaacatcagagaatgatcatcacagaaatgcaaatcaaaactacaatgagatatgatcttacaccagttaaaatggcttttattcaaatgacaggcaataacaaatgctgatg

SEQ ID NO: 753525 - DNA, 579 bp, Homo sapiens
tacagtggtttaccaatacttttggataaaggctatgtgtcaagaacctttgaaacatactggaggttatttcattacatgactcaaggtttctcatctggagaattattggcgttgtaggtgggatcattcatgcattgcaggatgcttagcatctctagcacccagagtgcaagtatgggtagcacaacaatcagaagatgccctctgtttgtagagaggagtggtatcacagcttccactagagatgagaactgttaaagtttgagagacctctagagcactaacagataggaactaaagtaacaccagaagattttgaagatgtttattgggcccatttccactggaaatatttggrtgtttgaaagatacttgaaactctttctctgtcattgagctactggtaccttaccatagatgaaaggggaaaaggtaaggtttggggtagacaaagtaaacattggtcctttttcagaaatgccctggatttcataaaagactggaacaaatcagcattgtctataactaaatgcctactttgtgctagacagtgatcaaattctacctcttgtgctc

SEQ ID NO: 753526 - DNA, 609 bp, Homo sapiens
gatactattgaaaacatctaattgtgtttaggaggagaaaataagcacatttctggccatagacttgcctttcctttggaataaagagaagtaaggaaagaaaagattcttcagaattgccctccacttctctaatgtcattaattttttraagtcttacctcaaatttcactctgagttgaaactccctgacctgcatcatcacccttttttccttcacttccaattacattctgcaataaccactcttgacttccttaagattataggagactatatataaactttaggtcaggcaacatgaaaaacgtgttcttgaattttttaaaaatcctctgttcatttcacacgatagagaagtctttaaaatccctaaaaaggaagttttcctattacagactaactactgaatctcccatttatttcttaagtttcgatctcatgtggagacaacatataaccctgaacaattactcaaatatttattaaaaaacaagtgactttattcatattttaacaacatcctgttttaaaaacaaatttaataaacaaaagctgacaatcttttaaagtataattgtctcttcatatatcagcaacacatatata

SEQ ID NO: 753527 - DNA, 722 bp, Homo sapiens
aaaataaggagacttgagtctttcaaaggttcattaagatctcatgtatccaagactgaagaactgagactgtgccatttacagatatatggaataccttctcaactggcccctaaatggtctgtggaacagggaaacactgttcagctgtctctcacatggtatgtgaggaaaatggtttctccgttatctccaaaatgtggttcaaccatacactcccaagagcagccagtaatcctgaccccctctatccctactgagaggcaggaagttcaaacaaaaaagcccaaaccaaaacccagaatctatgtgagttcctcccgactttcatctctgctcacttcccccactctacccacttcccagtcttgcagaagaaaggaggagggaagttgggatgatgtctgttaaacaggaargagaggggaatgggggactcctgggtttgtcaactgtgaggctgaaaggagggtgttcactgtgggttcagaattggaacccaataaggagtgttttggtgtttgtttgcatgtttgtttccaggtaaatctagctttaaaaggggtgggaggattcagaaggatgcgggacaagagaggccctatagaagagtgggtagagaaaagcaggggctgggtcacatgtggggaaggagatagggactggaagaaattggggttagagagtctgggatcctagcagaccccacaagtacttcaagt

SEQ ID NO: 753528 - DNA, 722 bp, Homo sapiens
aaaataaggagacttgagtctttcaaaggttcattaagatctcatgtatccaagactgaagaactgagactgtgccatttacagatatatggaataccttctcaactggcccctaaatggtctgtggaacagggaaacactgttcagctgtctctcacatggtatgtgaggaaaatggtttctccgttatctccaaaatgtggttcaaccatacactcccaagagcagccagtaatcctgaccccctctatccctactgagaggcaggaagttcaaacaaaaaagcccaaaccaaaacccagaatctatgtgagttcctcccgactttcatctctgctcacttcccccactctacccacttcccagtcttgcagaagaaaggaggagggaagttgggatgatgtctgttaaacaggaaagagaggggaatggrggactcctgggtttgtcaactgtgaggctgaaaggagggtgttcactgtgggttcagaattggaacccaataaggagtgttttggtgtttgtttgcatgtttgtttccaggtaaatctagctttaaaaggggtgggaggattcagaaggatgcgggacaagagaggccctatagaagagtgggtagagaaaagcaggggctgggtcacatgtggggaaggagatagggactggaagaaattggggttagagagtctgggatcctagcagaccccacaagtacttcaagt

SEQ ID NO: 753529 - DNA, 583 bp, Homo sapiens
ggatcccgctcagctgtgctgctcaaagcctttacctgtagcccctctcccttcattcagccccctcgccctcctccctcacgctcctcattctttgctgagttagccctgctcctccatcacatcatattttgaatgcttctccttcctggtggccttccctgacccctccaaaatcttggccgtatgtacgcagcctttttttcctctctcactctcctacgtgcttatctcacctgtactgatgtcatcctcagggcatttgtttaatgtctgtcttaaacaagtgttgacgaactagggctaatgggccaaatttggcctgtggtctatttttgaaagacccttgatatgagaatggttttttatattttttagtgttgttaaaaacaagcatacaaaaaatacaaagaaaatatgcttcagagactgcawgtggcctgcaaagccttaaatatttatgctctggctctttatagaaatgtgtgatgatccctggtcttacctactatcaactccctgggagccagaatcttgtctgttttatttgctgctgtgtctggaaaatcttgcaaggggtctg

SEQ ID NO: 753530 - DNA, 607 bp, Homo sapiens
cttctagtgggtagaggtgagggatgctgctcgatcgtgagccccgtaatcaagaattatcaacccaaaatgtgacgattgccaagtctgagaagccctgctctgcagacaatatgtctcagagttctggtgctgatcagacagcacgtttctggggctcaatataggcgagccagagataatgcccacagaaaagggaattgtaattaggagaggaygatctttggcagtatgcatttgtgagcagacactcctgaaaggacagggctgagggtaccttatggttctgtttctcccttaggatggcagcatctgataaccagatacaaaacctgagaggaaatttttaagctgtgactagtctgattcccagctggccagctgagccaccctacttctgtgttttctggtgcaaagaacaaggttctaccgagtgaccttagacttggcttctggataaaattgtcagagagctcctagcattttgcctgagccatcacagggaacctgggtttggaatctcaaccactcatggcaaagttattttcattccccttgctctcacctgcccccatgggaatcttccataggagaaatgttctaattg

SEQ ID NO: 753531 - DNA, 604 bp, Homo sapiens
tatagaaatgaaatattgattacttgtcttaatccatccacaacttgtgcgagatcacactggccccctcctgccccacacagctgcagagacccaggcagatgggggatgtgaatgctttcaggaactgaacccccttgaatggctatttagctaaaattcgtcttcaaaaaaccttttctcacttcactatttcaagaaccagaagtaaggcctgggataaactttttcccatgaaaatgagtgcgctgtcakcctgcagctttttccttcccacccacagagctggtcagtctccattcattctggtaccacaggcatgcagaatgactggtggcccgggtcgcggctggcagaggctcactgccacccaggtttggacctgactctcagctgggaatagcaagcacaaaacagcagaagaataaccaaggcttgttttgattccaggcagattgcaaataatgcattccctagatgttaggtcaaaacaaccaccaacctaaactaagcaagaaaaaaatgtttcacaagaccaagcagccacagttgccctaaacttgttcttgggcagaaacactattagtttttaattggttactct

SEQ ID NO: 753532 - DNA, 630 bp, Homo sapiens
gataaaccaaaaattatgttaaatagcaattttaaggaagcaggtaagactagaagccttctgcataaatcaggcttgagctttgcggaagtggcttctttccctgtactgaggtgtgagaagcagcacatggatttttattcctttaaaggattttcttcaagcaacagtctgtagttcaggttaatgggaaggcaaggcagtagcattgggatgaacatttatgatcccaaacattctaattctaggtgtctacagcattcaaatattgagtaggcacttacacttccaaagaccaattcttcaagataatgctgaggttaacttacagttttatatattattcaatggggcagttcacaggacatttgaagtgacttggagagaaaaaagaataccgccgttcatattattaatatttatggtacagttattatattcaggccatgctattgctggagagagttggtccaytgaataaatgtgcaatgttcatgaagcagtgaatatatcattcaattaaaaattcagcaactgatgtagtcagggatgtgctggtaaatgtctcacaactggctttccaggaccggtttgcagcatttgctgattttcatggtgtagacccttccc

SEQ ID NO: 753533 - DNA, 670 bp, Homo sapiens
aataattattcattctcttttcataggactttgcggaccccaattaaatagtttaccctagaagaatagaacctatttggggtggggtgagtggctgcaagagggacgtttccccaggacatcatgcacaaaaggggcttcaaatgtagtcttttgacttatctccaaatgaaggtaaatatacagtagatttatgaattattgattcataataagttattaattattaacacttaaatttatcacaatatttagagacttgttttggcatatctttcttatttaatacatttgaatctcaaaaaaacatacaactggctcaagcttctcaatctctgaaaggcagtagacaatggaaccgctcaatgccattaacttmtctgtatttctcctattgaaaatacgaaaggagaacgaatggtaaaaggtaaaggtagccgactcctcccttgttagagaccttgacctccacaaataggttatttctacctccagctcaatgatcagttcaagattttaggggtctgtggtcatgtgcaccattgagtagtttctagcactgtccgtgccaagaaaggcaaccacgagctaattcccaaaatgtttgtcaaaagccttattgagagaagtcatatttagcaaaaaataattggagatcatacagtattcc

SEQ ID NO: 753534 - DNA, 556 bp, Homo sapiens
aaatgtttgtcaaaagccttattgagagaagtcatatttagcaaaaaataattggagatcatacagtattccatgttctcagatgctctaaaatctaaccatggattatggcagcttggtaaagaastgatgatttatgtagaattgtaatgactatccccaaatagcttcactgaattatggacctgtgtaatgggtcagtatgagagacagtccagtgaaagtctttgttgggtctactatgacaatattgttgctgtttcaaatgatgtccactttatgcacagaagaaaattcttacttcatcctggaactgagaagtcaattttgtaaattattagacttctgttttcaagatagcacttagaaacctgagaaacaaaagcacagtccattaaatacaagtcaattttaaataaaattatttaataaccttaagattattactacaagttccattttatgtctccatcattattttattttctgttacttaaaaaaattagtctattggtgtataatatatatacaacaaaattcaccaatttgaagtata

SEQ ID NO: 753535 - DNA, 609 bp, Homo sapiens
tccgtgccaagaaaggcaaccacgagctaattcccaaaatgtttgtcaaaagccttattgagagaagtcatatttagcaaaaaataattggagatcatacagtattccatgttctcagatgctctaaaatctaaccatggattatggcagcttggtaaagaactgatgatttatgtagaattgtaatgactatccccaaatagcttcactgaattatggacctgtgtaatgggtcagtatgagagacagtccagtgaaagtctttgttgggtctactatgacaatattgttgctgtttcaaatgatgtccactttatgcacagaagaaaattcttacttcatcctggaactgagaagtcaattttgtamattattagacttctgttttcaagatagcacttagaaacctgagaaacaaaagcacagtccattaaatacaagtcaattttaaataaaattatttaataaccttaagattattactacaagttccattttatgtctccatcattattttattttctgttacttaaaaaaattagtctattggtgtataatatatatacaacaaaattcaccaatttgaagtataaaattcaatgagttttg

SEQ ID NO: 753536 - DNA, 564 bp, Homo sapiens
cgatgctaacaaatggaagagatggagttcagcatcaaaaacctttgctcataccccatgcaacatgtcaccctagtaacagacaagctacttaccaggcggggcacgtgcatcaatgtttcatgtacttaaaaaaaccttttggaggtgtggcccttctgggtagcttccgccaatttcctttatcagtgtgagtaatccttctgctgtcattggaagtgagtgaattcatcaggaagctgatgaaaagaacacaacgttgaatgatgattttcatttttcagacatttaraatttaggtgttcagcagagtccagatcactttaacatagtaagtttaggaaatattttcctaaaaggaaaataagcagtgttctttatcatttccacatgtttattgcttgatattagtggccactgacttagacacctacagtcactatgttactcgtgcattgttaaccttaggatcaagtactccgttggttggggttaaagaggtcaaggtcattggcttaaccatcttgaggttcacgttggctttatccagtcctaaggtcacag

SEQ ID NO: 753537 - DNA, 613 bp, Homo sapiens
tttgtttatatgtttatagatgtttatgccttgcaaaacatattaacacataattttctgatttgatcttttcaataaccttaggcttgaaaagtattactatccaatttgacagatgaggaaagtaactcaggttaagtaagtcatccaaggtagcacagtaagccatggcaggttctagattagaacttgagttttaaaactcttattcaagactgagcctgagaaacagccttaatatatataagtatcaaatgtattttaggattgtgtaaaacttgctttatgggtgatatacaacattttgtaaacttgcttttctgtactatgaaggcagtcaccataaaaattttctgaraatatgaaattggaagaccatgtgtatttttaaaaagagcagaattagcctctaaacccttagtgagaggataatttggatgaccataccttttcatcaaccgaggcattggttcaggccctcaggcctgaaccccagttggaggatcatttagaaaacactttaatacatcttacaatataatgatacatttgtcacaattaatgaactaatactaatatttaagtcattaagtataattaatactttactcac

SEQ ID NO: 753538 - DNA, 613 bp, Homo sapiens
tttgtttatatgtttatagatgtttatgccttgcaaaacatattaacacataattttctgatttgatcttttcaataaccttaggcttgaaaagtattactatccaatttgacagatgaggaaagtaactcaggttaagtaagtcatccaaggtagcacagtaagccatggcaggttctagattagaacttgagttttaaaactcttattcaagactgagcctgagaaacagccttaatatatataagtatcaaatgtattttaggattgtgtaaaacttgctttatgggtgatatacaacattttgtaaacttgcttttctgtactatgaaggcagtcaccataaaaattttctgaamatatgaaattggaagaccatgtgtatttttaaaaagagcagaattagcctctaaacccttagtgagaggataatttggatgaccataccttttcatcaaccgaggcattggttcaggccctcaggcctgaaccccagttggaggatcatttagaaaacactttaatacatcttacaatataatgatacatttgtcacaattaatgaactaatactaatatttaagtcattaagtataattaatactttactcac

SEQ ID NO: 753539 - DNA, 613 bp, Homo sapiens
tttgtttatatgtttatagatgtttatgccttgcaaaacatattaacacataattttctgatttgatcttttcaataaccttaggcttgaaaagtattactatccaatttgacagatgaggaaagtaactcaggttaagtaagtcatccaaggtagcacagtaagccatggcaggttctagattagaacttgagttttaaaactcttattcaagactgagcctgagaaacagccttaatatatataagtatcaaatgtattttaggattgtgtaaaacttgctttatgggtgatatacaacattttgtaaacttgcttttctgtactatgaaggcagtcaccataaaaattttctgaaaatatgaaattggaagaccatgtgtatttttaaaaagagcagaattagcctctaaacycttagtgagaggataatttggatgaccataccttttcatcaaccgaggcattggttcaggccctcaggcctgaaccccagttggaggatcatttagaaaacactttaatacatcttacaatataatgatacatttgtcacaattaatgaactaatactaatatttaagtcattaagtataattaatactttactcac

SEQ ID NO: 753540 - DNA, 630 bp, Homo sapiens
tttttatgtgtggtgtaagataagggttcattttgcatgtaaacattcagtttccccaacaccaattgttaaagaaactgttctttcccccttgtgtagtcttggcatcattgtcaaacgtcaggtgactaaaggtatggctctctattctgttccatttttctgtatgtctgtctttatgccagtaccagactgttttgattcctgtagctttgtaatatgttttgaaatcaggaagtgtgaagcctccaactttgttcttctttctcaaagttgttctggctattcatggcctttgtagttttgtatcaattttacgtttgttttatctacttctaaaaaaaatttcaattgaggttttgacaaagattgcatttaagtctacagattactttggatactcaaacgcttccaaaagatcaaaaagaagcaayaaaaactaccaaattctttctctgaggccagcattatcctgataccaaagccaaagacactgaaaggaaatgaaactacagactaatatccttgatgaatatagatacaaaaataatactcaacaaaatattagcaaactgacttcaacagcacattaaaaggatcatacaccacgatcaacggggatttatccct

SEQ ID NO: 753541 - DNA, 616 bp, Homo sapiens
gaatattacaggaaaagaatgaaaaccaattagattgcagtgagcagagggctgagaagtggtgaaaacgtagtacaagaagaatcaagagccaaagcatgaagcaacttgcattgcatgggatggcatttggattttattcaagttgagtgggaaccactagactgatgcgatctgaaatactttgttgttgttgtttgtttgttttctttatttcttctaaaataaaagggatacatgtgcagaatgtgcagrtttgttacataagcatatgtgtgccatagtggtttgctgcacctattgacctgtcttctaagttccctcccctcaaccctcaacccccaacatgccctggtgtgtgttgttcccctgtctgtgtccacctgttctcaatgttaaactcccagttatgaatgagaatatgtgtgtttggttttctgttctagtgttagtttgctgagaatgatggcttccagcttcatccatgtgcctgtaaaggacatgatctcattcctctttatgggtgcatagtattccatggtgtatatataccacattttctctatccagtctatcattgataggcatttgtgttggttccatgtctttgctattg

SEQ ID NO: 753542 - DNA, 616 bp, Homo sapiens
gaatattacaggaaaagaatgaaaaccaattagattgcagtgagcagagggctgagaagtggtgaaaacgtagtacaagaagaatcaagagccaaagcatgaagcaacttgcattgcatgggatggcatttggattttattcaagttgagtgggaaccactagactgatgcgatctgaaatactttgttgttgttgtttgtttgttttctttatttcttctaaaataaaagggatacatgtgcagaatgtgcagatttgttacataagcatatgtgtgccatagtggtttgctgcacctattgacctgtcttctaagttccctcccctcaaccctcaacccccaacatgccctggtgtgtgttgttcccctgtctgtgtccacstgttctcaatgttaaactcccagttatgaatgagaatatgtgtgtttggttttctgttctagtgttagtttgctgagaatgatggcttccagcttcatccatgtgcctgtaaaggacatgatctcattcctctttatgggtgcatagtattccatggtgtatatataccacattttctctatccagtctatcattgataggcatttgtgttggttccatgtctttgctattg

SEQ ID NO: 753543 - DNA, 629 bp, Homo sapiens
ttctttctaacaccttctttccctctgtattcttttttcttaacaccttctttccctatgtatttattttctgttgtttcttaacttaactctcattttagtgaattgaaaacctatagcctcaaaactgagagggaagatttttcttggttaccccattggcaattattgtagagtgtttaaaaaaatttcaagtgtgatgtctttagatagataaataggtaaatcatctatttaccatactcattactactccttatggttttcaccagaccttcttctctcatttatatacccagtgtggattstatacatttttaactctatgacccagacctagagggctgctgcttttctgagaaaagatgaaacttacaagctcttacacaagctaactaagatcagaattgaaacccctggcttgtaatgaggcctattttaatgttctgtgaattttctttgattcacctgtgttttatcacagttgttcacaaaatctttttgaagaggcaaacagttttttagctttaccagggggaagtgaacaggagtgtgtttccacttttggatgctgacacgatggtggcagtggtaagcaaagtgattccactgagaaaagagaaacgagc

SEQ ID NO: 753544 - DNA, 619 bp, Homo sapiens
tccaaaccatgtctttgtgaatacataaaactgaatgcttttaatggcactcaagtcagctcttgaatgctttgctgcctagaaatttcttctgccagataccctaaatcgtctctctcaagttcaaactttcacagatctctagagcaggggcaaaattctrccagtctctttgctaaagcgtagcaagcattacctttactccagttcccaacaagttcctcatctccatctgataaccacctcagcctggactgcattgtccatattgctatcagcattttggtcaaagccattcaaccagtttccaggaagatccaaactttcccatatcttcctggcttctgggccttccaaactgttcaaacctctgcctgttacccagttccaaagtcacttccacattttcgggtatctttacagaagcaccccactacccagtaccaatttactgtattagtctgttctcatattgttaataaagacatacccaagactgagtaatttataaaggaaaggaagtttaaaggactcacagttccacctggctggagaggtctcacaatcatggcagaaggcaaaggaggaacaaagtcacgtcttacatggcagcaggcaa

SEQ ID NO: 753545 - DNA, 567 bp, Homo sapiens
taacaggttaccaagaggctggattcctatagtaccataccagaaagatacaggttttttttttttttttttttttaacattcctgcaccatgattacatcaatagattttaataaaatagtttaactggcagaggttcagagatggaagtggtatccacagstatagctagctaagtcctataaagtcataaaactgtgtttgatagaagttatactgctattctagtcatgtgcaatgaataagaaaaatttgatgtgtatgcatgaaaatattcaaagaaacagaacccattcttagaaattatataatgacagatcagaggcaggatgtatatctatttgtattgtaataaccagtaactggcatggtatacaatcaaaaattgcctcccgatgttgtgtgagacagataattaatgtaacaaacctgtgtggagccaaatgtttgattagtgtggtgccttcaattcaactcctatagtacttcttctgatcttacctgaaaaaaataatttttacaggccaagtactaatgctttcttcaaatggcttctggagaaaataa

SEQ ID NO: 753546 - DNA, 634 bp, Homo sapiens
cttacccaaagcatagcctattaaccaattatttgacataactatggggattatttccagagttgagtgcgtgccattgattgtacactctattttcctttctgattggttcttgtgatggagtgaagatagtacccttagacatgctgtctaatgtgcacaggaataaaaaacctggaaggagaagagaatcattttttctcctattccatctttcttggaggatctrtcatagtattctctttaatcagaaagtggaatgaagcctgttcagccatgatgtaacaccgacactcacgtcactggcgtgaatggaggaaaagagcaatgcttataagttctaatagcagagaacttcaaattatttctgtttaccattggggacaattatgtagttttccagcataccattgccttctgaattatattttaatgcagtgatcagttttcattcttcacacagaaagagttagtccagaatcaggcaaacagcaaaggtgaactgaggtggaggacacatgctccccagatggtccacaaattggatagtgtcccaaagtagattaaaacttaattgtattatcatctacatttgatgtttgtacagtgtggtgtcagcagatggtgtcaaggg

SEQ ID NO: 753547 - DNA, 634 bp, Homo sapiens
cttacccaaagcatagcctattaaccaattatttgacataactatggggattatttccagagttgagtgcgtgccattgattgtacactctattttcctttctgattggttcttgtgatggagtgaagatagtacccttagacatgctgtctaatgtgcacaggaataaaaaacctggaaggagaagagaatcattttttctcctattccatctttcttggaggatctgtcatagtattctctttaatcagaaagtggaatgaagcctgttcagccatgatgtaacacygacactcacgtcactggcgtgaatggaggaaaagagcaatgcttataagttctaatagcagagaacttcaaattatttctgtttaccattggggacaattatgtagttttccagcataccattgccttctgaattatattttaatgcagtgatcagttttcattcttcacacagaaagagttagtccagaatcaggcaaacagcaaaggtgaactgaggtggaggacacatgctccccagatggtccacaaattggatagtgtcccaaagtagattaaaacttaattgtattatcatctacatttgatgtttgtacagtgtggtgtcagcagatggtgtcaaggg

SEQ ID NO: 753548 - DNA, 634 bp, Homo sapiens
cttacccaaagcatagcctattaaccaattatttgacataactatggggattatttccagagttgagtgcgtgccattgattgtacactctattttcctttctgattggttcttgtgatggagtgaagatagtacccttagacatgctgtctaatgtgcacaggaataaaaaacctggaaggagaagagaatcattttttctcctattccatctttcttggaggatctgtcatagtattctctttaatcagaaagtggaatgaagcctgttcagccatgatgtaacaccgacactcacgtcactggcrtgaatggaggaaaagagcaatgcttataagttctaatagcagagaacttcaaattatttctgtttaccattggggacaattatgtagttttccagcataccattgccttctgaattatattttaatgcagtgatcagttttcattcttcacacagaaagagttagtccagaatcaggcaaacagcaaaggtgaactgaggtggaggacacatgctccccagatggtccacaaattggatagtgtcccaaagtagattaaaacttaattgtattatcatctacatttgatgtttgtacagtgtggtgtcagcagatggtgtcaaggg

SEQ ID NO: 753549 - DNA, 637 bp, Homo sapiens
acttcagcacagatcaaggcagtgacaccagagtatacttgtagtcattatattcttccccaccaggcacaataatttcacttaaaaaactagcataattagaaataatttttactgcttgatgatgcagtaaaagttactactattttactacttcatcaagcagtaaaaattattactattgtcttcatcttttgtgtagttcgtcttaatattctgtgtgataaaataagaagtacgtataacacttatgcttaccaaaatgtgatgtttgtttgagttgagaaatgaaactagctgcttttttcatgaaacaccagttttacttgggagtgactgacaggcaaactatggtgaatcagacktggggattttggcagacattttcttgaaaatgaaggtaacgaacctgttacttcaaggaaaacaactgttaccaatataaaattcaagcttgtgagttagagttattgaaaactttccctgttcttaagaacttttttggtgaaatcaatggtgatattaagggatgtgatattttgataatctacaatgaaatttgtcaatatctggcatggcttattcctagttttcagtgctatatatgtatatatgtgtggtttgtttttttctcttg

SEQ ID NO: 753550 - DNA, 645 bp, Homo sapiens
gaagttaaatgtaattttaaaaaatcatggcatactgtgttgttcatttactagaaaacagtgtgcaaaacatcaggtctaacaaaaatatgagaaataactttagagatcatctccctacggtcaggcttgctctgtttcaggagggcagggatgccactgaatcccagcatcctgcacaatgcctaccacagagtagacaaaaaataaatatttgttgaataaaaaatgaacatggaaaaagatgactgccctataactcccaacaatattacctcacctttaccyctacacagagactaataacaagtttctaaaatcaaattccaaattcttaggacaaggttctgaatagtccaactggggctaaccgctcattcttggtctaatcaattgtgcccaaagaaagtccaaatggccctcagaggctcgctgtggaatgactgaagatttcgaaggtggggcaaaactgtcgattgtatgaataatagatttcagatgcatatacaactacttttcaaatgtttggagatgctgctgtgattgataggctattatatttctcattgtgataaatacacataacttaaaattcaccattttagcaattttaagtgtacagttcagtggctttaagtacattca

SEQ ID NO: 753551 - DNA, 645 bp, Homo sapiens
gaagttaaatgtaattttaaaaaatcatggcatactgtgttgttcatttactagaaaacagtgtgcaaaacatcaggtctaacaaaaatatgagaaataactttagagatcatctccctacggtcaggcttgctctgtttcaggagggcagggatgccactgaatcccagcatcctgcacaatgcctaccacagagtagacaaaaaataaatatttgttgaataaaaaatgaacatggaaaaagatgactgccctataactcccaacaatattacctcacctttacctctacacagagactaataacaagtttctaaaatcaaattccaaattcttaggacaaggttctgaatagtccaactggggctaaccgctcattcttggtctaatcaattgtgcccaaagaaagtccaaatggccctcagaggctcgctgtggaatgastgaagatttcgaaggtggggcaaaactgtcgattgtatgaataatagatttcagatgcatatacaactacttttcaaatgtttggagatgctgctgtgattgataggctattatatttctcattgtgataaatacacataacttaaaattcaccattttagcaattttaagtgtacagttcagtggctttaagtacattca

SEQ ID NO: 753552 - DNA, 540 bp, Homo sapiens
gaaagacatggaggacaagggaggttttgtgggccaggcctgaaaaagaggtcccatttctctggccagactgggaacagtggtgtagtagacaaaataagggctctcaaaaatgtccatgtcctcatccctatgtgaacctgtgagcatgttgccttaagtaccaaagagactttgcaggagtgattaaggtcagagtayttgtcagacctctgagcccaagctaagccatcatatcccctgtgacctgcacgtatacatccagatggcctgaagcaagtgaagaatcacaaaagaagtgaaaatggccagttcctgccttaactgatgacattccaccattgtgatttgtttctgccccaccttaactgagcgattaaccttgtgaaattccttcccctggctcagaagctccctgactgagcaccttgtgaccctgggccctgccctccggagaacaactccctttgactgtaattttccactacctacccaaatcctataaaacggccccacccctaatctcccttcgctgactct

SEQ ID NO: 753553 - DNA, 565 bp, Homo sapiens
aattgcttgatatttgaattttttttctttttgtgagacagggtctcactccattgctcaggctggagtgcagtggtgcaatcgtggctcactgcagcctctggagcaatcatgacttgctgcagccttgacctccaggctccagtgatcctcccacctcagcctcctgtacagctgggactacagatgtgtgccaccacacctggcttttacatttttttctggasatggggtcatctacaactatgttgctcaggcttgctatgttcccacttcagcctcctaaagtgttgggattacaggcgtgggccaccacacccagcccgaaaattgttttgataatttgtggaaaaaaagtattgtgtggtgttgtgtttacatctgtcagacctgggttagcttgtgtccctctaagtggttattataaaagagtttgaagacaatagatataaggtatgtacactgctgaggcacctgttagaaatgttaaatgaagatttccattgcactctggagctgggaatatggaatggaattgtagcccacagagttgttccattcccat

SEQ ID NO: 753554 - DNA, 562 bp, Homo sapiens
cccctgcacttcaccctgagcaacagagcgacaatcctgtctctaaaaaaagattctggccaggtgcagtggctcatgcctgtaatcccagcactttgggaggccaaggtgggaggatcgcttgagcccagtagttcaagaccagcctggacaacatagaaagatgccatctctacaaaaaataaaaaagtagccaggtgtggtggtgcacacctgtagtctcagctcacaatctcagctactcaggagactgaggtgggagaatcacttgagcccaggaggcagaggttgcagtgagccattatcatgccactgcgctccggcctgggcarcagagtgagacactgtataaacaaaacaaaaaaatctaatgtatttcctactctgccctacacaaccctcccatgtgaacagtgtcctgatactggggagcaagagaccgctgctgagcttttgctcttgctattctctcctcctcttttccaggacacccacagttctgtccaggtcgtgctacttaaagctacatcaaaattactacggttcacagtaacctctacag

SEQ ID NO: 753555 - DNA, 603 bp, Homo sapiens
tctgaggagtagacaaactctgttatgtaagcaaaactcttcacgggtcccccgacaccgtggctatcagtatatttaaggagtaaacctgtgaggtgacaggatttgaactactgaatgcaagacggaagccatcaagaagaaagttattaagaagatatcaaccagaacagaaaaggtcactggattaggaggaggggcacatttgatggaaaagacatgctgatgatgagcaccatctgagggtggaaagctttaatatgttgaacatactgtctggaaatgtgtattcaaaagaacactccaggaaaaaactctggttacatattctgyctagaggaaacaagggctttcaaaagaagaaacaaaagagggaaaaaaactctctccatgaaatgacatgctaagtgctgatcaacaggaataggcaaagtcaagagaattggacatgattgaggcaattgccttaaacattccagggcaagtagatgataaattatcctgagctagcaggagaagcgagttttctgtatatgtttaaggagttctactttctgaagaagaagcattaaaaacactcagcaatattctagaagaatagaa

SEQ ID NO: 753556 - DNA, 603 bp, Homo sapiens
tctgaggagtagacaaactctgttatgtaagcaaaactcttcacgggtcccccgacaccgtggctatcagtatatttaaggagtaaacctgtgaggtgacaggatttgaactactgaatgcaagacggaagccatcaagaagaaagttattaagaagatatcaaccagaacagaaaaggtcactggattaggaggaggggcacatttgatggaaaagacatgctgatgatgagcaccatctgagggtggaaagctttaatatgttgaacatactgtctggaaatgtgtattcaaaagaacactccaggaaaaaactctggttacatattctgcctagaggaaacaagggctttcaaaagaagaaacaaaagagggraaaaaactctctccatgaaatgacatgctaagtgctgatcaacaggaataggcaaagtcaagagaattggacatgattgaggcaattgccttaaacattccagggcaagtagatgataaattatcctgagctagcaggagaagcgagttttctgtatatgtttaaggagttctactttctgaagaagaagcattaaaaacactcagcaatattctagaagaatagaa

SEQ ID NO: 753557 - DNA, 506 bp, Homo sapiens
taatagctatttgatattccactagcttttgaatcctttacagctttttaatgcctattttttctcttcattaaaaacgttttggtctcttcatgggtttcatctgttgtacgtgtgccttatattttaacctacacktacttatcaaattgggctactgcttgaacaggccactttcatcccaggacccttgcatgggcacttttctctgcccaaaatgctctttcttagataccttcaggctaactttatctcctttgtttaaaagtcaccatttcaatgaggcctaccctcaccaccctatttaaaattataaaaatcagatttaatctgtgacagcacccacgagccattatgtaaattagccccaaaatatcctagccaagtaaaaaacttggaatccaaaaatgttagagggaccttgaagtaattctagtataaatttctcattttacagttgaagcccagcgatgttaagtggcttccctcagatcagacaagttaga

SEQ ID NO: 753558 - DNA, 506 bp, Homo sapiens
taatagctatttgatattccactagcttttgaatcctttacagctttttaatgcctattttttctcttcattaaaaacgttttggtctcttcatgggtttcatctgttgtacgtgtgccttatattttaacctacacttacttatcaaattgggctactgcttgaacaggccactttcatcccaggacccttgcatgggcacttttctctgcccaaaatgctctttcttagataccttcaggctaactttatctcctttgtttaaaagtcaccatttcaatgaggcctaccctcaccaccctatttaaaattataaaaatcagatttaatctgtgacagcacccacgagccatyatgtaaattagccccaaaatatcctagccaagtaaaaaacttggaatccaaaaatgttagagggaccttgaagtaattctagtataaatttctcattttacagttgaagcccagcgatgttaagtggcttccctcagatcagacaagttaga

SEQ ID NO: 753559 - DNA, 534 bp, Homo sapiens
aaaaaagggtgactgctttagatattaccataataaggctgtgtaaaaaacaatctcaaaacttagttgcaaaaaatagacaaataaattagcattttatactcctgcatctgaagttcagttgatcctggttgtgcttggctgggcttgattggatttcacaacaaactacaagttgggtttatatcatctccatgtatctttattccttcttaaaacccaaggctaccagtcatagccttcacaggtgaaaggcaagagcataagaatgcaagctcaagtgcaaaaaaaaaaaaattatattttttytggtgtcacattcattaacattttatggccaaagccagtcatgagatcaaacccaaagcaagagttgggtaatacagtgcttccaccatgacaggaatgtggatatacactattactgcagaagagttaataattaagagtaatgattcaatttttcacacttttttttgttggtcaaaattacccatgggaaaaatgtactcattcttacccaaacacccctaa

SEQ ID NO: 753560 - DNA, 590 bp, Homo sapiens
cacaaatcatataaaaatgatttttaaatttcttggccaggcgcagtgactcacgcctgtaatcccagcactttaggaggccgaggtgggtggatcacgaggtcaggagttggagaacagcctggccaacatggtaaaaccccaactctactaaaaatacaaaaaaaaaaattagcaggggggtggtggcgggcgcctgtaatcccagctacttgggaggctgaggcgaggagaatygcttgaacctgggaggcggaggttgcagtgagcggagatcgcgccactgcactccagcccaggcaacagtgtgagactccataaaaaaaaaatatatatatatatcagtaagaaaatgcaactcttataaactcagacaataatagttgttatcaaaacaactattttgataaataattatcaaaacaataatagttgaaagcacccttgagctggcaaaagcagataaaagccagagggagtcaacatttgaagaataaaatactgggtgagtgtcccattttatgatttttttctttttttgcctggaggcagagcatagtaacatgcatgctgcattggtttgtgcaaac

SEQ ID NO: 753561 - DNA, 644 bp, Homo sapiens
agatgactaagatattaaacttagaagacaggaatttgaaaatggccatatgactatgctcaatgaggcaaagaaaatgtgtgctcaaaattatgaacaagtagagaatctcagcatgggaataaaagtggtaagaaacaagcatactctaaattctggaactgaaaagtacaaacaaaacaaaattcactggtttggtttaataccacagtgaatatgacagaagaaaaaatcaaggaatttgaaacagawtaacaaaaatgatctaatctgaaaaatagatactaattgcaaaataacataatgggaacttcagtgacctgtggttgagtatcaaaaagtttaccatatacataatcggagcctcggaaggaaaagtgaaataggaagaatgtggcagaaaaatattttcaacgataatgtccaaaatttccctccaaaatgtattaaaaggcataaagaaacaaggaatgctcaatgtaaatgatgagttaatgggtgcagcaaaccatcatggcatatgtatacctatgtaacaaacctgcacgttgtgcacatgtaccctagaacttaaagtattaaaaaaaaaaaaaaaaaaaagaagcaagaagtttggactactccagtaagataaatacaaagaa

SEQ ID NO: 753562 - DNA, 644 bp, Homo sapiens
agatgactaagatattaaacttagaagacaggaatttgaaaatggccatatgactatgctcaatgaggcaaagaaaatgtgtgctcaaaattatgaacaagtagagaatctcagcatgggaataaaagtggtaagaaacaagcatactctaaattctggaactgaaaagtacaaacaaaacaaaattcactggtttggtttaataccacagtgaatatgacagaagaaaaaatcaaggaatttgaaacagattaacaaaaatgatytaatctgaaaaatagatactaattgcaaaataacataatgggaacttcagtgacctgtggttgagtatcaaaaagtttaccatatacataatcggagcctcggaaggaaaagtgaaataggaagaatgtggcagaaaaatattttcaacgataatgtccaaaatttccctccaaaatgtattaaaaggcataaagaaacaaggaatgctcaatgtaaatgatgagttaatgggtgcagcaaaccatcatggcatatgtatacctatgtaacaaacctgcacgttgtgcacatgtaccctagaacttaaagtattaaaaaaaaaaaaaaaaaaaagaagcaagaagtttggactactccagtaagataaatacaaagaa

SEQ ID NO: 753563 - DNA, 644 bp, Homo sapiens
agatgactaagatattaaacttagaagacaggaatttgaaaatggccatatgactatgctcaatgaggcaaagaaaatgtgtgctcaaaattatgaacaagtagagaatctcagcatgggaataaaagtggtaagaaacaagcatactctaaattctggaactgaaaagtacaaacaaaacaaaattcactggtttggtttaataccacagtgaatatgacagaagaaaaaatcaaggaatttgaaacagattaacaaaaatgatctaatctgaaaaatagatactaattgcaaaataacataatgggaacttcagtgacctgtggttgagtatcaaaaagtttaccayatacataatcggagcctcggaaggaaaagtgaaataggaagaatgtggcagaaaaatattttcaacgataatgtccaaaatttccctccaaaatgtattaaaaggcataaagaaacaaggaatgctcaatgtaaatgatgagttaatgggtgcagcaaaccatcatggcatatgtatacctatgtaacaaacctgcacgttgtgcacatgtaccctagaacttaaagtattaaaaaaaaaaaaaaaaaaaagaagcaagaagtttggactactccagtaagataaatacaaagaa

SEQ ID NO: 753564 - DNA, 594 bp, Homo sapiens
gaatcacaaatgttcctaatggcatctggaatggtgaatcctttccagaaggttttaaatttactttgccaagttctattagaggaatcactaactatggcagctatagctttactaaatgtatttctgaaattataagtcctgaaagttgcaattgctccttggtccatgggctgttgtgctagcagggaataaaacaacattagtctccttgtacacttccatcagagctctaaaatgaacaggtgtactgttaaygagcagtaatcttttggaaggaatcatttctgagcagtaggtctcaacaatgggtataaaatatttagcaaatcatgctgtaaacggatgtgccatcatccaggctttgttgttccatttctagagcataggcagagtaaatttagcagaattcttaagggtcttagaatttttgcaatggtaaattagcattggctttaactaaaatttgccagctgcatttgcctctaacaagagattcagtctgtcctttgaagccagactctggctgtgaaagctctagatggcattttcttctgaaaaaggctgttttgtctacattcaaaatctgttgtt

SEQ ID NO: 753565 - DNA, 617 bp, Homo sapiens
ttccttgtttaacaacacttcttccttgtcacacatgattactgggaaattagtacatctaggaaactccactaggagagagcacctggaacattgtgcctagttcctcctggattttgccccatttcccttttcctttttgctgattttagtcgatatcctgttgttgtaataaayaaataattttgtaagtgtaacagtttttctgaggcataggagtccttctagtgaatcaccagtattgaaattgctcttgggaacccccaacacaactacaaaatagttttatatgtttcttaaagttatggtgacatgcaactcattttccaaactgcatgtactcttcagagtgaaatgaggcactattaatagttacatgcaatataagggggagattaaggttcaaattgaacatatttttacgaggaaatttttatcataagtgaaaataaagacaaaagaatttagtaattaggtatcttaaggagagagccaaaactttggaatagacagtgtgaagagtattcactgtgtcaaataaacaaacataactgaattgccaaagagtggtcagagcccagttggatttatgagaatcaatttggaatgagtcagat

SEQ ID NO: 753566 - DNA, 555 bp, Homo sapiens
ggttttatttataagtaaagttttttggaatatacttaagagggataaaactcattttcattagtctaaattaaagaaggaaatagtacatctagactcagtatattgtataccctttagtgttgtgtgactaataaaacacgttagaattgtctaatgaagaaataattaaatgaggcktatcacattataaagcagtcttttcttattacaccaagttttaattcatggatatgtaattgattttgtgattgatccaactccggtaagtgaaattgttaagtggaaaagtatttaagcatcactttatctctcacattgacctgtttttagtcatgggttgggggcaggggtatgctcaacaaatttaaaaagaaaatagatataaacattgttgagagtgtggaaaattgaggaccctcatacattgtgttgaaagtataaatttatatcagtgtttcttaagggcaggttggcaaaatgtttcaagcattcatgccatttgaccctattattctgcttctaagatcatcctaaggctattattgataccaa

SEQ ID NO: 753567 - DNA, 534 bp, Homo sapiens
gacggagtttcaccatgtggatcatgctgttctccaactcctgacctcaagtgatccacctacctcagcctcccaaagtactgggactacaggaacacaccactggctaattttttgtatttttagtagagacaggtttttgccactttggccaggctgggtcttgaactcctgacctcaagtgatccgcccacctcagcctcccaaagtgctaggattacaggtgtgagccaccaygctcggccactgcagtttccttattgcagcctgactcccagggtcagtgtctctaaattcctcaggggtcacagagactgtctgaagaggattcatgacaaaatgagtgaaatgcatctgcaatccagttttactgtattagtctgttctcacgctgctaataaagacatccctgagactaggtaattttaaaaagaaagacatttaatggacttacatttccacatggctggggaggcctcataatcatggcagaaggcgaaggagaagcaaagctgtcttacatagcagcaggca

SEQ ID NO: 753568 - DNA, 593 bp, Homo sapiens
gcctcaagcgatcctcccatctcggcctcccaaagcactaggattactggcatgatccacaacatttggcaggcctgtgttttttcatataacttttcgaataaatttgtctatgtctacaaaaaaaaattttttggaatttttgtagaaattgcattaaacttggttggtgcaaatgtaattgcagttttgccattacttttattttttatttttttttaattttttagtatttattgatcattcttgggtgtttctcggagagggggatttggcagggtcataggacaatagcggagggaaggtcagcagataaacatgtgaacaagggtctctggttttcctaggcagaggaccctgtcgccttccgcagtgtttgtgtccctgggaacttgcgattagggagtggtgatgactcttaaccagcatgctrccttcaagcatctgtttaacaaagcgcatcttgcaccggccttaatccatttaacccttcgtggacacagcacatgtttcagagagcacgaggttgggggtaaggttatagattaacagcatcccaaggcagtagaatttttcttagtacagaacaaaat

SEQ ID NO: 753569 - DNA, 567 bp, Homo sapiens
aagataaatagttttcaggattcaaactgtttatttcaaatgacagttgtatttttttatttgttcctctttggcaatatatctgaacttgaaactataaagtttgaatagttgccaaggaaataacccaataagctttatgattcattttgcttcatttcctttgaagatccaaattaatctgaaattcacttattaatagctaaaaattaaatgatacaaattgctcaccttcttgggattggtccataactagcttccagtcaggtaacggaagagctatttgataatcctgacctttggagttctccccttgaatataagataattacaggyatgagaaatagcctgggtctttcataacacgctcactgttacatttctacttcaagaagtccatttagaactcaactctgtttactaatctgtatgaggaaaatgtcttcattttcagaaaaaaaagaggcctcaagatgcatctactcaattcctcagtaatttctaaggcacattttttccatttagaaccttatgacttatgagaggaacactcaaagaccctctcta

SEQ ID NO: 753570 - DNA, 628 bp, Homo sapiens
aatcagaatccatgtatgtattcttggtgcctgtttttttaccttctcttgtgtattcacttattattgtattgagaacctacataatgtactcacatttttctccttgttgtggaatagcctttactgttatctttctgacagtctcaaaatcctatggaataactgccagattcccgacagctcaatgaaatactgatactctcaccaattaaaacttagaagtggatattcagacagctttttggttcagacagtttattcagtgcctgtgtccttgctctgttggcaaggtggaggatataatctacttacggtagaaataaatatctttccgtgtcaggcaatcagtttcccaaatcagagttaaaaactagtatgaaacatacgtaaggattaagctaatctttatttgagttccatctctgcaacttgtaagttgtgtgactttgggcaagtggtcctgggcytcagtttcatcatctgcaaaactttaaaaaaaaaaatagtttttgacacctagtaaaccattactaaatgtttgctgtatatatattttgcatttatgtagattgattacactgatacatttgatgtagttggtttatcagtcagggttctccagagg

SEQ ID NO: 753571 - DNA, 524 bp, Homo sapiens
cagcactattaaagtttacataagtgtactttgtttattatttaaaggtagtttgtttgttttccttttaaatatccatttcacagcgtagagttatacttcttggttcacaacacaatattatctttggtccatatgccccatctcttttgctacatatgtactgttgccttcaatccccattctttacttccatcctcttccaacttcaaatacaaccattataatgggtttgatgtggatcctgtgtttctgttcttgtaaaatatgtattaatgtattgaayatgtgttgattatgtgctcttatggtttatataatggtatcatgctatggatctcaatttgtttctaactttttcacttggtaccatgtatttaagtaaggtctatgcatgctgctttgaacgcatgtagtcaattctttatattctttacatttctatcaactagctcactgtttgatatgttatgtatcaataaatgcttacataattaattgcataaatgaatatattgaatggg

SEQ ID NO: 753572 - DNA, 660 bp, Homo sapiens
tactgatttcatttcctttgtatatgttgtcagtagtgggattgccagatcatgtgatagttctatttataatttttttagtaaccttcatgctgttttccataatccctgtactaatttacattcctaccaagagtatgcaagcattcccttttctccacgtcctcaccaatatttgttatgttttgtcttattgttaataaccattctaacaggtgtgatgtgatatttcmttttggctttaatttgcatttagcagatgattagtgatattaagcattttttcatatacctgttggtcatttgtgtgtcttttgagaaacatctattcagatcctttgcctagcttaaaatcaggttacttgttttcttactatcgaatttatgtgtaagtctttatatattttggatattaaccccttatcagatgtatgatattaaaatagtttctccctttctataggttgtctcttcactctgttgattgtttccctgactgtgcagaagatttctagtttgatgtaacctcatgtatgcttttgttgcctgtgattgtggtcatatacaaacaaatcatgcccagtccaaagtcacaaagcttttctcctattttttggtagttttctagtttcatgttttacatttaagtctcctatcaac

SEQ ID NO: 753573 - DNA, 655 bp, Homo sapiens
caaaaagaaaccctttgaaacaaattacaaaggaaaatatcaatatattgaaaaatataaaacttccgtgcctcaaataaaaatgaaaaggaaaacaactaattatgggtaagtgtttgctaaatatgtcagtgagtattggtcttgttatataaattttattgatttctcatacatcaataagagcattataaatggccttataggcaaatggacaaaaagacataaacaagctggagtcacaaaagaggaaatacaaatgtcccataacatatgaaaaatatgcaaacaattaaaaattaaataattaaacaattaaaaaggtagttactaccgttccctgtttaagtgacraggactcagtgtgagacaatgtgttaaagtagactcactcatataatactgaagggcgtgggaaattagtgctatcttcctggaaataaagatgcatacttgtctcaagagcattaaaatgtgcataccatttaatccaagaatatattagagaaactcatcagaaatgctacaaatactgatgtgcaatgatattcatcataggattccttgtaatacaggaaaaaatgagaatgatctaacattagggaaaggattaaattgtggggcatacgttggttagagtatcctctgcttctat

SEQ ID NO: 753574 - DNA, 579 bp, Homo sapiens
tggggcatacgttggttagagtatcctctgcttctattcatttcctgctacgacctagcttcctcacattctgctcagcgttttctgtgccttgtatcttctgtgtattcatagcttccgcttacacatggtcccacccagccccattctactgtacttcatcactccttttagatcatcttctcagtttctgttcccacaaccaattgcctgattctctttctgcttccaagtgtaaactcctaagagaatctcactcctctagccaactaacctccgtgaagggcctgaggggccatggggaggtgcaggggtatatcacccagcccagaacacagctgcgtatgcaggaaatagtccttatgcaggaactattgacatggtaggtatcatcttggcctgtatagcatagttccactgcctgtgtatactcatatcaaamtaatattgcagtgaacataaatagcctctctacttattttctgtatccattctacttaaaaggacaggggccatgatttatttaattttgtaaccccaacacttattatggtacctggcactgccataagtgtttgt

SEQ ID NO: 753575 - DNA, 527 bp, Homo sapiens
gaggttcatttgagtagtcatgaaggaaatgaggaagcaacccatgcagatacatgcagatacctggggatggggaagggaagggtgggggtattccaggcagaaggaacagcaaatgcaaacaccccgatgtagaaaaatgcctggagtgttcactcaacagtgaagggaggccagtgagctggaggcaggtcaataagggggatagtggtgggaatgggggtctgagaaataaaggtagggataggaataaggaaggaaggtagaatatcaaggctcctagagaccactctaaggactttctytggcttttactcttaaagaacaagggaggcactggaagattggagtagacatgactgctgaggacttgtatatggcatatgaaagtgtgttagactgttcttgtgttgctataaagaaatgcctgaggctgggtaatttataaagaaaagaggtttgtctggctcatggttcagcaggctttataggaagaatggtgctggcatgtgcttctcctgaggcct

SEQ ID NO: 753576 - DNA, 627 bp, Homo sapiens
ataattatattttggaatggtaacccctgttctgtcttcattgacaggatttgcttgtgttgttaaaacactaacacaagagcttccagtgcctgggccgtgcctaggtgatgctatttcttctatatctcctgtcttctttatcccaaatcccactcagcatatcttcagacctaggttgtaagaccaactttggattggatctagccagtgaattattatttccatggttggttccctttctgttaactctggtaatcaacagattgaaarcggtggaagaacttcttctgaaaattgcagtgggagcaaattcttgttggttttgtgctgcttgcctttctagatctgctcatcagcacttaaccttccctcctctaaaggttactaaagaagcctgaagtaggtaaagagtgctcctcagcttcttatccttccactctttacccagcagatttcattcaatgccttagccaaggagtccagcacctgtctcccctgctaataattgtccttagagatgctagtactttaatccaggtatagcagtttcccgttattttcttgcttgtcgttcccctacatttcctcctgatttcccaagactctctttgtggcttttgaggg

SEQ ID NO: 753577 - DNA, 624 bp, Homo sapiens
tttaaatggagtttacttaaaggcctttggcatctcactgattcccagaaaagccaaagaaccaggctcagaaaatgggcaggacattatgctgtgctgccataactggagcccaactcacactcccagtgtgaggatgccagagcctgcatcaccaccgtcagcactggacatgggcactggagcaggaggtgccgagccaccatgaccacccccaaaaactagatgtggctgctggcacagtctccagatgaactcgccaccccccagcattctgcatcaccagcttccatgcatgtgtgactagccaagccccggcccatatgcccacagcctagccttccaatttgtacagcaggaagagtacttttcaaacacagtgacggagtggggttgggtatcagggatatatcaaaggcagaygtccattacaatattctcggagagtagcatggagtgaggggttcttggaagcagaagagcactgaataccaatgttcctctagcagagggacctatgctgtatactgtctgccctgttttgtcccagggtagtgggtggcctgtcatcatcttgaggaggaagatgacatttacacctaagtgaccgaggtggtagaatgt

SEQ ID NO: 753578 - DNA, 627 bp, Homo sapiens
ataactaagttacctatgccaaacaataatatagttaactatgccaaaataagttccactgagaagtcaataaaggtagaaaaatggttgatgaacaagttaactaatgatgttttgttacggtatataactagcaaacatttcctttaaacatttcttttcccaaaagaaaaactcacagacacaaagtccacatcaaataaagcatatggttttcctgaatgccttcgcaggcctgagagcactcatatattcttctatgaccaccagcttggcagtgagcagcctagagggactaagggaactcctcttaagtgggtgtcccaggtatacacacaccmctttaccaaactcttttctcctttgtcctattatcaattcttgacatcttacttctattttttccagcatattcaaagaagcaaatgttactgaactctgccttgtccacagttttgatgactacttctttgtttctgcagcagcaagagtacttacatctttacttgcaaacaatattttacatatatattaaatatttgcttacttttacagatggcattgacactatgtatctgtctctatcagcaaacatctatggatttaggttctgattttcacttattt

SEQ ID NO: 753579 - DNA, 561 bp, Homo sapiens
gagctaacagatatttacagtctatgcaacaactgcaaatatatattctattcatcagcacatggaacattctacaagaaagaacataagataggctacaaaacaagtctcaacatatttaagaaaactgaaattatagcaagtactctctcagaccacagtgggataaaattggaaatcaactccaaaaggaactctyaaaaccatgcaaatacatggaaattaaataacctgctcccaaatgatcattgggtcaacaatgaaatcaagatggaaattaaaaaattctttgaactgaacgataatagtaacacagcctatcaaaacctctgggatacagcaaaagcagtactaagaggaaagttcatagcattgaatgtctacatcaaaaagtctgaaagaactcaaatagcaaacctaagatcacacttcaagacaccagagaaacaataacaaaccaaactcaaacccaataaaagaaaataaataacaaagatcagagcagaactaaatgaaattgaaacaaaaaaaattcaacagataatgaaacaaaaagatggc

SEQ ID NO: 753580 - DNA, 561 bp, Homo sapiens
gagctaacagatatttacagtctatgcaacaactgcaaatatatattctattcatcagcacatggaacattctacaagaaagaacataagataggctacaaaacaagtctcaacatatttaagaaaactgaaattatagcaagtactctctcagaccacagtgggataaaattggaaatcaactccaaaaggaactcttaaaaccatgcaaatacatggaaattaaataacctgctcccaaatgatcattgggtcaacaatgaaatcaagatggaaattwaaaaattctttgaactgaacgataatagtaacacagcctatcaaaacctctgggatacagcaaaagcagtactaagaggaaagttcatagcattgaatgtctacatcaaaaagtctgaaagaactcaaatagcaaacctaagatcacacttcaagacaccagagaaacaataacaaaccaaactcaaacccaataaaagaaaataaataacaaagatcagagcagaactaaatgaaattgaaacaaaaaaaattcaacagataatgaaacaaaaagatggc

SEQ ID NO: 753581 - DNA, 616 bp, Homo sapiens
ttcctgcccagtatccaggaccgggccccacagaccccctgcgaccccctcccatttccacgaccactgccttcagtgatttccttctcctggagtcgccaggccgcccaggacccagccccgtgcccacccaccgcccgccccacctgtccctacaatcatcgaagttaacagcaggcccaagtcccctgagttagaatccagtcccacccacagccagggggccggatcgcccacacaggcacgacacgcaggattcccgacacacacacgtgcacacgggagcgcaacacacgcagcccgagagagacgacccagcccacggccctgcgcagcccctccccagacaccaaggcgggcgggtgcaaaggggcccatggccgcctccagggccgccagatgcagcaggcagcctggccccagtggctgctgcagaccctggtgcacgggaggcgggrgagaggcaccccaggggcttagattttggcatcaaaagtcagacctgaggtagacagagataagcagcaggcgcttcccccagcgcgggacccaggcgcgggacggcggctctggggagaggagccctgggggccggagggcagacacggacagggtc

SEQ ID NO: 753582 - DNA, 625 bp, Homo sapiens
ttcctgaagttgcttatcagcttaataagcttttgggttgagactatggggttttctagaaatatgatcatgtcatctgcaaacagggatagttgacttcttctcttactatttgaaagttctttatttctttatcttgcctgattgccctggccagaacttccaatactatatttaataggagtagtgagagagggcaaccttgtcttgtgccagtttccaaggggaatgcttccagcttttgcccattaagtatgatattagctgtgggtttatcatatatggtgcttattcttttgaggtatgtttcttcaatacctagtttattgagagtttttaacatgaatgaatgttgaattttattgaaagccttttctgtatcttttgagataatcatatggttttggcctttagttctgtttatgtgatgaataacatttattggtttgtgtaggttgaaccaaccttgtatcccggggatgaagtctamttgaccgtggtggatacgccttttgatctgctgctcaattcggtttgccagtattttgttgaggatttttacatcaacattcatcaagaatattggcctgaagttttttgttgttgttgttgttgtatatctgcc

SEQ ID NO: 753583 - DNA, 488 bp, Homo sapiens
cttttgaggtatgtttcttcaatacctagtttattgagagtttttaacatgaatgaatgttgaattttattgaaagccttttctgtatcttttgagataatcatatggttttggcctttagttctgtttatgtgatgaataacatttattggtttgtgtaggttgaaccaaccttgtatcccggggatgaagtctaattgaccgtggtggatacgccttttgatctgctgctcaattcggtttgccagtattttgttgaggatttttrcatcaacattcatcaagaatattggcctgaagttttttgttgttgttgttgttgtatatctgccaggttttggtatctggatgatgctggcctcatagaaggagtttgggaggaatccctcctcctcaatttttttgaatagttttggtatgagtaataccagctcttctttgtacatctggtaggattcagctgtgcatctgtctagtcctgggccttt

SEQ ID NO: 753584 - DNA, 613 bp, Homo sapiens
aggtgctagatttgtgcgaccctaaagataggtgactcctctgactcacagatccctgggagcctctcccgaacagagtttctttatccacacaccccacttcccatacccactctcccacataggtgttctggccaccagtagtctctgaaggatggaagatgaagagacataacatgacctttacgtgagtctctactcctcccaaaagaatgaatgttcctggaaacttcaccaatagaaaatcaggggatatcaatataagtaagcactcattactcatgtaatggaggccttggcaaaatatgacacktaaatttctgctcagggagagtagaaaataggcacagagactagagagactggtaaagaatgaaggctcaaaggtgattgagttgtgttaaaggcacgtcttgatcaggctttgctttatttttctcttgtggagtatgaaactgggtgttacaattaaatatatttcttgatttcctaaaatgttataggctgtttccaatttttgttatttttggagtttcttaaatcgaaatttgattcaggataatttaaaaatataatgttaatgttaagatggaaagtaggtcaaaaggcaatc

SEQ ID NO: 753585 - DNA, 618 bp, Homo sapiens
aaacaatctgactttaatgtgccttgtaattttttcatgtttgagtttattgagatttttggaattgtgaatttgtagttaccatgaaatttgtaaatattcagccattgtgtactcaaatattcgttgttgtttttttttgtttgttttttgagactgagtctcgctgtattgcccaggctagagttgaattagcacaatctcagctcactataatctccacctcacaggttcaagcaattcttatgcctcarcctcccaagtagctggtattacaggcccccactactacgcccagctaatttctgtatttttattagagacagggtttcaccatgttggccaggctggtcttgaactcctgacctcaaatgatccgcccacctcagcctcccaaagtgctgggattacaggtgtgagccactgcacctggccctcatttttattattctcctctttactactttttgggaactccaatcttacatatattaagctgcttgcagtttatctagcttacagattccctcttcatcattttcagtctttttttaaatctgtgtgtgacatgttgtatagtttcagttgctatgatttttattcatgaatcttttcctt

SEQ ID NO: 753586 - DNA, 549 bp, Homo sapiens
accctgctaagtgatctcccttcaaaaactcaagtaggaagctaaattaaagtcatcatctcttcttcacttgttcctcagtgtagctaagaagacttgacttctgggactttagctctgatagaggagtttagataygtgtctcacctcctgaactttctgccttcatccccttttcattctcataatctgtcatgaccagaaagaggggacgccttttctgggctgatgtggaactacatggcctcttattctcctctttttggattggtattgcaataaggtaaaatgatggctagggaacatgatttactaagaagaagaatattaaacatatttactattttcaaatatgatcctgttacatctgagtttatactccatacagcattttatgtacaatatttcctacaatattgtcacaaacattacatacctaacaataagcttttattcactttgtttaacttattatttgctgatgatgctttactcactccctctgggaaggtctgccttctttcccaatcatatgtggacatctttaca

SEQ ID NO: 753587 - DNA, 549 bp, Homo sapiens
accctgctaagtgatctcccttcaaaaactcaagtaggaagctaaattaaagtcatcatctcttcttcacttgttcctcagtgtagctaagaagacttgacttctgggactttagctctgatagaggagtttagatacgtgtctcacctcctgaactttctgccttcatccccttttcattctcataatctgtcatgaccagaaaraggggacgccttttctgggctgatgtggaactacatggcctcttattctcctctttttggattggtattgcaataaggtaaaatgatggctagggaacatgatttactaagaagaagaatattaaacatatttactattttcaaatatgatcctgttacatctgagtttatactccatacagcattttatgtacaatatttcctacaatattgtcacaaacattacatacctaacaataagcttttattcactttgtttaacttattatttgctgatgatgctttactcactccctctgggaaggtctgccttctttcccaatcatatgtggacatctttaca

SEQ ID NO: 753588 - DNA, 619 bp, Homo sapiens
gtaggtgtatagatttgtttataggttctctattcttttccattgggctatgtgtctgttttgatgccagtacaatgctcttttggttactatataaccttgtagcataatttgaaataatgtaatatgattcttccagttttgttctttttgtttaggatagctttggctattctggctcttttgtagttccatataaattttaggattattttttctatttctgtaaagaatgtcattggtatgttgatagggattgcattgagtctgtagagttctttgcatagyataaatattttaacaatattgattcttccaatctatgaaaattgaatatctctccatatttctgtgtcctcttcaatttctttttcaatatttcatagttttagttgtagagatctttcacttttttaagtatttaatttcatgagtggctattgtaaatgggattactctttatttctcttacagattgttcactgttggaatataaaaatgctagtgatttttgtatgttgattttgtatcctgcaactttgctgaattttttttttatcagcctaaaagtttttggggtggaatcttcaggtttttccaaagacaagttatatcaccg

SEQ ID NO: 753589 - DNA, 559 bp, Homo sapiens
tgccgaaaacacacattggagaaaggatagtctcttcattaaatggtgctgggaaaacctgatatccacatgcagaatgaagctagacccctgtctctcaccatatacaaaaatccactcaaaattgattaaagacttaaatataaaaccccaatttatgaaactactagaagaaaacataagagaaacacttcatgacattggtgtgggcaaatttttttttgataagacctcaaaagcttaggtagcaaagcaaaaatagaccaatgggattacattgaacaaaaaaacctctgcacagcaaaggaatcattcaacagggtgaaaaagcaacctagagaatgagagaaaatatytgcaaacaatgtacctgataaggggttaatatccagaatatataagaaactctagcaactcaatagcaaaaaaaaaaaaaaagtaatctaattttaaaatgggctaaatatcttaaaagatatttctcaaccaaagacatacaaatggccaataggtgtgttaaacatactcaaaatccctaatcatcaggaaaatacaaatc

SEQ ID NO: 753590 - DNA, 596 bp, Homo sapiens
cagttacatacaaagagtaagttctggtgttttattgctctatgaggtgactataggtaaaaataatgtattgcatatttcaaataacccaaagagaagattttgaatgttctcaaagaaataataaaggtttgatattatgtatatgctaattacccgatttgattattacacaatgcatacatatatggaaacatcacaccgtcccccaaaaatgtatacttytatgtcaattaaaaacaaaatagaactttaaaaaagtttgcaattcatgggttgtaatggtgtctcatggttttaattgacgtttcacttgtgacatttggatgaagtgtcagctcaagcatttgaccagcttgtttatgtgcttgctgattaatttgttaaagtcctttatatagtatagatctgagttcttagtcagtctcagcctgacttaacctgccttttcatttacttagcaatgtcttttgctaagccacaattttgagtattgatgaagtctgatgaattttttcacatatgtttagtgctttttgaatctagtttaagaactacttataaaataatctccaatgttttcttctatagactct

SEQ ID NO: 753591 - DNA, 596 bp, Homo sapiens
cagttacatacaaagagtaagttctggtgttttattgctctatgaggtgactataggtaaaaataatgtattgcatatttcaaataacccaaagagaagattttgaatgttctcaaagaaataataaaggtttgatattatgtatatgctaattacccgatttgattattacacaatgcatacatatatggaaacatcacaccgtcccccaaaaatgtatacttctatgtcaattaaaaacaaaatagaactttaraaaagtttgcaattcatgggttgtaatggtgtctcatggttttaattgacgtttcacttgtgacatttggatgaagtgtcagctcaagcatttgaccagcttgtttatgtgcttgctgattaatttgttaaagtcctttatatagtatagatctgagttcttagtcagtctcagcctgacttaacctgccttttcatttacttagcaatgtcttttgctaagccacaattttgagtattgatgaagtctgatgaattttttcacatatgtttagtgctttttgaatctagtttaagaactacttataaaataatctccaatgttttcttctatagactct

SEQ ID NO: 753592 - DNA, 582 bp, Homo sapiens
agctgccctcgaatataaagtaggcagaaaagcatgaaaaggcgagactggcctagcttcccagcctacatctttcactcgtgctggatgcttcttgccctcaaacatcagactccaagttcttcagttttgaggctttgactggctctcctggctcctcaagcttgcagacggcctattgtaggaccttgtgattgcataagttaatatacatttctctcttattagttctgtccctctagggaatcctgactaatacatttggaaagatctayttcattcatcctacagtaatcaagaacatgtagtattcccagaagaagatacctatagatcaatggaaccaaataaagaatccaaaaatatatctacacaaatatgtctaaataatctttgacaaagaaatgaaagtaattcagtggaggagtggtttcctgccaaaaaaaggcactagagccatttaacatccatcatcaagaaaaaaaaagattcttaatgtaaattcacaccttatacaaaaattaactcataatagatcatgggcttaaagtaaaattatacaacataaaaatacgtggtata

SEQ ID NO: 753593 - DNA, 582 bp, Homo sapiens
agctgccctcgaatataaagtaggcagaaaagcatgaaaaggcgagactggcctagcttcccagcctacatctttcactcgtgctggatgcttcttgccctcaaacatcagactccaagttcttcagttttgaggctttgactggctctcctggctcctcaagcttgcagacggcctattgtaggaccttgtgattgcataagttaatatacatttctctcttattagttctgtccctctagggaatcctgactaatacatttggaaagatctatttcattcatcctacagtaatcaagaacatgtagtattcccagaagaagatacctatagatcaatggaaccaaataragaatccaaaaatatatctacacaaatatgtctaaataatctttgacaaagaaatgaaagtaattcagtggaggagtggtttcctgccaaaaaaaggcactagagccatttaacatccatcatcaagaaaaaaaaagattcttaatgtaaattcacaccttatacaaaaattaactcataatagatcatgggcttaaagtaaaattatacaacataaaaatacgtggtata

SEQ ID NO: 753594 - DNA, 625 bp, Homo sapiens
caaaaattgtttaccttcttaagagcttagcaatctctccacagagtacttagccctgccatcaaaatttacagtcaagtattatataaatgtatatgtatctaaaatatgaaaaaaatctattgcataatgcggtttcatttaacttttctagtgactgctttatgacagtgacctacatggtttgaaaatgtaatgtgacaaaaaatatayctgctttccatcccaaggacattcttgaaaatgagctgtaatatttcaagagttttatcctcatgagtaagatgttaataaatagataaatctttaatacttgccaagtcatgagcatttattcagtagagataaaagaagagcatgatgtctgagtgggctgtactagattataaaatgttttaattttgttaccactatagagtttagaccaatctgacaaagtatgcttggtcaaatgttgaaggacatcacaaatggagtaaggttccagcatgagtctatttagagagtcagacaaaataagccacccataccagtgatgcaatgtgaaatccacattaaaattctctctagaatgacctggaggaataaagtgactagctatgaaccatccttctgcttacatact

SEQ ID NO: 753595 - DNA, 625 bp, Homo sapiens
caaaaattgtttaccttcttaagagcttagcaatctctccacagagtacttagccctgccatcaaaatttacagtcaagtattatataaatgtatatgtatctaaaatatgaaaaaaatctattgcataatgcggtttcatttaacttttctagtgactgctttatgacagtgacctacatggtttgaaaatgtaatgtgacaaaaaatatatctgctttccatcccaaggacattcttgaaaatgagctgtaatatttcaagagttttatcctcatgagtaaratgttaataaatagataaatctttaatacttgccaagtcatgagcatttattcagtagagataaaagaagagcatgatgtctgagtgggctgtactagattataaaatgttttaattttgttaccactatagagtttagaccaatctgacaaagtatgcttggtcaaatgttgaaggacatcacaaatggagtaaggttccagcatgagtctatttagagagtcagacaaaataagccacccataccagtgatgcaatgtgaaatccacattaaaattctctctagaatgacctggaggaataaagtgactagctatgaaccatccttctgcttacatact

SEQ ID NO: 753596 - DNA, 619 bp, Homo sapiens
tgatatgaaacatgaacttcctcatagtagtagcaggtctaaccacaaaagctctcaaaaattgaagtgcagaatgagaacacactattatttagttgtgttagcagaagccttgtgattctaactctggttggttggttttaatgtaaccaagtacccccattctttytaggaaaaagggaatgggttactttttttttttttttttttttttttgagacagggtcttgctctgttacccaggctggagtgcagtggtgcggtggtgcaatcttggctcactgctgcctctgcctcccaggctcaaatgatcctcccacctcagccttgtgagcagctgggactacaagcatataccaacatgtctgggctaatttttgtgtttttctcttagtggagacagggtctcactatgttggccaggctggtcttgaactccttggctcaagcaatctgcctgcctcagcctcccaaactgctgggattataggtgtgcaccatagcatctggctgagttactattattattttttaaaattttctattttctcctttcccctgttccctgcctcctactcagcattttagaaatgcaaatataaccctttacctccccttc

SEQ ID NO: 753597 - DNA, 619 bp, Homo sapiens
tgatatgaaacatgaacttcctcatagtagtagcaggtctaaccacaaaagctctcaaaaattgaagtgcagaatgagaacacactattatttagttgtgttagcagaagccttgtgattctaactctggttggttggttttaatgtaaccaagtacccccattctttctaggaaaaagggaatgggttactttttttttttttttttttttttttgagacagrgtcttgctctgttacccaggctggagtgcagtggtgcggtggtgcaatcttggctcactgctgcctctgcctcccaggctcaaatgatcctcccacctcagccttgtgagcagctgggactacaagcatataccaacatgtctgggctaatttttgtgtttttctcttagtggagacagggtctcactatgttggccaggctggtcttgaactccttggctcaagcaatctgcctgcctcagcctcccaaactgctgggattataggtgtgcaccatagcatctggctgagttactattattattttttaaaattttctattttctcctttcccctgttccctgcctcctactcagcattttagaaatgcaaatataaccctttacctccccttc

SEQ ID NO: 753598 - DNA, 549 bp, Homo sapiens
gacctcctgaggctgtgtcacagggcacatcctcaaccttggcaaaataaactttctaaattaactgatatctgtctcagattttgggggttcacattttagtaaccatgaagggattctgaatggaggtgccccaacttttggcaaatctcctattggtgcttggtaccagcttgagctacctttagggacaatagaacaatttgcagagacctggaagcacctccaccagagaatccttgatctcccgaaatttggtcaagatctaaagtttattttgctctgcaascttttttttgcaggggagggcggggagttttactttcttccaacacaaggcaggcaagtttttttcctgcttccatgacaatggaaggcaggtaactcctttatggagtttaagcttgcttccaaacaggcaagatgagttttttgcctgcttctaggatggtagaaagcaatcttcagcctgagacccatcccttggtaagtaactgaattggggtttgtcttggctaaagttaagattaactatccactggtcttaat

SEQ ID NO: 753599 - DNA, 652 bp, Homo sapiens
cctaatatatgtgcatttcatatatattcatataatcaccatgtcacttccttaggaaaggcttcccaaaccctctacactagaatggatcctcttgtaaacagcctagtaacattctgaacgtcttcttaatagcacttaycacagataatttcgtatttatttaaagtttaccttcccccttcattgttaacctccacgttcccctcactccagtatttcttactcattgtaggtaacatgtaatatttgattaatgaaataagggtagataagagacagtgaaaggaaatgaagattcagagtaaatacagttatactacactccaaatgcagccaggggcacacagaaatttggctgtttctggttaattcagtgcctcctgtgcttgagagtttctgacatacgggtctgaaaaaaaaaattgtcccatgtgtatttctttcaaggtttaaaaatcgaatctaatcagaataagccttccttcatcactggcaataggtgcagaatctttcaaggaaactcccaaagtggataatcacaatccaaacccccaagatcaagtaagaatcaagaaacccaaagcaacctgacaaatctaatgagtcaaagggctatacaaaataaatgacagtaagttgaaaaaattca

SEQ ID NO: 753600 - DNA, 405 bp, Homo sapiens
tataataaaccatagccatggatatcacaataaaagaaacacatacaaatgataaaaactctgtgaaatacggttgatgaccagagagctaacagaacacagtaaaacagtgagcgattttttagggcttaagtagttaactgaatgaatrtaaattaaataagttatttttcctttggttttaaaagtacaatacacttgaataatttaattcctaaaagtacaagtaatgcttaccttctagaccaaagtcacataaaatgatttaacacagacgtgtactgagtcaatatccatgctgaggctgcctaaggctgtcatagtagtgctaaatttttataagcattgctattatatccagccctttagattcaacattaattaaaaaaccataaataaaacaat

SEQ ID NO: 753601 - DNA, 646 bp, Homo sapiens
acaaaatctcagacatggaagagcttatttcagagaacaataaataaaaatacagaaaacccatatattaaataactaaaagatgtgaaataaaaaaatccctttaaattcacgaccaaaaaaataggccatcaacaaaaactcctaggattaattaaggaaagtagagatgggagaaaaataactaagcatttcttcgtccttctttgctaaggagtcctaagcttctacatatactctatagctatgtttaggaaactacattttaagacttcaacaatgacttattttgtctacagttagygaaagaatgcagaactagaaaatgaaacatctaggttgaagtacataaggcatctatggcagggctaagtcccagaacttactttcatgtcagctccaggcaagtattctgggaaactaatcacatattatgaatatgactgcgcaatgctagtaacctaaatattacttcctcctttatataatgcctgcaatttttaaaagtatgcaattttttattgaccctgaattattcatttattcatctcacacacacacacacacatacacacacacattcctttaaaaagcagtcaaaaatagagttctatgtttctttatcaaagaatgttacgaaaaaaac

SEQ ID NO: 753602 - DNA, 584 bp, Homo sapiens
tattttgaactcaggaatgaaaataatgctgtttgtttagggctttattgggcaccccaaagagctcattttgtttatcttattaatcctcaaatgctccttcctcagtgaaaaccagcagaagggtttcgtaaggacatcatgtacagttgtacagattgtacagtgcacaaaaataccctgatttgggcaagtggggctaaaatctagccttacttcccttaccaagctgtgaaccccacagggtagtatctacctagagggaatggcttcactaaattctcacagaaaatgggctagaagcaaccctttattcakcgtacaggttcctgttgtgagcagaggagaccatgagaaactcctaaagaaaacatctaagcatcatggtctctagactcaatttccacctacattctctactctctcgggtagactctaacaaagatattttaggtcatggcaatcagctggcaggggccttctcaatataaattgcctagctcagatgttcctgtattagtaatacccaaagtaaagtctgaaaaattactgacaccatcacctgggatacttgaagggaaatg

SEQ ID NO: 753603 - DNA, 627 bp, Homo sapiens
tatcgctcctaattattcagggtctaagggcttgttagtctgcaggtgatgaatcctgccagtactgggtgctttccttcaaggcagcaggttcccttttggcccaaggtatgtctagaaatgtcatccaggagcaaggcttggaatggatccttcatgactctgcctggtctcttctcctactgtggctgagctggtatccagtgatgacatcttatttaactgtagtataatataaaaccaggaagttgacattactgtcaactacactatagacttcattcagtattcactaattcttatgtatactcatttgtgtacrtgtctatgcagtttgttcccatgtatagagttgtttacccaccactacaatcaatgtccaaaactgtttcaacactaccaaggattgcccttgaactatccctttgtagttgcaccattttcatcaattcctgtctcctggtaacaactagtctacttttcatttctatatttatatcatttcgaggaagttatataaatggaatgatgcaatgtataacgtttggacataggctttttcttttttaaactaagcatgatgcctttgagatccatctaagatgtagcttgtattactaagcttat

SEQ ID NO: 753604 - DNA, 506 bp, Homo sapiens; identical to SEQ ID NO: 741235

SEQ ID NO: 753605 - DNA, 586 bp, Homo sapiens
ttggcctagaggtcacagttttgctatcctaacatatggtatagcattagctgccatgttgtggaaacgttctgcttctcagtgtcggaaaaaccaatcttcttgcttactcttttttaaccacataaaatggcagttgcctgctcgatagatccttggaattaaagcgctggctggtgttaacaaagtataggcctggattgccatgtgcccattatttaatgtatgccagtggcaataaaagggaacgagaattggataatttagaagttaaagcaggaatcaaatttgctgaacrtatactgtcttttctttttctaatatataaataagtatatgtatatatataaacagtgcaatgaaaacagaagacatctttttgattaatagataattatcatgttttctaaaaactagaccatccacaagcatatctttccagttgtttaaacaataaaaatccaataattgccgcctgaggggtgcttaatggtatttatacatgactgtgtataatagggagatttctttttaattaggacctttatctaaaagttacacttttggcagaataaaaattctttta

SEQ ID NO: 753606 - DNA, 586 bp, Homo sapiens
ttggcctagaggtcacagttttgctatcctaacatatggtatagcattagctgccatgttgtggaaacgttctgcttctcagtgtcggaaaaaccaatcttcttgcttactcttttttaaccacataaaatggcagttgcctgctcgatagatccttggaattaaagcgctggctggtgttaacaaagtataggcctggattgccatgtgcccattatttaatgtatgccagtggcaataaaagggaacgagaattggataatttagaagttaaagcaggaatcaaatttgctgaacatatactgtcttttctttttctaatatataaataagtatatgtatatatrtaaacagtgcaatgaaaacagaagacatctttttgattaatagataattatcatgttttctaaaaactagaccatccacaagcatatctttccagttgtttaaacaataaaaatccaataattgccgcctgaggggtgcttaatggtatttatacatgactgtgtataatagggagatttctttttaattaggacctttatctaaaagttacacttttggcagaataaaaattctttta

SEQ ID NO: 753607 - DNA, 546 bp, Homo sapiens
gatgaaaaacttctggtcaattattatttctggtgttttcaaatgtatgccaaacattagccatgcctggctaatttttatatgttttgtagagacaggtttaaccgtgttgcccaggcaggtctcaaactcctgggtttaagtgatcttcccaccttggcctcccaaagtgctgggagaacaggcatgaaccatcacgcccaacatagttcttttttgttaaactagttaaacacaataacgtcattaaagcaagcgcccgttaaaggctagttttcctttcatttattgtwaaagtttataagatcataatcaggcttaaaaggaattagtaacactatggcttcctcattatacaggtatggaaactgaggcacaaacatgatttgaatggcatgtccagtgtcattcttctagaagaagagtcaaactcatgcccaagcactccacctactacgtttcatgacacaaatagctaaggtctatgtgtgtcatatgtgtgtgtggtggtgatggttgtgggagaagacagtgacttgcattttt

SEQ ID NO: 753608 - DNA, 554 bp, Homo sapiens
aacaatctgatctctcttgcttttccccacagaaaagaaaaggaagaaagaaataccagagactgagtaatttacttttttaaaaaagaggtttaattagctcacggctctgcaaacaatacagaaaacatgatgctggaatctgcttggcttctggggaagggtaggtagggtggtgggatggtagtgtgctaggagaagccttagtgaaggctaataggaatggtctttgcttttcccaaatgactgatccaggggttttgccattstcaggtggcgtcatgttaagggacaaaaatcaaatattattttcttccactgtcatcttcctcttggggcattatttttcctggcctcactttaaatcacttgttcattagattgagccatttagagatgttttaaaaatttttagccattttatatcaaaacatgccaaaatatcaatacagggcatgtctggatctagcatttggtaacacatcatatatttttaacatttttattacttagtaagaggtaaagatttggttttgctcattagtcatctttta

SEQ ID NO: 753609 - DNA, 554 bp, Homo sapiens
aacaatctgatctctcttgcttttccccacagaaaagaaaaggaagaaagaaataccagagactgagtaatttacttttttaaaaaagaggtttaattagctcacggctctgcaaacaatacagaaaacatgatgctggaatctgcttggcttctggggaagggtaggtagggtggtgggatggtagtgtgctaggagaagccttagtgaaggctaataggaatggtctttgcttttcccaaatgactgatccaggggttttgccattctcaggtggcgtcatgttaagggacaaaaatcaaatattattttcttccactgtcatcttcctcttggggcattatttttcctggcctcactttaaatcacttgttcattagattgagccatttagagaygttttaaaaatttttagccattttatatcaaaacatgccaaaatatcaatacagggcatgtctggatctagcatttggtaacacatcatatatttttaacatttttattacttagtaagaggtaaagatttggttttgctcattagtcatctttta

SEQ ID NO: 753610 - DNA, 573 bp, Homo sapiens
ggatgtgcatatgtcatatgcaaacactatgccattttattccagggacctgagtgcccacagaccttggtatccataggcagtcctgcaacccacccccatgggcactgtggaatggctataatagaaaatatagaggttttaaaaagttatgtactaaatctaatcttttgttaagaaattactgtgtgtyacgtgtattatttggaagtcgttcctggtccagagacttgacatgttcttatctttttgtccactgatctaactagtcattccagtaagtttattgaacacaaatcaattttacaattaaattcttaaaggaatcacactcatactgtaagctgctttggtttttaaagtgaaataacagttttcaaaaacagctatatcatagaataacaggataaagcagacctacaatatgcaaaaacatgggatttcaacgctaaccagtataaaacacattacaaacccctaaatatgaaaatgtttgacaccacagatattccagaaaaaaacaagatgatcaaaaaagccatttgcagaaagccactttccccttcacttttc

SEQ ID NO: 753611 - DNA, 621 bp, Homo sapiens
ggcacacagacaggcctcaccccttcctggtgccccaagtctctcctaacattttattagctgagttttctggcggtttgttacttttcacctgcccgtccaaggcagctacactaaactacttgtccagggcagatccactcgtaatgaccatcagctcagagttggaagtagcgctggagaatgaggtggtttcaggttgctatgcttccctgccctctcttccagggatgccaagtaagtttctgccrtggctgatgatgtcagtactacactgaaattagttcaacggcaggccaccaattagtacttactgaacaacgtccttaagagtgaaaccctgtctctactaaaaatacaaaaatttagctgggtgtgttggtgagcacctataatctcagctactggggggctgaggcaggagaattgtttgaacccaggaggcagagattgcagtgagccaagattgcaccattgcactccagcctgggcaaaaagaacgagactccatctcaaaaataaaaaaaaaagaaaaagaaaaagaaaaagaaaaaaatgattctcacgacactgtcaacatcttaagttcttccggagggtagcgtaaaattatcacacaca

SEQ ID NO: 753612 - DNA, 640 bp, Homo sapiens
taggggaacgacacagcagtaggggctacctgcgtcagggataagaaccccttcccctcccttgttcaggtgtgctctcgccattgctccatccacaagatacacccttctacagaagtaaaattgccttgctgagaaaattaaatttatgtttgagtgctatttatttgtggcactgaaaatttatttccaacawctgtatagactactggagaaagatacctacaggaatgtcttctctgtactcctctattgatgtaaatcttgagccttttaacgtacaactgagacataaggaatagcatgtgtagtaggttagtgggaccctagtcaagttgagctgtggaaatgataatcttgtcaatgcaaaggaggaaatgcctcagtaaatcaaagtattgatcgtatatacagccctcaacagagacctaaaacatcaggccttaattaataaagaggtttatatttcttatattaccagaaatctgggaagaggaaatccagagctgacccagctcctcaaatatgcaggctcctactatttttctgttccatcatccttaccttttggctttcatgcttatggccacaaaataactgctgcttctccaggtgttatgtctgagtgatccaggaagaa

SEQ ID NO: 753613 - DNA, 623 bp, Homo sapiens
aataaacaatgatagcatttcattatagccctcagaaaaaagttaagtatccatgagtccatacttacataaataaataattgaatgaatgagtaaaaaataaaggaaggaaaagagacaattcatccttaaggaattccaattaataaatgtaaaaggaatgcagaaaatggaaactcactatgaagcaagctctaccgtaataattgttgcaggcaagatccattgatggatgctaaaattagtaggtaaaaatttgatgagaaacagaatagttgcagagtttcaaagtctttaccacaagatatttgttwgtttctaagggaagtactgtaacttcacaacaaagaaacgcagcagacactacctttaccaagaatcaagctgaatatcaccaataataagacataaggaaggtcacaccactttgtaatattcgtgccagaaatgttttattttgatctaatcatgagaaaatgccaggcaaacctaaattgaggtactgaacagtaaccttcaaaagtttcaaagtcatgaatgacaaagaaaaatttagaaactgtcatggattgaagaagactaagaagaaatgaaaactgcatgcaacgtgggaagctgacttg

SEQ ID NO: 753614 - DNA, 596 bp, Homo sapiens
ctaaaagacaagagataacaagtattagcatgggggtaggaaaagagaccacttgtacaatgtctatgggaatgtagacggtgcagtcattacaaaaaaaaaaaaatggtggttttcctgaagaaattaaaaatatgagtgccatatgacccagaaattcatcttctgggtgtatacccaaagggaaagaaatcaccacctcataaaaacactcccatgttcattaaagcgttattgcattattcacaatagccaagatgtagaaacaatctaggtgttcatcaatsgacaagtggataaagaaactctgtgtgtgtgtgcgtgtgtgtgtgtgtatacacatgaagaagtattattcgatctttaaaaaagaggagatcctgccatttgtcacaacattgatggacctggcggacattatgctaactgaaataagtcaaacacggaaagaaaaatattgcatgatctcatttatatgtggaatcttatttttaaaatgatcatagagagagagagaataaatcagtggttgccaaggttgaggtggggacagaaaatggggagatacaggtcaaataatacaaagtagcaaatac

SEQ ID NO: 753615 - DNA, 461 bp, Homo sapiens
gattctcctgcctcagcctcttaaagtgctggtattacatgcatgagccactgcacccagcaagttggcctttattgaagttaaaaactcctgctctgagaaagaccctgttaaaaaatttaaaaggcaagccacagactgggaaacaattatttaaaaactrtgtatctgctaaaggacttacattcaaaatatacaaagagctcccccaaactcaacatgatacatgttacaacatggatgaaacttgaaaacattatgttaagtaaaataagccagacacaaaaggaaaaatattgtatgcttccacttatgaactatctagaagagtcaaattaatatgaccgaaagtagattagaagtgatcagggactgaggaaggctggaatgtggttattgctcaatggttaaaaatttatttttgaatcccagcactttgggaggccgaggtgggtagatca

SEQ ID NO: 753616 - DNA, 589 bp, Homo sapiens
caatgtctctattcttatgaagttttcagtttagttttggagaaaggcattaatcataaataatcacacttatgaaggtaaaattacaaactgcatgaagtgccatgaagggcaagaacaaggtttctatcagattatgtgtgcaggatgaacctagaaatgtagtcaggaagcagtccatgcaggactgtgcaagcttcattaaggactttggttttcctgytttgtttgtttgtttaagatggagtctggctctgtcgcccaggctggagtgcagtggcgtggtcttggctcactgcagcccttgtctcctgggttcaagtgattctcctgcctcagcctcccaagtagctgtgactacaggtgcccaccaccactcctggctaatttttgtatttttagtagagatggggtttcaccatgttggccaggttggtcttgaactcctgacttcgggtaaggaaactaccacattggctgccaaatgaagaatgagttggggagaggcggagtggttgctgggagaactgtagattttgctatagtttacatgagacataattggagcttggacaaggattggagtttg

SEQ ID NO: 753617 - DNA, 589 bp, Homo sapiens
caatgtctctattcttatgaagttttcagtttagttttggagaaaggcattaatcataaataatcacacttatgaaggtaaaattacaaactgcatgaagtgccatgaagggcaagaacaaggtttctatcagattatgtgtgcaggatgaacctagaaatgtagtcaggaagcagtccatgcaggactgtgcaagcttcattaaggactttggttttcctgttttgtttgtttgtttaagatggagtctggctctgtcrcccaggctggagtgcagtggcgtggtcttggctcactgcagcccttgtctcctgggttcaagtgattctcctgcctcagcctcccaagtagctgtgactacaggtgcccaccaccactcctggctaatttttgtatttttagtagagatggggtttcaccatgttggccaggttggtcttgaactcctgacttcgggtaaggaaactaccacattggctgccaaatgaagaatgagttggggagaggcggagtggttgctgggagaactgtagattttgctatagtttacatgagacataattggagcttggacaaggattggagtttg

SEQ ID NO: 753618 - DNA, 589 bp, Homo sapiens
caatgtctctattcttatgaagttttcagtttagttttggagaaaggcattaatcataaataatcacacttatgaaggtaaaattacaaactgcatgaagtgccatgaagggcaagaacaaggtttctatcagattatgtgtgcaggatgaacctagaaatgtagtcaggaagcagtccatgcaggactgtgcaagcttcattaaggactttggttttcctgttttgtttgtttgtttaagatggagtctggctctgtcgcccaggctggagtgcagtggcrtggtcttggctcactgcagcccttgtctcctgggttcaagtgattctcctgcctcagcctcccaagtagctgtgactacaggtgcccaccaccactcctggctaatttttgtatttttagtagagatggggtttcaccatgttggccaggttggtcttgaactcctgacttcgggtaaggaaactaccacattggctgccaaatgaagaatgagttggggagaggcggagtggttgctgggagaactgtagattttgctatagtttacatgagacataattggagcttggacaaggattggagtttg

SEQ ID NO: 753619 - DNA, 611 bp, Homo sapiens
tcaacaaaagaatagttgctctgacctggcttgttttctggaagaatagccccaaacccaacacagccattttagttcagattctcatagcctacattatttaaattaacatcaatatgatttctttttacctggaggatatgtttttttaatcttgtcttcttctgcttcagcaatctgtgaagcaaacaggagatagacttggtttaaaatcattgctccactacttaccaagtacaagagccaaatgatttaatctccatgggatttaattgtcttgtttgtaaaatgtggataattcctatttcagagcactgttataataattaaatgagataaaattaagggtagatgctcagtcagtgttaatttctttctcctataatattgttgaaagagaaatctctggtaaattaggcaatcttacaacagagtggatgtgatgctgagcttactgggttattatayagttactctatgtattcattatacagaactcaatgtaaataactgctagggcatagaatttaccaaaactagatttcccgtcctaatttctgtcaattaactattaagttcctgatgtttgtaaattcaaaatgaccaaaatg

SEQ ID NO: 753620 - DNA, 527 bp, Homo sapiens
caaatttaaacatgtcttttgcatttgcatttgaaattttacatataagtgtggacaaattattgtgttttaaaaataatgaaatatactccataaaactttatatcttcatttaaaatttaattttgcaactgatatggaatacataatgttaatctgagcatgatttcctagtttcttaaacttcttcatagacttaaagaaaggccatcttttgtttaaaaatttaaaatcattgttttcccaatataaaagcaactcatatatattcagtgyagaaaaattggaaacaaatgtggaaaaaaattgaaattaaacttgtttataattctatcaactagacatgagtgctgttaacatactttctagaactttttctttgtacacacatggagtttctgttaattaacaaaaaatgactgtttctttttattgaggtaaaattcatataacataaaattaaccatttggaagtgaacaattcaggggcacttaatacattcacagtgttgtgcaaccattaactc

SEQ ID NO: 753621 - DNA, 620 bp, Homo sapiens
ctgggctgtgacttggggttctccctgatccaacccagttcaggtcctcctgggtctttcatgagcagaatattgcatctttcaatgctttgtttctctgtgatgcttaaaacctgtgccaagatgactcaggttgtcaggtttccaagggacctggttctcacwgcagtcatggggctgaggggagctggggcctcacacacccttggggctccagccaggccagtgccggctgtggcatgagccctgggactcagctctggatgcccggtgaatggctgctggggccgtgggcagtggagatttcgcctttccccagcgtatgagagccaaatgtctacaggggattcaggagcttgatgaggagtgctggctgaaaatgagaaagatatgtcttctgagacaccagcttttccacaggtctctcaagaaactcaagccttctctaaaaatactcgcacatacatacaagcacacacatatccaagtgaaaccaacacttgccctacacaacattctccatcctagaccatgttacacagtgctataccacatggtccctttccatttaaaacatgctagtctgcagccactcagtcaatgtcatgatgcactaacgt

SEQ ID NO: 753622 - DNA, 620 bp, Homo sapiens
ctgggctgtgacttggggttctccctgatccaacccagttcaggtcctcctgggtctttcatgagcagaatattgcatctttcaatgctttgtttctctgtgatgcttaaaacctgtgccaagatgactcaggttgtcaggtttccaagggacctggttctcacagcagtcatggggctgaggggagctggggcctcacacacccttggggctccagccaggccagtgccggctgtggcatgmgccctgggactcagctctggatgcccggtgaatggctgctggggccgtgggcagtggagatttcgcctttccccagcgtatgagagccaaatgtctacaggggattcaggagcttgatgaggagtgctggctgaaaatgagaaagatatgtcttctgagacaccagcttttccacaggtctctcaagaaactcaagccttctctaaaaatactcgcacatacatacaagcacacacatatccaagtgaaaccaacacttgccctacacaacattctccatcctagaccatgttacacagtgctataccacatggtccctttccatttaaaacatgctagtctgcagccactcagtcaatgtcatgatgcactaacgt

SEQ ID NO: 753623 - DNA, 633 bp, Homo sapiens
ctcttcaatggttttgtcaaagatctacaaacaagagatctgcagacaatcccagtgttgttctaggataaggagagagctacagagatgccaaggacaggagggctcactgtgcacttgtcttacccttgccagggacatctgcaccagcgatcaattgaactgaacaaaatctggtggctctgcgtcactgaaggtcactcactgtcacttgtaagtccccagtccagccctgcagaggccgcaaactgctgtacacccctagcttcaaccacttgactgtgtgcacgagtccaacaacagagacacattccagttttgggaaaatacatctgaagttttacatgatgtattcttatctgaaactctgtggccaacgtaaaagggctacgtaagcaaaaatgatcacgcactacamactgttaaactgttcatagcaactatgagaaaagaattcaatttgctttcaagagcccttcaaaatctgtttctaggatgcctagagccgacgttctaaaattcaagaagattcgaattgtaaaaactgcacaaggacatttaaaaaaattgagctttctatttgaaagtggattcacgtgcacttgtaagagataatacagagagatcccatgt

SEQ ID NO: 753624 - DNA, 509 bp, Homo sapiens
ctactcccatcaagctaacattgactttttttgcagcattagaaaaaaactactttaaatttcatctggaaccaaaaaagagcccatatagccaagacaatcctaagcaaaaagaacaaagctggaggcatcatactacctgacttcaaactatactacaaggctacagtaaccaaaacagcatggtactggyaccaaaacagatatatagaccaatgaaacagagacctcagaaataacaccacacatctacaaccatctgacctttgacaaacctgacaaaaacaagcaatggggaaaggactttctatttaataaatggtgctaggaaaactggctagccatatgcagtaaacagaaactgaaccccttccttataccttatacaaaaattaactcaagatggattaaagccttgaatgtaaaaccccaaaccataaaaaccctagaagaaaacccaggcaataccattcaggacacaggcatgggcagagacttcatgactaaag

SEQ ID NO: 753625 - DNA, 597 bp, Homo sapiens
acttttctccacatcctcgccaacacttatctttcatcagtttgataatagccaatataatagttgatatcttagtatggttttagtttgcatttctatgattaaaaattttaaggatttttttcatatagctgttggccatttgtatttcatcttttgagagatgtctattcmggttctttgcccgtttttaaaattgggttctctgtttccttgtaattgaatagttttgagttccctgtctaattgggatattagctctttaacagttatgacttgcaatatgatttgcaaatattttctcctaatctgtgggtgatctcttcactctgtaattgtttcttgtgctatgcaaaagctttttagtttgatgcaattccatttctttatttttgcttttgctgcctgtgcttttgaagtcatacctaaaaccaatataatgaagctttccccctacattttcttctagtagctttatagattcaggtgttacatttaagctgttaatccattttgagtcgatttttgtaaaagtggttagataagagtctattattattcttctgtacatggatatccagttttcccaacatgatt

SEQ ID NO: 753626 - DNA, 597 bp, Homo sapiens
acttttctccacatcctcgccaacacttatctttcatcagtttgataatagccaatataatagttgatatcttagtatggttttagtttgcatttctatgattaaaaattttaaggatttttttcatatagctgttggccatttgtatttcatcttttgagagatgtctattccggttctttgcccgtttttaaaattgggttctctgtttccttgtaattgaatagttttgagttccytgtctaattgggatattagctctttaacagttatgacttgcaatatgatttgcaaatattttctcctaatctgtgggtgatctcttcactctgtaattgtttcttgtgctatgcaaaagctttttagtttgatgcaattccatttctttatttttgcttttgctgcctgtgcttttgaagtcatacctaaaaccaatataatgaagctttccccctacattttcttctagtagctttatagattcaggtgttacatttaagctgttaatccattttgagtcgatttttgtaaaagtggttagataagagtctattattattcttctgtacatggatatccagttttcccaacatgatt

SEQ ID NO: 753627 - DNA, 623 bp, Homo sapiens
tatgaaaatcacataatctgatctcaccctgttaatgtttaaatctggacccatcttatttatgtaaattatctagaagaagataattttcaatattttaatgcttgagttcttctactgaagaagttctacatagaaagagcttactgcttaaggctgtgtctcctctcccgtaggaagcattctggaacaaagttttgtcatctgagattgtgtgtgtgtgtgtgtgtgcatgcatgtgtggtgtgcatgtctgtgcatgcrcatgtatggcaaaactagaggaggaagtaaaatgcagccatattagaagctgaagaccaagaagcccaatgaggcatccccaaacaggtataaaaaacagattgagaaaggggtacaggaccaagaatccaaaacccagggaacagggaagaaggaagaggcttcacagtagccgtgcttactgttgggatttggaggcaggtgcaccagctccctgcctataccacttacaagtcatattaactgacataaagtactctctcagaacttctgcttccttattggtaaaatagtaaaaataatacctacattatggagttattttgagattgaactgagataatatgtatacaatattt

SEQ ID NO: 753628 - DNA, 573 bp, Homo sapiens
ataggagttcatggaaaagaaatgaaattcaaagatgcaattagactcacaggggttatataccattttaacaaaggaaaggtttggggcttcaaatgatgctaaattgtggggaagtgactaggaaagatacagggaaacaaaggaaagataagggttattttactaaggtctgtttatgtaaacttgtctgactctcaatctccagtggtaagagtggctctcctcttcccagttcaggagagggagacaccttcacaagaggaaatgtatgcyctgattttaatctgataagaagagggcagagaacccttcctacatttggttgttttcaattgccttcagctcaaaatggtccttacgtggaagtgacatatttttatggtggtggtatattctgatctctttcaataataattgtgtgtcaatgagtctcattgattataatagatataccgctctggtgcaggatttgatagtaagagaggttgtacttgcgtggaggcaggatgagtaggtgaatgaactttctatattctccactcaatttttgtttgaatttaatattgctct

SEQ ID NO: 753629 - DNA, 551 bp, Homo sapiens
ccctacttctggatcctctgggagatttatctctgacttgttgacactgagcctccagaaataaatcaatgtatagttcaggttttcctaccctggcactggttccaatggatgtttcagcccataggtttctgctccagcaagttgtgattctctttatctgcctatctgtccctccaattctgggggcagtagtttcccttgtgatcttccttctcttatgtatctaagaagaagtgttgatttttttttttttttttttttttaccatttcttcagatatttacttgtttttacgatggagtggggaccttcaagctgcttctacgtcaaactagaaacaagaaatccctggcatttttaatcatgataaccatcctatgaagtagatgktatcataatttctaccagtttacaggtatgaaaaatcaggtaccaagaaattaagtaatcagcccaaagcctcaaagttagtaggtaatagaactactattaggtagttctattacctactattaggtagttagtaggtaatagaactactacaaatc

SEQ ID NO: 753630 - DNA, 626 bp, Homo sapiens
catttctagagttgtagtaagggccagttggggcagtgcctgtgaatatacgcaatgggccatcaagcaatctcagggcttcaggcaatgctggggtttataaagcactttatgttttaagttcacttttatttctaaagtctcattgactgctctgaaaatctctcaagtaaagtgggcactaaaggctttatactctctccaattataccttccattgtatagatttggaagctggggtccaaatgtgttaaatgacttgcctaacatggtccattactgtaagtacagaaacggaatgagaccccaaatctgcttcatggagggacactcttctaagatactgtgatgcttcttcccaagtaattccgtcttcagacttcaaggtctcaattcgaatgacaattcaatataggactttcataatcttaaaagcaacctgacagtcattacagtgggctgtgagaaatactarcgcagagccacatactctgggcttcatgctaggttttgccactcactatctttgtgacattgggccagtgactcaacccattaaacctcagtttcttcacttatacaatagggataatgtcatctgttcagactaccttacaaatttgctg

SEQ ID NO: 753631 - DNA, 531 bp, Homo sapiens
gtgctgtgctgttgccctcactcaggacccaagctcatagagccactgcccgatgcttgccagatatcgggaagagagggtgtggtactgcacacactgttggttctgcaaacttcggctggaagtgacacccctctgctcccattttgttgggcaaagcaagtcacgggatggtgcctaacttaagtgggtgggaagggcagctccccgtggctccagcrggaacaggagccaggagattatgaacaacctcagtgacagccacaagacacctgtaccaccgacattaccatgcacctgtgagtggccgggccctgcgctcactaccgtgtgagagttagcttatgaatcttcacaactccacaatgaaagacggtgaaatcacgtgcccaggatcacacagctagtaagtggcagggctggaattcagggccaactggctgcaaggtccgtgtgctgagctgcctctctctgctgtgtgagtttggattctggaacaatcgttggcataactaaccactgagaaaagag

SEQ ID NO: 753632 - DNA, 530 bp, Homo sapiens
ccctcactcaggacccaagctcatagagccactgcccgatgcttgccagatatcgggaagagagggtgtggtactgcacacactgttggttctgcaaacttcggctggaagtgacacccctctgctcccattttgttgggcaaagcaagtcacgggatggtgcctaacttaagtgggtgggaagggcagctccccgtggctccagcaggaacaggagccaggagattatgaacaacctcagtgacagccacaagacacctgtaccaccgacattaccatgcacctgtgagtggccgggccctgcgctcactaccgtgtgagagttagcttatgaatcttcacaactccacaatgaaagacggtgaaatcacstgcccaggatcacacagctagtaagtggcagggctggaattcagggccaactggctgcaaggtccgtgtgctgagctgcctctctctgctgtgtgagtttggattctggaacaatcgttggcataactaaccactgagaaaagagacgggggtgagga

SEQ ID NO: 753633 - DNA, 600 bp, Homo sapiens
gagggatggccacataaggacatggagaagacggcgtctacatgccaaggggagcagccacatccctgcctccagcatctctgtttagccagcttctcartaccccacacaggcctccaaaggaatctgccgacactctttttttttttttttgagacagtgtctcgctctgtggcccaggctggagtgcagtggcatgatctcggctcactgcaacctctgcctcccgggttccagtaattctcccaactcagcctcccgagtggctgggcttacaggcatctgccagcacaccccctaacttttgtatttttagtagagatggtgttttgccatgttggccaggctggtctcaaactcttgacctcaggtgatccacccaacttgtcctccaaaagtgctgggattacaggcatgagccactgtgcccgactcctgccaacaccttgatcttggacttccagcctccggagccacgagagaagaaatttccattgctggggccaccctgtctgtgctgtgttactgcagcccccagaaattgatacggatcccaagcactcaatattgccctgggaagcacccagaatccagtagaga

SEQ ID NO: 753634 - DNA, 557 bp, Homo sapiens
caaatgagcgtgggatgcagcttgagcttccagagtgtacacgctcccttctgggcagaccccaggggctcaggaagcctccgaagcaaactctgttttcaagggctagtgaggagtcacagttggcacacagccctcccattggcagtgccccttcttcgatggagggcakgtagcttatcctcacatcctggcagtagcccctctggtgggcagacaagcaggtgacgtgggcaaagcatttatgaagatgaatctgcaggtggcccccagctctgctcctcagaaagcctcccggccccatttggagttcagaggacctggctcctgggtggagggaagggagacccttggagtggggagcctggataggggagagcaggcagccttcctgctgcagcacggccacaagccaacacctggccgagcaacctgcacccgtgggaggcagacgctcattcatcacccttgaagctcagcccttgcttcctcagcctctgggcaggcagagaagcaggaagagggctgaagagccatgaaatattgcccacagtcca

SEQ ID NO: 753635 - DNA, 519 bp, Homo sapiens
cctgtcttgctaaggccatttgagttctgggggtgaaaacagcaaaccctccgaaacgcgtgtcctttgcccccagcagtcacggcaagggtcacggtcagggtccagggcaacccctctggtgagcccccatcagyccctccccggggagtgggggcagactgtggtagaaactccggtgcctttgggtacagatgtggaggtggcgccgtgcctggggaggtgggaagatggtgttggcacccggtgccacaggtcaaccccggctgatgggcagcccctccccacccagagttgcccgttgctcgtgtgcttggagagtggcacagtgccaccggatgcccaccagctgcactgggcgcagtgagacagctcagagcagatgcccccaggctgtccaggggtggcagagctggtgtggttggagcccctcctcgctctccttgtgtggtgggccgtgggctggatagcaggcggcggtgagcgagtgactgggatctgccttttcctgccttcgtg

SEQ ID NO: 753636 - DNA, 719 bp, Homo sapiens
agctggtgtggttggagcccctcctcgctctccttgtgtggtgggccgtgggctggatagcaggcggcggtgagcgagtgactgggatctgccttttcctgccttcgtgaagcccatggctgcatcctgtcatgggccctgtgtgggccatctcctgccatcaaaaaatagtgaaaagtagattttgccacagtgtggatacaaagacaaaagcatcgttggcccttaaagttcattttatcttctcattttaaaagaaatcatgacatttccatggccctaatggtgtcagccctggctgaggatcaacctcccggacacccgtgtgtctggctggagggaggctgagcgtggggcctcggaccagcatcgggctggtgtgcgaggacctctgggttggttgctgcttggaatctggtcagctcttccagcaccttctcggatggtaacaatccagggagtggtgtctttcatggcaacatgaggtcacccacccacgggcttctcaattgtcctgcagaggaactgagaccaaggcagcaggtgcggggaaccggtggaacccaygactgactcccaagtgtggcatttttgtccatctgcaaatgcgggcgtcctaggtttggaaatgaacacagttcaaatagcattgtgaagccacattgggaaacccagatgcaggacagcacgcaggatcctggcttcctggtcccccacct

SEQ ID NO: 753637 - DNA, 697 bp, Homo sapiens
tgacaacattgttttaataaatgtgtgtgccagtgagaacatgaatgcttacgtatgtttatatgggataggtattctggttttatctgatttgtttctgatttttatctcccattatttccttacaggtgcactatgttccaatgcgactggaataatcctagacacagcttccatcttcacaccatcttgtctcccaccctttgttcctccaagtgagatagatccaccatctgtttctgtccagaccttgcctagcctatcagaccaatttcgaatgtcatgcctttcatgaaacctttctgattacctcaatcattccttgtttacttttttttttttttttttttttttttkgagatggagtcttgctctgtcgcccaggctggagtgcaggggcacgatctcggctcactgcaaccttcgcctcctaggttcaaatgattctcctgcttcagcctcccgagtagctgggcctacaggtgcatgccaccatgccagactaattttatgtatttttagtagagacggggtttcaccatgttagccaggatggtctcgatctcctgacctcgtgatccgcccgccttggcctctcaaagtgttgggattacaggcgtgagctactgcgcccgacctccttctttactcttaattctcataacaactctttgtatttatcttatgcatattatat

SEQ ID NO: 753638 - DNA, 627 bp, Homo sapiens
aagaaaacacctaaacttcagtccctgaaaaacagaatatagttcttaattttctttaaaacttttcaaagtttctcctgaagtctgcctatagccaggcatcaaatacacacttacacttatatatacaaatgtacatccatttatgtttgtgctaataaaggtatgttttacatatgcgaatatatgtggasacagacaggaaaataaataggcagatgatagatattctctcactcacacatgttaattttcagataattccctctagaccagggattttcatggagcaaagcatttgtcctgctgatggggctgccttggtctacactgacatatgcgatgagcaaaggacagtggcttttttaatgtagaaaccacaagagaatatgtcatctgatgtgcaaattacctctccagaagtatgattacttacaggcgagtcctaaaacacatgccctctgccgatagcacaccaaatacagccaaccacggtgcaactttggacacagaaggccttgcaatgttgtaagtccctgtttcctactcaggcccagtagtcactcacatgagagagagattaaaaaaatgtcctaaatcatcttctgcctttatcaaaccatggtc

SEQ ID NO: 753639 - DNA, 629 bp, Homo sapiens
gtgcatactcagacagtaacttgttttctcatgtcctgaagtaccaaaaccttacttcttttaggctcccattcatatttaccattatttctattttatattattttcatataatttcaactacagactagggtaatttattttattgtagaatatttagaaatctgggaagcaccaactaaagcgagtgtttcttgcatgagtagaccctttttaaaaaaaaattacatttgtgaagaaatattgctgcatttaaacctcctagcagttaaaaaatgtttaatttctagttttaagagtcatgacaactttttctttttaacacaatttctcttagaatcattaaagtcaattgctaataattgcattggcattgtgataacttgagrtgtaaccaaggaaaagcatgttcaatatgggttactaattacactaataacaatttatgcaaattagtgactaattttacattagcatagtggtaatcactttaagatcgtttagtaagaatgatggcccaatcaagactaggaagtattttttttaaatgagatagagaaatgaaagatatagggtttattgcaaatagtttttaactgaaatccaaatattagtaatgaactattttg

SEQ ID NO: 753640 - DNA, 638 bp, Homo sapiens
agcagggagggccacaggggagggccacgtacatgactgtgggatgaattcagccttgactcagttcctacttccaccaaagtaaggagtgtacagcatcattgtgccatctggatatttttgtttcacggaaactccctagatgttaaccacatcctgttttccttcaaagcatcacttaaacatacagtgtttagcatacagagtggggatactaagtcttctttctctacatctccagcattccttgatcccaacttaattctctccacttaattttgacgaaaaatttaactttctaccttcttcttggctccatagctacctttgcatcactgaagrctcacaaatggtttctgcctcacaatgagctatccactctatgtcctaacctttggaggtatagaagggggaggatttgaaagttgagtctttccattttcctttcccacaggtttcagatagtagctgaacatggcatagaaatttaggaatttctcttcctcaacaaccccacctgacacaagcatcagccacggtgagcttggcgatgatctcccttcccctttgctacgtaagtgtgttctttgatatgactcaattaaccaaaaattagccatcatgtatctttaaatggc

SEQ ID NO: 753641 - DNA, 559 bp, Homo sapiens
aattcactgactctaccacctctataatgctctcccagaaaaccctcaatgctttcttaaatcttcctgtagcttggacctaggaatctgactgtggttggaagaaagtacacaatcatgactgctttaaaaaatatatgaattgtgactaatcttaagtcaactcgatattgccaggaaaaatattacatttccttaattctctgttcccttattatgttaggccgttagtccataacttatctttccaaaacttccccaattagtctctactgatgaccttgctccctatttttctgaggaatttgaagcaatcagaagagatcttycacatgttctcaccaccacatctgccaatctatctctatcagcaccttatcatcttctttcttattaccatgattgaactgtctgtcggcttggccaactccacccttcttatgcattgtgtcccatctctatcatctgctctagaatcgctttctttaaatttctccctatcattcctgcattaacattttttgctatacaacaacattagaattgcttccatcttaaa

SEQ ID NO: 753642 - DNA, 559 bp, Homo sapiens
aattcactgactctaccacctctataatgctctcccagaaaaccctcaatgctttcttaaatcttcctgtagcttggacctaggaatctgactgtggttggaagaaagtacacaatcatgactgctttaaaaaatatatgaattgtgactaatcttaagtcaactcgatattgccaggaaaaatattacatttccttaattctctgttcccttattatgttaggccgttagtccataacttatctttccaaaacttccccaattagtctctactgatgaccttgctccctatttttctgaggaatttgaagcaatcagaagagatctttcacatgttctcaccaccacatctgccaatctatctctatcagcaccttatcatcttctttcttattaccatgattgaactgtctgtcgkcttggccaactccacccttcttatgcattgtgtcccatctctatcatctgctctagaatcgctttctttaaatttctccctatcattcctgcattaacattttttgctatacaacaacattagaattgcttccatcttaaa

SEQ ID NO: 753643 - DNA, 622 bp, Homo sapiens
taattcacggggaaaattaaaaagtgtatattatttttaataaacacaattcacatatatcaaaatattaagtgtatttacagcattatgctaatatttttacaaggcatactgggtaaaggcctgagttctgttttaacaatgaccttttcaggcaaagcccttctccacctaactgattcacaagtgttaaatccagagatgtatgttctgacaaaaaaatcaagatagataaatctttgcacacactttttatatttatgctaggagagatataccctgtaataagtaatttacagaggaaataaaaaatatatattgtttttgactaacataatcacatatatcaaaatactaagcrtatttacaatatgccaatattttttaccaggcatattgtgtaaacgcctgagttctgttttaacaatgactctctcaggcaaagctctgctccattcaactgattcacaagggacactgaggaggtcacctttgatgtatctgtggctaccaggcttctcaaatgaaagctaagatttaggctgagatagtaaacagctatttggtcatgatcagtgtctcgttttgctgaatgcatagtcttatcattttgaagtcatcc

SEQ ID NO: 753644 - DNA, 613 bp, Homo sapiens
tctattgcatagacaggctgcaattttccaaacttctatgctgttttccttttaaaactgaatccttttaacagtatccaagccaccttttgaatgctttgctgcttagaagtgtcttctgccagataccctaaatcatctctctcaagttcaaagttccacaaatctctagagcaggtacaaatgccaccagtctcttagctaaaacataacaagcatcacctttgctccagttcccaacaagtttctcatctccatctgagaccacctcagcctgaatttcattgtctgtatcattatcagcattttggcaaagccattgaacaggtctctgggaagytccaaacctttccacatgtttatgtcttcttctgagccctccaaacttttccaacctctgcagttactcagttccaaagtcgcttccatgctttcaagtatcttttcagcagcaccccattcttgataccagtttactgtattagtccatttacatgctgctgataaagacatacctgagactgagaagaaaaatagctttaatggacttacagttccacgtggctggggaagcctcacaatcatggtggaaggcaaggaggagcaagtcaca

SEQ ID NO: 753645 - DNA, 613 bp, Homo sapiens
tctattgcatagacaggctgcaattttccaaacttctatgctgttttccttttaaaactgaatccttttaacagtatccaagccaccttttgaatgctttgctgcttagaagtgtcttctgccagataccctaaatcatctctctcaagttcaaagttccacaaatctctagagcaggtacaaatgccaccagtctcttagctaaaacataacaagcatcacctttgctccagttcccaacaagtttctcatctccatctgagaccacctcagcctgaatttcattgtctgtatcattatcagcattttggcaaagccattgaacaggtctctgggaagttccaaacctttscacatgtttatgtcttcttctgagccctccaaacttttccaacctctgcagttactcagttccaaagtcgcttccatgctttcaagtatcttttcagcagcaccccattcttgataccagtttactgtattagtccatttacatgctgctgataaagacatacctgagactgagaagaaaaatagctttaatggacttacagttccacgtggctggggaagcctcacaatcatggtggaaggcaaggaggagcaagtcaca

SEQ ID NO: 753646 - DNA, 442 bp, Homo sapiens
atatcactatacagggtcctatgacaggtattatattttattacattttcacatagttaacacattcacacctatgtaatgtaatggttatacttatgaacttaaatacttttaatatatgaaaaaagttagccttggcggtctccagattccatgaagattagtagtackattcctcccagatccttcttacaacaaaagaactttgggtatatgtagcaaacaaacataggaagcctccaaaatgtagaaggaagatgttctgcctagggatctcagaacttgagggaagacatagcagtgggtccactggatttcttagtgccttccgtatatcctggacagggagatccagaagcctccaaccccaaacctccaatagacatggacacacagctccaaagaaaacctgtccctttagccaagagacatgaaaaaagat

SEQ ID NO: 753647 - DNA, 579 bp, Homo sapiens
acctcatgagaacttagcaccaaggggagagtgctaaaccattcatgaggtacagcccactgatccaatagcctcccaccaggccccgcctccaagactggggattacaattcaacatgagatctggatatgggcacaaatccaaatcatatcacctggcctctctctgacttcattttctacaatttcctctcttgccaaactgggcctttttgcaattcgtttaccatgccaagaaagctctcacctcaaggcctttgatttgccrttctctaacttgagaattcttttcccagatattcacataactcatttactcacttaatccagacgcctgttccaataccttccccacaatagcactttccttattgccctttctaaacgaccgtatttgtcattctttgatccccatcctactttatttttttccttgtaatgcttattatcatctgacatcatatagatatttgttcttatttatttatttgttttccccccatgtaaatgtgagcttcatggaaaggcagatactctaatttttttttttcacggctgtatgtccagtgcctggaagag

SEQ ID NO: 753648 - DNA, 552 bp, Homo sapiens
actcaggaggctgaagcacgagaatcgcttgaacccaggaggcagaggttgcagtaagccaagactgcaccactgctctccagcctgggtgacagagtgagactccgtctcaaaaaaagaaaaaaaaaatttttttttttgaatagggaatactttcgtgtgtttcagactaaaaaattgattttatatgtatttataattacacacatatacgtatgcagtaaagtttcrtttttacttgtccttcagccaccatttcctttcctcttacacactaatattttcagtttcttatttatccttccagttattttatggacataccagtaaatacacacatatattaatatatccagtattttccccatctcttttttgcacaaccccttaaatatacttaaaataaaacagaacaacaaatttttcgtaaacaaaatttaatacaaccatatagtcaagtaataatggttaaaagacattttattagatacaacttttaaaaaattaaactatgcaagaagtatatttaaacaaaacatgtaagtaagtatt

SEQ ID NO: 753649 - DNA, 627 bp, Homo sapiens
gacaaagcacggatccactgacagcctcactccacactcaggaaacaaactcctgtcctaggaggatttcatctggagtgcagcgtgctggtgacacgtgggaacaggcagcggcaaaggttgggtagccatgacatgccgagtcacactggaaaccacctccttcccragcagcagggtcctcagttacagcttcgctgtgccttcaaagcctgcttctccagggcacctcactccgctcactggtcctcattcaatattcccatgtgtttgtttgtgaggaagtccagaaaaggaatgttgcaaatggcctggtgaatattactcactgtaatttctttgggaatcctggtccaaaaaacaaagggtgttaccaggtgaaattctctcacgtatatctcatcatttattcacttaactcatcacagggaccatcccaggcagaggccccgtggagagggctcctgagccacagacatagcttagggccactctggggtgaggactgccttcctgtcataggcatgagaaggatgtcaacaagttggttgaataattaggaaaaaagattctgagaactgagaaaagagaaagaaaacaaagcggatggcagaacggaatgacaca

SEQ ID NO: 753650 - DNA, 411 bp, Homo sapiens
ccacgccaggccaggcgtgatgttaatcgttccatcaaaagcacctaagtcactctacccctccaggacagggagcacagaggtaagcaggggccacaggaggccctggctcacttgtgggtccaagcaggacagtgggcagcaggaccggaactcttggttccccttccttttctctaaagacgcctatgttgtctgatatattcctgtgaagtttcatctactattcctctgatttaggcccttcatgtcctcaggcactttgctacarttttataaatctgtgacagcctttagcataatgcaataaaataatatttgtttcctccgaaagaaaagcagatgtggcctatctaccatcctttcagggcctaggaacagactgaaactcagtgtcttaatcaaagacaa

SEQ ID NO: 753651 - DNA, 551 bp, Homo sapiens
tgtcggtcttcattctgaatgctcctgtgtatgcacatttaataaatgtttatgtattttctccaattaatctgctttttgtgagttgatttttcagcaaaccttcagaaggccaaggggaaagctctcccttgtcccctacatgcttaaggtgtttggaaacttggagggagacaaaactcaaaccatgagtgatttcggtctatatcccagcgattgccctgcctggccctcaacagaccttctagttggagaaggaaatatcctgaagaatatttgtgaaaatgaaaacaaaaacaccaaggcaccaatttcatgcctggacraggatgtcttgagctgaaggaagaaaatgaaagcaacagttacggccttatcactatgaacaagaaagtcttataagggtggaaacattttgctttattttttttgtccccatagcacttggcttcaaagaacaaaagatggtgttcaccaagcagacaacttaccaaagccattttttgaaatgatgcccaataatcaatattaattcagtttatatcaatgca

SEQ ID NO: 753652 - DNA, 659 bp, Homo sapiens
cctttttcctatcttcttttccttcttcacagtagtgtccaaccaccctttatcagtttgacttacattaaagttatattccaattccaacaagtatctatattagaaaaagaaataagaggaggaaaatgaaaaacaaaatcacctcttttttcaccctttcctgacaaatccaaaccatcccttaggagaaaatcagaatgaggaatgaggttttatcgaaaccgatcagggagagaggggaatagaagatttcatcaggagttcagcttgacagaaataacgctttattgggatgggcrcttggcaaagataacatgttaccaagagcaagatagatgtttgggtaaaatcttgtgttaatacttattaaggtcaaaacccgccatctctacttttgacggacgggtattttcttccaagtcctacaccggagagtttttataaggtgcttccagcagtcttataaaagtaagaagaataaaactaagaaccctcaactcaataccactataaggcaaagtcaggattttcctctgcaagctgagaggaatgatgcgcttgagtgcaggaagtaacaggcgcagaggaccaaggggaagcctatgatggtgaagcctccagtacaggatcccaatttctgaccccaaaaagaaaag

SEQ ID NO: 753653 - DNA, 637 bp, Homo sapiens
tgagactaagctgaaatctctcctttatcattctctcatagaaaccccttggagccccatagaaaaagtcctgtttctttggaggtcacatgtctccaactattttctttttaggagaaacagccttagttcctttaaaccatttctctttggatatggttttgtatccttttgccttatttatcttgctggtctcaacagactttgatttccccaatttctctgcaaatgtactatccagaggtgagcatgggcctccagattatagagatgggtgtccctcctcattcagtgaattatactttcatgaaygtagcaaaggaaaacattcatttttattttattttaatttttattttgacagcaggctgcacacttacaaaagtgccaaaagaaaagacccaatagccaagaatcctatatccagtgagaatgtcctccaggaacaaagagggaaataaagacattcacagagaaaagaaagctaagagaatttgtcactaggagatctaccccaatagaatggctaggaagttctctaaacgaaaacaatagaagaaggaactatggggcataaagagggaagaaacaacatggtgaatgaaaatatgggtcaatatagtaagctttccttttt

SEQ ID NO: 753654 - DNA, 549 bp, Homo sapiens
aagacagctctttagcatttgtggatccctggaagagatggggagagcagagcaggcatccaggtaaatcctaagccatctcagttgatccccccgagacaccacttacaagggccctctggcccctgctgacttgctaggaggtgggcacttgacaccacccatatggaacccatccttttttttgttttttgagagtttcgctcttgttgcccaggctggagtgcaatggcgcgatcgtggctcacggcaccctcyacctcccaggttcaagcgattcccctgcctcagcctcccgagtagctgggattacaggcatgcgccactacacccagctaattttgtatttttagtagagacagtgtttctccatgttggtcaggctggcctcgaactcctgacctcaggtgatccgcccacttcggcctcccgaagtgctgggattacaggcgtgagccaccacacccagctgcccatcctatctttaagtaggctggtcccagcccagattcctgagggctttaggacagtctgatcccttctttggaa

SEQ ID NO: 753655 - DNA, 628 bp, Homo sapiens
ctaggaattaaaccaggactgtcaccatataccatgtgaacataaaaaagataacaagggaatactaccaacaatactacacaaataaattttatacctcagatgaaatggaccatataaactcataaaccacaaactattgcaactcatccagtataaaatagataacttgaatagcttatacctattaagcaaattgattgtataatttaaaactccccaaaaagaaatcttcagctgggcgcggtggctcatgcctgtaatcccagcactttgagaggccgaggcgggtggatcacttgaggtcaggagttcgagaccagtctggtcaacatggtgaaaccccgtctctactaaaaatacaaaaaattagccgggcatggtggcrggtgcctgtaatcccagctcctccagaggctgagtaaggcaggggaatcacctgaacgtgggaggcagaggttgtagtgagcagaggtcacaccactgcactacagcctgggcgacaagagtgaaattccatctcaaaaaaaaaaagaaaaaaaagtaatcttcaagcccatacagcttcactgaagaattctaacgaaactttcaagaagaattgacaccaataattcttccataaaat

SEQ ID NO: 753656 - DNA, 635 bp, Homo sapiens
aagttctttaaaagttcagagttctctctctttcattacgtttcttttatatatttatttatttatttatttattaaaaaagagtctcgctctgttgcccaggctggagtacagtggcacaatcttggctcagtgcaacctctgcctcccaggttcaagcaattctcccatctcagcctcctgagtagctgggattacaggcatgcgccaccacacctggccaatttttgtatttttagtagatacaggttttcaccatgttggccaggctggtttcgaactcctgtcctcaggtaatccacccaccttggcctcccaaagtgctgggattacaggtgtgaggcaccgtgcctggcctacatttctttttataatttgtaatactgactgtatatactstcattgtaatccttagtgatatatactgacacatagctctcctattattgtgttgcaccaaggtccaaattatgaggttgagcgtcagccaggaaaatcttgtgttttccataaaatacgtatgtcaaaagacagcgctgttgtgccaattttaaaaagtaactatgtagcacacccacgttcaaaacagcattattcacaatagccaaaagatggaagcaacccaagtgtccatc

SEQ ID NO: 753657 - DNA, 503 bp, Homo sapiens
ggatccagcagttatgcaaagctcttttggtcaaattcagctagtaaactttaatattccctaatgttagtcagctggatcttgcaagttaatgaaaaagtgttgcatttttgtgttgtggatttgaaacgattgaaatttttaaaatagaagatttgttaaagctagaaattctcttcccaagttttttwaatatgcagatattagagactttatagatgtcacacactatttttgacaacaaaactctatgattgtggaactgttaccattcatccagtttcatactttatagcattaattccattcagacaatatttactttctcactcattgtgaacatatcacctttattgggaagtgatagagtaggagtgtttatttttatatgcttatttatttttcattgtcataaactatacatcacataaaagttactattttaatcattttttagtgtacagttaggtggcattaagtgtattcatgttgtacagccacca

SEQ ID NO: 753658 - DNA, 595 bp, Homo sapiens
ccagcagttatgcaaagctcttttggtcaaattcagctagtaaactttaatattccctaatgttagtcagctggatcttgcaagttaatgaaaaagtgttgcatttttgtgttgtggatttgaaacgattgaaatttttaaaatagaagatttgttaaagctagaaattctcttcccaagttttttaaatatgcagatattagagactttatagatgtcacacactatttttgacaacaaaactmtatgattgtggaactgttaccattcatccagtttcatactttatagcattaattccattcagacaatatttactttctcactcattgtgaacatatcacctttattgggaagtgatagagtaggagtgtttatttttatatgcttatttatttttcattgtcataaactatacatcacataaaagttactattttaatcattttttagtgtacagttaggtggcattaagtgtattcatgttgtacagccaccaccatcagccatcttcagaatgttttcatcctgtaaacccgaaaccctatagttaaacaacaacttcatgttcctctctccacacagcccctggtaa

SEQ ID NO: 753659 - DNA, 595 bp, Homo sapiens
ccagcagttatgcaaagctcttttggtcaaattcagctagtaaactttaatattccctaatgttagtcagctggatcttgcaagttaatgaaaaagtgttgcatttttgtgttgtggatttgaaacgattgaaatttttaaaatagaagatttgttaaagctagaaattctcttcccaagttttttaaatatgcagatattagagactttatagatgtcacacactatttttgacaacaaaactctatgattgtggamctgttaccattcatccagtttcatactttatagcattaattccattcagacaatatttactttctcactcattgtgaacatatcacctttattgggaagtgatagagtaggagtgtttatttttatatgcttatttatttttcattgtcataaactatacatcacataaaagttactattttaatcattttttagtgtacagttaggtggcattaagtgtattcatgttgtacagccaccaccatcagccatcttcagaatgttttcatcctgtaaacccgaaaccctatagttaaacaacaacttcatgttcctctctccacacagcccctggtaa

SEQ ID NO: 753660 - DNA, 595 bp, Homo sapiens
ccagcagttatgcaaagctcttttggtcaaattcagctagtaaactttaatattccctaatgttagtcagctggatcttgcaagttaatgaaaaagtgttgcatttttgtgttgtggatttgaaacgattgaaatttttaaaatagaagatttgttaaagctagaaattctcttcccaagttttttaaatatgcagatattagagactttatagatgtcacacactatttttgacaacaaaactctatgattgtggaactgttaccattcmtccagtttcatactttatagcattaattccattcagacaatatttactttctcactcattgtgaacatatcacctttattgggaagtgatagagtaggagtgtttatttttatatgcttatttatttttcattgtcataaactatacatcacataaaagttactattttaatcattttttagtgtacagttaggtggcattaagtgtattcatgttgtacagccaccaccatcagccatcttcagaatgttttcatcctgtaaacccgaaaccctatagttaaacaacaacttcatgttcctctctccacacagcccctggtaa

SEQ ID NO: 753661 - DNA, 590 bp, Homo sapiens
gaggcgatttaaatgagatttaggacttagagttggtgctggaatgagttaagactttgaggctgttgagatggggtgctgaatatattttgctagtgagagggacacagattgattttggaggtccagagagtaaagactgaaccggttcccttcaaattcatattttaaaacctaatccccagtacttcagatagagattttgcagacaaagccttttaggatggagcctttaaagaagtaattcagataaaatgagggtgggctctaatccattctgactggtgtccatgtaaaaagaggagattgggatacacaagaaagacaccggggcatgcatgcacagagaaaaggccatgtgaagacataragggaaggctgccatctgtaagctaacaaaagaggcctcaggagaaagcataccccatctttgcatggcctttggacttacagcctccagaactgtgagaagataaatttcttttgtataagccccctgtctgtggtatggtgttactgtagcccagaagacaaatacaggcagtatccctggcttctgcccactggatcccagaggagttttctcccaa

SEQ ID NO: 753662 - DNA, 544 bp, Homo sapiens
aggagaaaaaagcaatgtaaaatttctggctgtgagaaaagcttatttataaaggcttagttttatatagtacgtaaatatcactggatatacttaagctaataatgtaatcaattatttaaatttttcagtattaaaataggctggaaattaaatcctttacaactgcctgaatttaggataattttttaaaataaccaactcatcttcagtgttaccaggtcaatgcttgggtcccaatctcagtgtactttcgcctatgttgacttcttcataggactcataatcttatttatataagatatagccaccctgagactacttagttcagagttgctctttgaccatctattcctctcayagtcttaaccctttccactccagtaaacattcttcttgatggcttatattataaattgcaatgtgactagggctgcatgtttgcatgaggcatggagcaagatatcatgcagtggttgtaactctgcttctagattctagattgggatccagattctacatcttcagagctggtttttggaca

SEQ ID NO: 753663 - DNA, 622 bp, Homo sapiens
taattttttatgtaaccttctttatgttggtgtatagcaaaaatacatgggtccaaaatagagtggcattcatcttaacattttctgtgtgtgtgtgtgtgtgtgtgtgtgtgtgtgtgtgtgtgtgtgtgtgtgtgatatatgtatatatatatgtacgtagatatgtgtgtgtatatatatatatatatrtgtgtgtgtgtgtgtgtgtgtgtataattttttttgagatagagtcttgatctgtcacccaggttggctcactgccacctgggttcaagtgattctcctgggttcaagagattctcctgtcagcctcctgagtagctgggattacaggtgcacgccaccacatcctactaatttttgtatttttagtagagacggtgcggggattcatcacgttagccaggctggtgttgaactcctgactacaggtgatctacccgcctcagcttcccaaagtgctgggatgacaggggtgagccaccacacccatcacattttctggccatttttaatgtgttagtaaatgctacgtatatttacattgcaaatattataccctgtatcatgataatttgaaatgactgaagaaaaaaaaatgaagtccaatactttc

SEQ ID NO: 753664 - DNA, 625 bp, Homo sapiens
acaacacatatttggatgctaaaataaaccaaagatcgatttgcaaatgttaattcattgttgttttaataaaactaatgtaattcacatgtatattaactacaatatattttggaccaaaccatttctgcttttcaaacactgttcaaatgcagtatgctatgaatgactagcagacttgctaattataatttttaaaataattctgtacttacaagtagaacgtactatccacttctaatgaatgtttgaaaaaatagtagtcattttttgtgagggaagaggaatttccttttatagaatttgagtcgtttcactttatttattgtctctggtataytgagtgacttagtgaaacgtttcttcgttttatacttcttttttgttaacatacagacaattttctctctcaaccagtaagttattcattatccaataaaaatctactatattttctaaagctagtcaaatgctacagtataatcttggttttcaagtgctgcagttttgctagtgattagatgcccgtatacagtctaattacaaaagaaaataacatttatgaaaatgagcttcatctaggacaagttcatgcaggaaattggtctcttgaagaatgaaagtg

SEQ ID NO: 753665 - DNA, 593 bp, Homo sapiens
ctcattgatctaatattgatagtggggtggtaatgtctccctgtattattgtatggaagtctaagtctctttgtaggtctccaagaacttgtttcatgaatctgtgtgcacctgtattgaatgcctatatatttaggataggtagctcttcttgttgaattgattcctttataattattaagggaagagaccacccctaatattgtcttatacccaatttctgcctccaaagaaagaagaagtaaaaactaaaaggcagaaatgaaatcyacaggcagacagcccagcgccgtgccctgggcctggttaaagtatgacgcctgacctaactggttatgttatctatagattccagacattgtatggaaaagcattgtgaaaatccctgtcttgttctgttccattctgattaatggtgcattcagcccccagtcacataccccctgcttgctcagttgatcatgaccctctcacactgaaccccttacagttgtaagcccttaaaaggacaggaactgctcactcggggagcttggtttttggagacgtgagtcttgctgaagctcccagctgaataaagcccttccttcttt

SEQ ID NO: 753666 - DNA, 436 bp, Homo sapiens
ggccctgcctacattgtgtattgtgacatatggctgggtccaccacctagttgatgtgactcttatgcgtgggttctatttacaggggtattaagatatattttttcattcatcccctaggtgatgtgcctcttctcttctgcctgggccctgccaataaaaggggattgtaatgaatcactggacccagaacctaggtgaggtgacactcctattttgcctgggccctgcatatttgggtattgtatcatatcactggactcaacacatargggataggaggcacatgcatgcgtcctgctcacagaaggccttgtgacatatctctgcatccattaccagtgagatatgactgtcctcttctacctgcaccctgcctatagagaagactgtaacatattgctgggcctactgaccagatgatgtgtttcttttg

SEQ ID NO: 753667 - DNA, 530 bp, Homo sapiens; identical to SEQ ID NO: 742811

SEQ ID NO: 753668 - DNA, 530 bp, Homo sapiens; identical to SEQ ID NO: 742812

SEQ ID NO: 753669 - DNA, 514 bp, Homo sapiens
ttttttggagtcttttttcaggcttcagagtcttctggtgaaatctttaaagtattctaggtagacaattctatcatcagtaaagataacttgactttgttttctgtttggattccttttatttctctggctaggacttygtaacttcaataggactgtttagaatggatattcttgtcttatttttattcttatggagaatgctttcagtttctgcttttttagtatgatgttggctaaggatttgtcatagatgactcattattttggggtatgtttcatcaatgtctagtgtgttgacaatatttttatgagtcaatattggattttcttgaatgccttttctgccccattgtgttaaatattttttattttatttttacatggtgatcatacttattgacttgcatatgatgaaacatctttgcatttatggaataaagttcacatcattgtagcaaaataactttctgatttgcttttgaattcagtttgctagtatttcatggaggat

SEQ ID NO: 753670 - DNA, 558 bp, Homo sapiens
caatttttaccaagatgtgaattatgaatttagctttttcagaagttctttttttataattagtttataaaactgatctcctggcagcacagtctgctctctgagataagaagatattggttttctgacaatcacagttaatttgggtattggcttagctgagttcatcaatttcctgaaagcacagttgtgctaacgtggaccattcaatttgactatctcacaattttcatacttcatacctctcaattccgagaaatatcacatgtcagtgaacctstatccacttcatcaaatctcaattatatttaaagttttatcatttgtagtacagcatgttgacatattcgacattttatttaaccttaaaaatatggttcctattgtgatctggttagtggataatcaaaatcaaaatctattgcaccttaaaggaaacaatgaacagagtgaagagacaacctaaagaatgggaaaaatatttgcaaactttacatctgataagcagctaacatctaaaatatactcaactcagtagcaaaaaaaaaagtatacctg

SEQ ID NO: 753671 - DNA, 618 bp, Homo sapiens
attctatgacgtgtgcattcaaatataaagtttgtaaagagtgtgttaatttcaccaagaattagtcaactggaatttttattgtaattgtattaaattgatagaataattttaagataatttaaatttaacaatattgatattttcaatatataaatatttcatagctatgtcttaatttctctttctgacatttggacttctcattgtaaagatcatctgcgtgttttattttatatatcyttaatcatttcatacttttgcatcctatggtaaattgaaaatttatcgttttgaatttgaattcccaatcatttgtttatagtataaaagtgtagtttttttcaatattggcatggtattctaaaatcttgttaaattttcttttttctcacagcatttttgttgaatgggatttacagaataatcatatttttgcttataaacatagtttaaaagattgtttaattccaattttgcacaagtttactatatctgcaaaattggaaatatatgctacttttttttgcattactgccctgcgtaggatttttttgtaataacaaagagcagtggtgagagtggacctttttacttttcttgaattcatagagatag

SEQ ID NO: 753672 - DNA, 656 bp, Homo sapiens
tgtactcaatacattctagatgtgagtccctttttcattatttatgctacaaatatatattacagcttttgttttttcattttcttaataaatttcctgaatgcattctatcatcttgccttctgaagctttctcattttgtcatttgtacttaggtctacaatccaatggggacttttttttttggtagtagaaaaaatttcatgtttatcttcagtttggctactatattttattaataaaatgtttctttttccatgctctttagtgaaaattttgtaatgtgcaartagatttatttctgggctatctttctacatttgttgtgcaattaccataataccgtcattttataataaacttttacatctcacaacacattcttcttcaacaatatttcaactattttttggcccttaatatacatacacattttgaaattagctcgtttatttatctaaagagatagtgaaattgttgtgaattttgggtaaatgcaccaaaactataatatagtttgtgtgaaatggtgtctttgaaatattgagtcatctgatccataaacatactgtatttctacatttatttatttattttaaattttctcagcaacatattattgttttatgtttataggtctttcacatcattaatta

SEQ ID NO: 753673 - DNA, 667 bp, Homo sapiens
ttctgtgcactttttatgtgaaaatttttccctttccacaataggccacaaagcgctccaaatatccacttgcaaattctacaaaaagagtgtttcaaactgctaaatcaaaagaaagtatcaactctctgagatgaatgcacacatcacagagaagtttctcagaatacttctgtgtagtttttatgtgaaaatatttccttttgcaccataggccgcaagtgcttcaaatatccacttgcagattctacaaaaagagtgtttcaaaactgctcaatcaaaagaacggttcaattctgtgaaatgaatgcacacatcacaaagatggctctcagaaagcttctgggtagtttttatgtgaagatatttccttttccaaaatatgcctcaaagcgctccaaatatccacttgcagattctacaaaaagagtgtttccaaactgctcaatcaaaagaaactttcaactctgttagatgaatacacacatcacaaagaactttctctstatttttttgtgtagtttttatgtggagatattttgttttccaccgtaggctgcaaatggctccaaatatccacttgctgattctacaaaaagagagtttcaaaactgcacaatcaaaagaaagcttcagctctctgaagtgaaagtacacttcacaaagg

SEQ ID NO: 753674 - DNA, 572 bp, Homo sapiens
gtgtatcttttatgtgaagatatttccttatacacattaggcctaaaagcactccaaatatccccttacagattctacaaaaagagtgtttcaaaactgctccatcaaaggaaatgttcaactctgtgagattaatgcacacatcacaaagcagtttmtcagaatgcttctgtgcagtttttatgtgaagatatttccttttccacaatagaccccaaagcgctccaaatatccacttgcagattctacaaaaagagtgtttccaaactgctcactcaaaagataggttcaacactgtgagtttaatgcacacatcataaagaagtttcacagaatacttctttgtaatttttattttaagatatttccttttccaccataggcctcaaagtgatccaaatgtccacttgcacattcttcaaaaagagtgtttccaaacggctcagagaaatgttcaactctgtgagatgaatgcacacatcacaaagaagtttctcagaatacttccacgtactttgtatgtgaagatatttccttttccacaatatgcctcaaagtgctccaaatatcca

SEQ ID NO: 753675 - DNA, 572 bp, Homo sapiens
gtgtatcttttatgtgaagatatttccttatacacattaggcctaaaagcactccaaatatccccttacagattctacaaaaagagtgtttcaaaactgctccatcaaaggaaatgttcaactctgtgagattaatgcacacatcacaaagcagtttctcagaatgcttctgtgcagtttttatgtgaagatatttccttttccacaatagaccccaaagcgctccaaatatccacttgcagattctacaaaaagagtgtttccaaactgctcactcaaaagataggttcaacactgtgagtttaatgcacacatcataaagaagtttcacagaatacttctttgtaatttttattttaagatatttccttttcyaccataggcctcaaagtgatccaaatgtccacttgcacattcttcaaaaagagtgtttccaaacggctcagagaaatgttcaactctgtgagatgaatgcacacatcacaaagaagtttctcagaatacttccacgtactttgtatgtgaagatatttccttttccacaatatgcctcaaagtgctccaaatatcca

SEQ ID NO: 753676 - DNA, 488 bp, Homo sapiens
atttcctttttaacagtgggcttcaatgcactcccaaatatcccttcgcagataatacaaaaacagtgtttccaaactgcacaataaaagaaagttttaactctgtgagatgaatgcacacatcacaaagcagtttctcagatagcttctgtctagttcttccctgaagatatttccttttccaccacaggcctcaatgcactcccaaatatccatttgcagattctaaaaaaagagtgtttccaaactgttccatcaaaaaatggagttcactctgtgagatgaatgcacacatcagaaagcagtttcttgtaacgcttctttccagtttttatctgaagatattaccttgtttacaataggcagttttgctctacaaaacctcacttcrcagaatatacaaaaagagggtttccaaactgctcagtcaaaagaaaggtttaactctgtaagatgaatgcacacatcacaaagccgtttctcaaaaa

SEQ ID NO: 753677 - DNA, 592 bp, Homo sapiens
gcttctgtctagttcttccctgaagatatttccttttccaccacaggcctcaatgcactcccaaatatccatttgcagattctaaaaaaagagtgtttccaaactgttccatcaaaaaatggagttcactctgtgagatgaatgcacacatcagaaagcagtttcttgtaacgcttctttccagtttttatctgaagatattaccttgtttacaataggcagttttgctctacaaaacctcacttcacagaatatacaaaaagagggtttccaaactgctcagtcaaaagaaaggtttaactctgtaagatgaatgcacacatcacaaagccgtttctcaaaaagcttccttctagtctttatycaaaggtatttcctttttcaccattggcttcaatgagctcccaaacatccctttgcaggtactacaaaaacagtgtttccaatctgctcagtcaaaagaaaggtttaactctgtgagatgactgcacatgcacacaacacaaagcattttctcagaaagcttcttcctaattattctctgaagatatttcctcttccaccataggcctcaatgcgctcccaaatatct

SEQ ID NO: 753678 - DNA, 563 bp, Homo sapiens
gccataaaaccagcaagttttcattagtgattttcagaagggtaggtagtgtagaatagggtgtggttcacagagatcacatgcttcacaagataatgagatatcacaaggtaaatggaggcagggcgggatcacagaaccacaggaccggggcaaaattacaattgctaaagaartttcaggcacacactgtcattgataacatcttatcaggagacagggtttgagacagggtttgatcagacaactggtctgatcaaaatttattaggcaggaatttcctcatcctaataagcctgggagggctgcaggagacgggggcttatttcacccctgcagctgcaaccataaaagatggccacccacaaagcagccatttcagaggcctaccctcagggaagcattctctttctcaggggtgttccttgctgagaaaaagaattcagcgatatttcttccatttgcttttgaaagaagagaagtaagttctgccagacttactggtggtcagtgtttaaggttatctcttttgctccctgaacctgcagttatcctcttctttt

SEQ ID NO: 753679 - DNA, 549 bp, Homo sapiens
ccagtttttatctgaagatatttcttttttcacaatgtctacattcactccaaaatatcccttcagagattctaccaacacattgtttcctaactgctcactcaaaagaaaggtttaactctttgtgctgagtgcacacatcacaaaacagtttctcagaaagattctttttaggttttctctgaagacatttcatttttcaccatgagcctcaaagcactctcatatatccctttgtttatactacaaaaaccatgtttccaaactgctcagtcatattaaratttaactttgagagaagaatgcacacatcataaagaagtttctcagaaagtttctttttagtttttctctgaagacatttcctttttcaccacaggcctcaatgtgctcccaaatattccctcgcagattctaaaaaaacagtgtttctgaatggctcactcaaaacaaaggtttgcctatgtgagatgaatgcacaaatcacaaagccatttcacagaaaacttctttctattatttacctcaagatatttcatttttcaccat

SEQ ID NO: 753680 - DNA, 549 bp, Homo sapiens
ccagtttttatctgaagatatttcttttttcacaatgtctacattcactccaaaatatcccttcagagattctaccaacacattgtttcctaactgctcactcaaaagaaaggtttaactctttgtgctgagtgcacacatcacaaaacagtttctcagaaagattctttttaggttttctctgaagacatttcatttttcaccatgagcctcaaagcactctcatatatccctttgtttatactacaaaaaccatgtttccaaactgctcagtcatattaagatttaactttgagagaagaatgcacacatcataaagaagtttctcagaaagtttctttttagtttttctctgaagacatttcctttttcaccacaggcctcaatgtgctcccaaatattccctcgcarattctaaaaaaacagtgtttctgaatggctcactcaaaacaaaggtttgcctatgtgagatgaatgcacaaatcacaaagccatttcacagaaaacttctttctattatttacctcaagatatttcatttttcaccat

SEQ ID NO: 753681 - DNA, 494 bp, Homo sapiens
tggtttttatctgaagatgtgtcctttttcaccataggccccaatgcgatacaaaatattccttcacagattctaccaaaacagtgtttccaaactcctcaataaaaacaaaggttaaactccgtgagataaattcacagatcacaaagctgtttctcagaaaactttatatagtattgctctgaagatatttccttcttcaccctaaacctcaatgtgctccyatatatccctccacagagtctacaaaaacagtgtgtcataactgctcaatgaaaagaaaggtttaactctgtgagaagaatgcaagcaacacaaaacagattctgggaaagtttctttttagtttttatctgaagatatttcatttttcaccataggcctcaacgctctcccaaatataccctcgcatatcctacaaaaacagtgtttccaaactgctcaatcaaaagaaatgtttaactctgtaagaagaatgcacacgtcacaaaggg

SEQ ID NO: 753682 - DNA, 552 bp, Homo sapiens
agttttgaaacactcttttggaagtatctatgaagggatatttgggagtgtattgaggcctatggtgaaaaagtaaatatcttcggataaaaaatagaaagaagcattctgagaaactgctttctgatgagtgcattcatctcatagtgataaaactttcatttcattgagcagtttggcaacactgtttttgtagaatctgcctaaggatatttgggagcactttgaggcctatattcaaaaaytaaatatcttcagaaaaaactagaaagaagctttctgagaaacttctttgtgatgagtgccttcttctcacagagttaaacctttcttttgatggaggagtttggaaacactgtttttgtagaatctgcgaaggggtattttggagtgcattggggcttatggtgaaaaagaaatatcttcagataaatattagaaagaagctttctcgaaactgttttatgatgtgtgcattcgacttacagtgttaaaacattctggtgattgagcagttggaaaacattgttttggaaatatctgccaaggtat

SEQ ID NO: 753683 - DNA, 604 bp, Homo sapiens
tctggaaagggatatttgcgagtgctttgaggcctatggtgaaaaatgaaatatcttcagataaaatctagaaagaaaccttctgggaaactgcttcatgaaaagtgcattcatccaatagagttaaacctttcttttgattgaggagtttggaaacactgctttggtagaatctgcaaagggatatttgggagtgcatttaggcctatggtgtaaaagaaaatatcttcagacaaaaaccaggaagaagcattctcagaaacagctttgagatgttttcattcttctcacagagttacacccttcttattattgagctgtttgcaaacactgtttttgcagaatctcagaagggttatttagaaatgctttgaggcctatggtggaaaaggaaatatctgcagaaaaaaactaaaaagaagctttctcagaaacckctttgtgttgtgtgcattcttctaacagagttaaagctttcttacgattgaacagtttggaaacactgtttttgtagaatctgtgaagggatacatatgggagtgcattgaggtctattgtgaaaacggaaatatcttcaaggaaaactaggaagaagctttctgaa

SEQ ID NO: 753684 - DNA, 537 bp, Homo sapiens
gttaaacctttcttttgatcgagcagtttggaaacaaagtttttgcagaatctgtaaagggatatttaggagcacattgaggcctatggtgaaaaaggaaataacttcagatgaaaactagaaagaagctttattagaaactggtttgtgatgtgtgcatccatgtcacagagttaaaactttgttttgattgagcagtttggaaataatgtttcggtrgaatctgagaagggatatttgggagcatattgaggcatatgttgagaaaggaatatcttcagataaaatctagaaagaagcattctgagaaactgctttgtggtgtgtgcattcatctcacagagttaaaattttttttttgattgggcagtttggaaacactgtttttgtagaatctgcaatgcaatattttggagtgcttttaggggtatggtgaaaaaggaatatcttcagataaaagctagaaagaaactttctgagaaacagctttgggatgagtgcattcatctcacagagttaaacctttcttttgatcaa

SEQ ID NO: 753685 - DNA, 537 bp, Homo sapiens
gttaaacctttcttttgatcgagcagtttggaaacaaagtttttgcagaatctgtaaagggatatttaggagcacattgaggcctatggtgaaaaaggaaataacttcagatgaaaactagaaagaagctttattagaaactggtttgtgatgtgtgcatccatgtcacagagttaaaactttgttttgattgagcagtttggaaataatgtttcggtagaatctgagaagggatatttgggagcatattgaggcatatgttgagaaaggaatatcttcagataaaatctagaaagaagcattctgagaaactgctttgtggtgtgtgcattcatctcacagagttaaamttttttttttgattgggcagtttggaaacactgtttttgtagaatctgcaatgcaatattttggagtgcttttaggggtatggtgaaaaaggaatatcttcagataaaagctagaaagaaactttctgagaaacagctttgggatgagtgcattcatctcacagagttaaacctttcttttgatcaa

SEQ ID NO: 753686 - DNA, 495 bp, Homo sapiens
tttctgagaaactgctttgtgatgtgtgcattcatctcacagaggtaaacgtttcttttcattgagcagtttggaaactctgttcttctagaatctgcaaagggatatttatgagctttttgaggcctaagttgggaaagcagatatcttcagatgaaaaytagaaagaaactttctgagaaactgctttttgatgtgtgcattcttctaagagaattaaacctttgtattgaatgagcagtttggcaacactgtttttgcagaatctgtgaagatatatttaggaacacattgagggctatggtgaaaaaggaaatatcttcagaaaaaaatgagaaagatttcttagaaatagcattgtgatgtgtgcattcattcaacagagttaaatcattctttaattgaacagtttggaaacactgtttttgtagaatctgtgaagggatatttcggagcccattgagacctttggtgaaaaaggaaatatcttcaaat

SEQ ID NO: 753687 - DNA, 615 bp, Homo sapiens
atctgtgaagggatatttcggagcccattgagacctttggtgaaaaaggaaatatcttcaaataaaagctagaaagaagctttccaagaaactgcttttcgatgtgtgcattcatctcacagagtaaaacctttcttttgatagagcagtttggaaaaactgtttttgtagaatctgcaaagggatatttgggggagcattggggtctatggtgaaaaaggaaacatcctcagatgtaaastagaaagaagctttctgagaagcttttttgtgatgtgtgctttcatctcacagagttaaacttttattttgattgagcagtttggaaacacagtttttgttgactctgccaagggatatttaggagtacattgaggactatggtgaaaaaggaaataatttcagacaaaaactagaaagaagctttctcagaaacaggtttgtgaattttgcattcatctcacacagtaaaacccttcttttgatttagcagtttggaaatactgttttggtagaatctgcgaagggatatttgggagcacattgaggcctatgttgaaaaaggaaatatcttcagattaaaaacttgaaagaaacattctgagaaactgcttt

SEQ ID NO: 753688 - DNA, 473 bp, Homo sapiens
atattccttttccaccatagttctcaaagtgctaaaactatacacctgcagaatctacaaaacaagtgattcaagattgctcaatcaaaagaaaagttgaactctgtgagttgaacgaacacatcagacagaattttttcacaatgcttcagtgtagtttttatatgaagatatttccttttccaccatagccctaaaagcgctccaaatatccacttgtagaaactacaaaaagastgtttcaaaactgacgaatcaatagaaagtttcaactctgtgagatgaaagcacaaatcacaaataagtttctcagcatgcttcagtctagtttctatttgaggatatttccttttccaccacagtcctccaagcactacaaatatccacttgcagattctacaaaaaggctgtttcaaaactgctctatcaaaagacaggttcaactctgtcagatgaattcacacatcataaag

SEQ ID NO: 753689 - DNA, 568 bp, Homo sapiens
atggaaaattgtagggccagatgcttctggattaagagaacatgaccaggtgagtgtgccaagcaagtgcttggagatattaatgtcttaattggagatacttacttgaaaaacagattgaatccacacattgtaaacatgatcgccaagtaacccacaacaccaaatgcatagctgagtttgtagatcaaaagaaaccatttgtagaccaatctgtggagtgaaaaatggggagaaacacagaacacagaaacacagaaaaatggggagaaacacagtaatattataaaatattttgtctttttcaaagacttataaatcagtttttagtttctaaaagtaaatttataacacacagaacacagatgtatatagcaataagcattatatgaatagaactatcatgctcmtgtgtttctgtgtatatgcgtatgtgaattctttttaaatttgtctacgtccctcatgtgcttcacttaaaaatagccttcaggaatggttactcttcctgggaccctgcctccccacagcgcccccttctcatttggtcctagggttaaccttgagt

SEQ ID NO: 753690 - DNA, 339 bp, Homo sapiens
cctcacatccctttccctgcacatcctcttggagtctctttcctgcttttcactccaaactgcattaagagtcttgctccagatgtttagccccaccctctcacccccaagtcctgagccctgtctctgactctttcaccttccccagctcactccctgttggagccattgcaccaaatacttaagatctatgatatyactagcataaggtttcaatatgattttaataggtgctctatttcactgagttccagtcagaagggaccttctgaacatcatggtttaaatgggttgtgggctagctcctgaaatgtgttgtcatttacatcacttctatgg

SEQ ID NO: 753691 - DNA, 354 bp, Homo sapiens
tcaggatggcacacgggatctaagatggacaaccatgccctcctgcccacaaccatgtgttctgtgtaagaggattgtgtatgaggaagatgcaaaataataatgccacaagagcccccaaccccgttgttgtgagtgcccttgactcttctgaacaagaaggacattaagaaagaagctgctgccctgagatgttagcaggagagmggcaatagtggccaccacaagatggaggccaatgcctgaggctggcagtgcagagagggctgaggcctggggttccttgtagccaagagcaggtgagcacaggatgtagtggcctcagtaatcccacagcagtggcactggaaccca

SEQ ID NO: 753692 - DNA, 605 bp, Homo sapiens
aatacatgaatgaatgaaccaacaattaagccacctctaagtttgttaagagtgagaaggtctaaaattcttccaaaagtcttttgtcccagagcagtagctttttatccaggaggatgccttacataaagcaaattaaatcagataggagagaaatgtatgtacttttctccttttcttgccggacatttaaaaggggttggattaataatgtccttcagtatttactgggatatttaaaagacgccctcccaaaatattttaaagctccaattatacaataatgaaagtactcagaaagactttgcacttgaaagggagaggaaaaccgcactaacaatgtagttcagagacttggagcaatggaaaaaacctaaaagaataattaggggrgataggaaaaaatggcagataagaggcaggactaacttgcagttcccactcagacagacagagcaacgtgtggagacccacttcatgaacttttgctccaagaactaccacaggaacataccaggaaagcaagataatccatagaccctttgaaggagatggattgttgctgcagcctccgtgggacagccacgaaaatgtaagcctgcttg

SEQ ID NO: 753693 - DNA, 637 bp, Homo sapiens
tcaagaagaaagaacgccttgctaaataaagtgtcaatatctacatgtaacataaacacacactgacaaaaagcaaatctgcacatgctcctatcagtagctatacattttcccaatacttggtaatttttggcaacaaggtcatcctgtgatmaagatctcaccaagaaataaatcaatgatcagtaacgcaaagattatacctcatacattcatattttgttattattagaaacactttcttcgtttacatttgtcttcagtctttccattatatcaaaaatgaaacaaacatcattaaggcattgtctttgtcagcctcatcaagaatgttttacaggaattccacatgtcatctgaaatgtctctgatgccatcctttttatgtaatacatgaaatgacagaatatagactcttttggtgtcaccacaggatagatttccattcacctcagcaaatattacatgaaatagaggtaagtttcttggtctgggaaggcttttctctagctaggcattcatatgatagaatggaggtcctatttcattcaacaagtaactgttgaatgccttcgttgaactggcatggtgaaataaagcatattaccaggtagtaataattgtccacttcataaga

SEQ ID NO: 753694 - DNA, 635 bp, Homo sapiens
gtctttcaaagaattagcccacctcatctaatttatccaaatttgtgtgcacagaattgtttgtagccttttctttttatgtccatgggattagtaatgatgatctcattttcttttctcttttttcagggagacagggcctctctctgtgacccaggctggaatgcagtggcacaaccatagctcactgtacctccaactcctgggcttaagcaatcctcctgcctcagcctcctgagtagctaggactacaggcacgtgccatgatgcctggctaattttcaaattttttgtagagatggggtctcattatgttgcccaggctggtcttgaacacttggcctcaagtgatcctcccacctcagcctcccaagtgctgggatgacaggtgtgagtcactaagcctagcccaattttcttttataatattagtaatttgygttttctcttttttttttcttggttagtctggctagaggtttatcagatttattgatcttttcaaagaaccagcttttggtttcattgtgtttcctctactgatttcctatttttaatttcatcaatttttgccaaaatttatattatttattttctgtttgttgtaggcataaattactcttccttttctagtt

SEQ ID NO: 753695 - DNA, 576 bp, Homo sapiens
aggatcgaatgccttcatcaaaaagtgtgaaagaggacaaacagacaatcttaggacatacctcaaggaactagagaaacaagaacaaaccaaatccaaacccagcagaataaaagaaataaggaagatcagggcagcactgaatgaaatgaaatgaaactgaaacaaacaaacaaaaatacaaaagataaatgaaacaaaaactgtttctttgaaaagataaataaaactgatagaccgttagcaaaattaatcaagaaaagaaaagagaagwtccaaataagctcaattagaaatggaacgggagatattacaaccaataccacagaaatacaacagatcattcaaggctactaccaacacctttatgtgcataaactagaaaacctagaggagatggataaattcctgaaaatatacaaacctcctagattaaaccaggaagaaacagaaactctgaacagaccaataacaagcagcaaggttgaaatgaaaatttaaaagttaccaagaaaaaaggtccaggaccagatggattcatacctgaattctatcagacattcaaagaagaattgg

SEQ ID NO: 753696 - DNA, 636 bp, Homo sapiens
tgaacaactcaaaggaagctttagcctgtgataaatgtgggagaaggacagtgtctgggtccacacactcactacaagacttgaatcagagccctgcctctcctacttgctctctggactattttggagagagggtctctatcttttccgcttggttaatatgtgtctgtactgtaagtatattaaggcattattagcaatgaaatgaaattgaaaaattcttagtagtacrtcgtttgtgtgaagaatcgccaaataacatggtcagagctggtagcctaagcgtgaaaaacttgatcatttactgaacttagggtgggctgattatctttgctttttgaatggctgagcactggaaaggttgccccagccaacaaggaattaactactgataagactatccagaaaagggagaaaaggttgtggaaagtgaagttaagtttggtttaatgtgtattgattttgagacacctccaggctacacagacatagttgtccacataagacaaactgaagtcaggagaaaggttagagattagagatttagttttcgacagtggcaaactttccaggagtgaataacatttcctaggaagtctataatgtgagaaaggaaggaggtccaggaatatagtt

SEQ ID NO: 753697 - DNA, 637 bp, Homo sapiens
ttcattttaatcttgaattttttcagagctcaaagtcatttttgatattaaccattgctttgaaaaaggaattccataaccacatttacttgtgggatatcatgtggacagaatataaaaaattccatctgtacctttccttttttttaccccagtattagtttcaatgggcaagtatctaactttccagaacttcctcctccacaatctgtgggtccttgamggtataagagtaatgttaggctgggcgcagtggctcatgcctgtaatccctgcattttgggaggccgaggctggtggatcacttgaggccaggagttcgagaccgacctggccaacatggtaaaaccccatctctactaaaaatacaaaaattagccaggcgtggtggtgcacacctctgtagtcccagctacttaggaggctgaggcaggagaatctcttgaagccaggaggtggaggttgcagattgtaccactgcactccagccagggtgacagagcaagactccatctcgataaataaataaataaataaataaataaataaataaataaataagtaagtaatgttgattttctaaggttagatgacatgttcattagtcattcttatcttctgtgtcctatcaggggaa

SEQ ID NO: 753698 - DNA, 609 bp, Homo sapiens
agtgccagaatagctcttcttatcggagaaagaaagccttgaacatcagtgaaccatgcttataatctgccatttcactgctgacttttcagaaaagcatcaccctgcaaagaagctgctcttgaatgcaggcctcatgattgccagagtcatcgaatgttcggacttgcctagttctcactttggaactgggtgtatcagctagtcgagtgcattaattctsggcatgaccacagactgaaacacaagcagcattaacaaattaccagtgatagatatgcaaatgggccaaggacaagtgttaaaacagccctacctcgctttgccgctactttgtcctgtccaaaatttgtagaattattaatcctcctggaacgcttagtagtgcgtatagggtaatattcttgaggaagctaataattatctcttgttagtaacatcagcttactacagtctttcactgcggggacagaaaaatattgtgactttgttatgctaaacgaaacacagtggcaggataaattaggacatttaaactaacaataataacgtcacacagctatagttcccctctacatatcattgataaaattaacagaaaacaggcac

SEQ ID NO: 753699 - DNA, 575 bp, Homo sapiens
agcttttgatcagaataatatactacaagaaggtgatatgcctccaacccaaaacagtgaattttaacatttagcccacacagttttgtcataggcaaatggatgatttccctcagcctttcagaatattgagaacagtttttagatatccctactaccttgaaggaacaccattcataacccaccccaccccaagatgtcttgagatctactgggcgaagagagttctatagtccctctggttctaaaattcttaagtgagtgaaccctgcaagcttcctcagggtaaatatttgaggtttcacctactagtcaatcttaaagcctagttytaagaacgtggcttgcaatcctaatacttcaaaccaggagactagcttggtctgggtgcctttgagctgaaggcagagcctgaaacaaggctggagttccatgttgtttacttgggaggtgatgcagaaaggtggaggagggacaggaaaggggagaaagtcagttaagtcagaggactgccgctgtgcacaactggggctcagtcccacaaggggcaaggaagctggggtgttcctccatca

SEQ ID NO: 753700 - DNA, 575 bp, Homo sapiens
agcttttgatcagaataatatactacaagaaggtgatatgcctccaacccaaaacagtgaattttaacatttagcccacacagttttgtcataggcaaatggatgatttccctcagcctttcagaatattgagaacagtttttagatatccctactaccttgaaggaacaccattcataacccaccccaccccaagatgtcttgagatctactgggcgaagagagttctatagtccctctggttctaaaattcttaagtgagtgaaccctgcaagcttcctcagggtaaatatttgaggtttcacctactagtcaatcttaaagcctagttctaagaacgtggcttgcaatcctaatacttcaaaccaggagactagcttggtytgggtgcctttgagctgaaggcagagcctgaaacaaggctggagttccatgttgtttacttgggaggtgatgcagaaaggtggaggagggacaggaaaggggagaaagtcagttaagtcagaggactgccgctgtgcacaactggggctcagtcccacaaggggcaaggaagctggggtgttcctccatca

SEQ ID NO: 753701 - DNA, 617 bp, Homo sapiens
ctacatcttatccctccaccagactgtggacaccatgaggacaatagattctgctgttttcctcaccgctgtgttcaccagcacctgaaaagcatctggcatattgtgcctggctcaatgaaccattactgaattcacaaatattgaatgattccttctgtgttcccaatcaactagtacaatgttttgcatgggagtaggcacacaataagtatttgctgatttaattgataggtcagagggaaaagaaaaactggaggagtgtggttttctcagaaatggggaamacacgggaatcaaagagatgagcttgcatttggcaggactcagtggcaagtaagtgataggtaactgttttctggtgtgttgatgtcaattacctatacaaatgatctagatggcctaatcatttctgctggtcaactaacgcctttagatcagcatcaaggagacaagagaaaccacgagtcacttggcacatcaccttggagagggagaggctcatctgccacaatggacttgtccttgccttagaggcactcccagtacctcatcatgatgctctgttctcctggcaacgctccttactggcttgcaggtgcccgtgagcagggctt

SEQ ID NO: 753702 - DNA, 618 bp, Homo sapiens
tggacataggagagtgccctggtttattaccgcagagcaccagaagcctgaaagaatcaccgacgttgtgaaacaggcctctctcagaattaagaaatagctccagcttgaagtttctgtggtatgagaacttagagcttcaaattggctgcccccatgtcccacagagtaaccatcatcttacaagtcacttcttcagggcctggtctaaattcwattttttttttttttttttttttttttggagacagagtcttgctctgttgccaggctggagtgcagtggcgcaatctcagctcactgcaacctctgcctcctgggttcaagcgattctcctgcctcagcctcccgagtagctgggaatacaggcatgcgccaccacgcccagctaatttttgtatttttagtagagatggggtttcaccatgttggccagatggtctccatctcttgacctcatgatccgcctgcttcggcctcccaaagtgctgggattacaggcataagccaccacgcccggccggcctggtctaaattctgacccccttgttctcctcaagctaccttatccatttctttcctagcactcaccacgatttgtaattttaaatttatttg

SEQ ID NO: 753703 - DNA, 618 bp, Homo sapiens
tggacataggagagtgccctggtttattaccgcagagcaccagaagcctgaaagaatcaccgacgttgtgaaacaggcctctctcagaattaagaaatagctccagcttgaagtttctgtggtatgagaacttagagcttcaaattggctgcccccatgtcccacagagtaaccatcatcttacaagtcacttcttcagggcctggtctaaattctattttttttttttttttttttttttttggagacagagtcttgctctgttgccaggctggagtgcagtggcgcaatctcagctcactgcaacctctgcctccygggttcaagcgattctcctgcctcagcctcccgagtagctgggaatacaggcatgcgccaccacgcccagctaatttttgtatttttagtagagatggggtttcaccatgttggccagatggtctccatctcttgacctcatgatccgcctgcttcggcctcccaaagtgctgggattacaggcataagccaccacgcccggccggcctggtctaaattctgacccccttgttctcctcaagctaccttatccatttctttcctagcactcaccacgatttgtaattttaaatttatttg

SEQ ID NO: 753704 - DNA, 439 bp, Homo sapiens
tcagattttttttctatttctatgaggaatgtcattgttattttgacagagatggcatgaaaagtatagactgctttggatcgcatggacatttttaaaaatactgattcttccaatctgtgaacatagatataactttccatttttttgtcttctctttcttttatcagtgttttacrtttttaattgttgagaacttttatttctttggtaaattcccacacattttgttttatttgtggctattgcaaataggattacttttttgaattcttttccagtttgttgactgttggcatatagaaatcctactgatttgtacatgttgattttgtattatgcaaatttactcaagttattacttctaatagttttttgatggatatattaggccattctcacattgctgtaaaaataatcggtgactagttaatttata

SEQ ID NO: 753705 - DNA, 550 bp, Homo sapiens
ccctgccccagagggtgggaagctggatgcagccggatctgcgaggagggacctgggtgtgggtgtttcacgctgggtctggctttgcctcctctctgggcttgaagttcgaaggtctctcctctgtggagggaaattcgcaggcagctaacaagggacttagtttctgccagcgttgcgccccgaatgcagattcaaggacattttagggaacactggraatgctggctcccaggggagccaggtgggtctgggcttcaggattttgaggaaacagtggtggccccagcagtccagatggacaacgtggaagtcgtagcttccattctgaggcctgtggtctcagccgagaactattgatccggaacccaggtgccgagcatgttggtcttgtttagtgacttagggtcagggccagagggggcagaggaaactgcacctgcctgcacatgtgcacatgcccagccctgagggcaggagccatgtgaagttcagggccaggcactgcaagtggtcacccaggagtgggggagacagggagaggcttctg

SEQ ID NO: 753706 - DNA, 625 bp, Homo sapiens
ggctcactgcaacctccacctctggggttcaagcgattcttctgcctcagcctcccgagtagctgggactacaggtgcacgccaccaggcccagctaatttttgtatttttagtagacacggggtttcaccatctaggccaggatggtctcaaactcctgtccttgtgatccaccctcctcaccctcccaaagcgctgggattacagttgtgagccactgcacctggccaagtcctttcttaaataaaaaactcatttcttagtaattccctgacctaattgaaatctgtatctgtgggatagattaggatatctagaatcacagacaatagataaaccattattcaggagttgagtgccyctactacaaataataaccgggcttaatcttcagctgcaaatatacttcagttaagacaaaagaaagatcaacaaaacattgctgtcttggtatgtctgacatctccatacaaaaatctctacttggaaatataaatgtgtgtatgtgtttttaatttttttaatttattatttgtacttagtactgcaccctgctggagcctgacatggaaatttttgtgaaagagatttattgaggaagtgctctcagaaggaacctgttagg

SEQ ID NO: 753707 - DNA, 377 bp, Homo sapiens
gagccatagttttagagactgggatccttcctttaacccaaatacttaccaaatggccattattccccatcttaattaaccctataggccacccaatttaaagtggccatccagtcaatgttgcattatcctcagacaccaaacccctgacattgacccgagtcctaggcagagaccctggcacatcagctatgaatgtgtgccacttacatytcttatcagaaaagaacttgttgcttatctgtagagcatgcagagtgcctctaactgcagtgtctccaggatctggcctcagctggagagcttcaaaccacaaagtaggcctggcgaagtccagataatccaatagggatcttcagagcaaagattgttcttta

SEQ ID NO: 753708 - DNA, 441 bp, Homo sapiens
acaattcaaattgtagagatgagaaagacctattttcatagtgaactgccacattttctcatggtttattatttgactcagaattctcaggcagcaatttaaaaaacagtgtttatttttttaatctactttgatctctagtgatatcagcatagttatgataatyatcaaaatggttactaaaaatatatactgcagggagagtgtagtggacactgtggtgtgccacccacattcttcttcagggagaaggccctcctatccccagcccctagaagatttgttgttgacagctcacggctgtgtcactttcaggaaactgcccaaggattaagacatcatcaaccaaagttacagttccttcctgggaatagcccacattcagtgcctgattgttaatgacagaggtgtatacaagccaagacactgtgtacacagtgg

SEQ ID NO: 753709 - DNA, 586 bp, Homo sapiens
attaacaaggtttccttggagcattaacctactttttaatttaagaaaaaaataaaaggttataaaaaaggcttatcaaaactatgtctaatggtcaagatgattaaaatttaatagatttgttataaacaaagatttgagagacagatttaattggcctcctgctgtctttattaagacttgttgtttgagatattaagtctcctctctcatagaataaatgtttttttttccctttttaaagaaatcgttatcactttggctaaattatttgcttattttacaaggacctgtggttctattttgtgatatcaagtaacttttgatatttgacactttaaaatcatattcaaaatttttkatctcatttttttttatattaagtctccagaagttcagaagacacatattcagcttatttgctataataaaatcatgcaggaaggattgcaaaatatgaaatggtgtttaaccttctttggattataacatttatataaacgtgtgactagtatatgatccaaaattatatgagagttctgtgattctgatatgtatttgcatatgtcatcagtaataattatga

SEQ ID NO: 753710 - DNA, 522 bp, Homo sapiens
ctcctagcaacttgcaagaggctcagagggaaaacttgtaattgaatcttcttccagcatttttgaagatggatattcaatgactggttaacattagctttgaagagaggatctaggaggtggtaccgggagggacagggagggagaattttacttttcatcttacaacttatgcacttttagaatttttttctggccatgtggcaaaaatgttttacataaatatttttaaaacaagatggtcactttcagttatgttcatttggggcactgtacctatgctatgatatatacactatgaggwgcaaggaaattaataattggttttaaagatttaagtcagaaatgttagtgattttggcatgagagagaaatgtttttcccaagagtcaccagcccctccctcttccaacagatacttctaattacccctgacatttattccctctgggcccagagaacacctatgagtctttctctacccagcgtattagacagttcttaagaattaactggagttga

SEQ ID NO: 753711 - DNA, 349 bp, Homo sapiens
gaatgtggcttccaggctgtggctctgtcctggatatcggctcaggagacccttcctcctccccaactccctgggcctggattcctctgagggctgtgctgctgtcctggggttggagtctctctctctctgtctcctggaggtgccctgaggcgatgctttaaggttcctctgtcctagggcgattgttggsgtaggtttaatctctgctctctcttccagttctgccccctcaaggaagccctcctgaagaccctgcggctccaccagaccctcctcctctctgagtccctggatggatcccggggggtttccgaattctcccctgggtgagtcgaccccttccact

SEQ ID NO: 753712 - DNA, 644 bp, Homo sapiens
acgatgtaaaacagaagagatggggtgattttagtttcaagaacctgggtggggtagtggcgcctgtatgcctgtctagaggggtgggggcaggcacagggtttgggggctgcagccggcggggctgctgggactgaaggaggaccctgggcccagcctgcctccatgggctctggggccagggcagggagtggggatccggagccaagccgacccaggactcagccctgtgttacccttcgttgccttggaaggacatacaggcgcctccccttccacactggggcatgaggtaggtgggaaaggacccacagggcagccgagagctccaggtgtcccaggcgccctccsgccagtcccactgccggggccctctggccatgagaagggagggtggccgagagagcatggagtcctccccggcacggagctgcagaccccaggactgggcatgggtgaagcactcgcagctcactcccctctgtgagctccaggaggcctctgtaccccagagctgcgtgcaggccctgcagggaggaggcatcaggaggcgactgcattgctgctggtcctgggtggcctcagtcagcgcggcttggagagcaccccccaggcttttttgccgtcacggtggtgtagaccag

SEQ ID NO: 753713 - DNA, 716 bp, Homo sapiens
ttctagctggcaaagggcactcccagctgtgccagccacagtgtgtgcacaggtgtgagaaattgtagctgtgtgcacacacgtgagcatggcctgtgaccaggggccaccccagcatgcctgtgtgcctgcttctgcatgtacacatggctgtgtcctcaggcacccgtgtctgcacatgctcacatatgtctttgtctgtgcttttgctcaggtgctggaacgtggggccgaggcggggcagcttgtgggggcycctgggcctgtgtctgctccaccaccaccgtcagagctcttctgagtcgccgtggggattttgtggtgcctcctcctctgggctctgatccggctgccccagaacccaagctcagaggcctcgtccccaggcgggtcctgacctcggcaggccagcctcgcgttccctcagccccatcacaccagctgacaggctggcatttccctcccgcctggcgtttccccccgccggtcatgtcgacaagcaccatgggtttcctgacagacggaaatatcaatccttaggtacagggacaaagcaggttttaaactttaacgagaggctttaatggaaataaaacgtaaaattcctcttcaaatggaggtgcttctgttttatcagagaaaaagtaccctaaataataaatcgacgtcgtgtgtcgtggttctcgtacctgcgtgaatatttaaaacatgcaaac

SEQ ID NO: 753714 - DNA, 548 bp, Homo sapiens
cctggcacagatgtgacttggggcttcgctgaggattccctgccgtggctcctgtcagaagaaactggagtaggaaccatcaccaggagatgcctgaaatctgataacctggcctggccaaaagcttcatggccacagacaggctttccagtatttttaagatttagcaagtattttgttagaaaaatgtggtcacgcttttccataaatgaataaaagggttgagtcttccatggccttctagccacgggctcttggctcccatgggcagtgggtcagtgctggcttgggctgtggggaggcctggagggcccgtgtggtcaactcctcacagatcctggyggagcagggatggctgcctgtgtgcagggcccccactcccatccggtgtggactcaaagcttcctggtgaaccccaaccactcactcccagaggccccactgaaaggctgtggtctgcaccagagggagcctcgcaagcacggggagggggacacccagcgtaccaggcgttcccacctcacccaggacgaggagccgcccggatg

SEQ ID NO: 753715 - DNA, 602 bp, Homo sapiens
aagcaatatacctctctagaaagcagtttgttaatctcttataaaactcaacatgtaattaccatctgacatggcatttgcacatttggacatttgtcttagagaaattagaatttatgttcacacaaacacctgtacacaaatgttggtaacagctttatttatcacagctacaaactggaaacaagccaggtgcccttcagttgggttaaacagttaaacaaactagtatatctataccatgaaacactactcaataataaaaataaactattgactacactcatccacttgaaagaatctctagaaagttagtctgagtgaaaaaagccaatcacacggtttacatgctaaaaaaactccatttgataacattcttgaaaagaygaaattacagagattgagatcagattcgtggctatcagggttaaggacagggaaggagaaaacaaatgtgggtgggtttataaaagggcaagatgagggatctttgtagtgatgggactgttctgtatcttgactgtggtggtggatagaagaaactgtcaggtgataaacttgcacagaattaaatgtacacacattacacacaaattagtgta

SEQ ID NO: 753716 - DNA, 602 bp, Homo sapiens
aagcaatatacctctctagaaagcagtttgttaatctcttataaaactcaacatgtaattaccatctgacatggcatttgcacatttggacatttgtcttagagaaattagaatttatgttcacacaaacacctgtacacaaatgttggtaacagctttatttatcacagctacaaactggaaacaagccaggtgcccttcagttgggttaaacagttaaacaaactagtatatctataccatgaaacactactcaataataaaaataaactattgactacactcatccacttgaaagaatctctagaaagttagtctgagtgaaaaaagccaatcacacggtttacatgctaaaaaaactccatttgataacattcttgaaaagacgaaattacagagattgagatcagattcgtggctatcagggttaaggacagggaaggagaaaacaaatgtgggtrggtttataaaagggcaagatgagggatctttgtagtgatgggactgttctgtatcttgactgtggtggtggatagaagaaactgtcaggtgataaacttgcacagaattaaatgtacacacattacacacaaattagtgta

SEQ ID NO: 753717 - DNA, 724 bp, Homo sapiens
agagaccagggactacccactgttcctggccagtctttggagaatgcacagtaagggttttcctgtcctctgtttcaccttttgatgtccgagggcccaaacctttatcctcagataatgctggtgctaccacagattttgtacaggagtccagtgagggggctgtatttgtcagggttctctagaggaacaggactaataggatagatgtgtatatgaaagggagtttattacagggaattgactcacaccatcacaaggtgaagtcccacaatagacctttcgcaagctgaggagcaaggagacagagtcccaaaacctcaaaagtagggatgctgacaatgcagccttcaatctgtggctgaaggcccaagagcccctagcaaaccactggtgtaagtccaaaagtccaaagactgaagaatttggagtcctttgtttgaaggcaggaagcatccagcatgagagaaagatggaggtcagaagacttagccagtcttctaccttacttttaccttcttatgcctgcttttagtctggccgtgctgatagctgattagatggtgctcatccagattgaaggtgggyctgcctctctaacaacacctgactcaaatgttaatcttttttggtaacacccttacagaaacatacaggaataataccttgcatacttcaatctaatcaagttgacactcagtattaactatcacagggggataag

SEQ ID NO: 753718 - DNA, 613 bp, Homo sapiens
tttttggcaaatggaataggctttcaataaattgattttccttaaatcggactgcttccaagaaaaattatttaattagagaactttgcagaacattaggtttggtttggctgaatatgtagtatctgataggaaatattgctgtattatagagattggagctcatatcagtcaagaggctatcaacctctaagtgtctaacccactcacagcctcaccaccatgataagagctgattgatccaaagataactgtagacttaatgtaatttaattaacaataatagctaacatatattgagtatatgctatatgccaggtgctatactaaatgctgtacacagattttcttttcacttaactgtcataataacctgtgttggttattgtcatttggcctccttctaccccagattcattctctaccttgttctgttgcccacatgattgayttctccagatttcatccctttacctgacatttggtcgggttttattgatgagaaacactcataggagatgggagaatgaaagaagggttcagacatgtaagcttacctatgtgtatcctgctccctcctgacctcactatcaaaatttctggcagtggctga

SEQ ID NO: 753719 - DNA, 644 bp, Homo sapiens
tacaataaagcccagcaatcgtagttctgggtatatcttcaaaggcaatgtaatcagtatctcaaagaaatatccacactcccatgttcattgcagcattattcacaatagccaaaaaaatggaaacaatttatgtgtctgctgctgaatgagaggataaacagaatgtggtgtgtgtatacaatgaaatattattcagccttaaacaagaaagaaatccttccatttgcaagaatatgcataaacatggcaggcatttatgctaagtgaagtaagccagttggagaaaagctaacactgtatgatctcgcgtacatgtaaaatcttaaaatgtcaaactcaraaagcagaactgtggttgccaagggatagggagtggggaaaactgtgagatgttggtaaaagggtatagactttcagtgatgtgtagaatatattccatggatctaatgcatagtgactataattaataatactgtattgtatacttaagtactcttcctccattaaggagtacaatgtgattatttgatattggtatatattgtgaaatgaacacaacaatcaagttagcccatctatcacctcatgcagttacaattttattagtcaattacacctcaataaagctgtattggggaaaa

SEQ ID NO: 753720 - DNA, 608 bp, Homo sapiens
tgaaagtaaataaactgcaattacatgcggcaacatgggtggatttcaaaaacaatatgttgagcaaaagaagtcaggatacaaacatagtacataatacataattccattcacataaaattgaagaccaggaaacattatttaaatgtgctgaagtgagagtaatagttgcctttgtgtgtcttggtaacagggatggggagtgagggtgacttctgggatgaagatgatgctctactttttttcaaaattcataatcaattttaaatttatatgccaacaataagcgtctaaaaataaaaaatttaaaagatatyacaatagcatcaaaatattaatattgcttaattcaggcaatattaatatttcttgttacatgagtgtgatcctttttggaaatccattgtactgcacatccaagatatgtacccttttatttatgcatgctatacttcaataaaaaggaaaaaagatgaaaataacacacatacccgaaaaatcccatttatttaaaaaattactttcagtttcacaaatgttttattcattgctagaaatttattcattgcttgaaattatctgtgtaatttaggagaactcagaggaaa

SEQ ID NO: 753721 - DNA, 607 bp, Homo sapiens
ttccacttactgctgctgtggtttagattgtatttctgttacttagagttgtagagagtcctaagcaatagcatgtttcatcagggaaaaccctaccagatccagtaacccctaaaatcctaatggttcttatggaaaagtaaatcaaacacacaaattagaaatgcaatgtcttctctcacagtgtaagaagcacatttagtgattttcaaaagtcctcttagtttctgcagcaaatgtttaatggactttttaatctacttcttattgtaacatagccatatgtagctccagggtagactgcctcacacgtcaggtattatgttaccaacatcatgttacaggggaatactgtgtgacttcttttcttgtattagagagtctactcaaaatactggccttatgatgattccattgtgaatccatggcatcayattgctattctgatctagtggtgtaataacagggtaaaatagtgccacatagaaagggtaagctccaagcatggagtgtgtggtagccaatatgacactacactaaacttggaaaaactattggatttaggcctgtgtgagttgctaaagaaagagacaaatattctgaatat

SEQ ID NO: 753722 - DNA, 582 bp, Homo sapiens
tattcatgaaacgtatctcaaaataataagagctatttttgacaaacccacagccaatatcatactgaatgggcaaaaactggaagcatttcctttgaaaactggcacacgacaaggatgccctctctcactgtgactcctattcaacatagtttggaagttctggccagggcaatcaggcaagagaaagaaataaagggtattcagttaggaaaagaggagatcaaattgtycctgtttgcagatgacatgactgtatgtttaaaaaaccccatcgtctcggcccaaaatctccttaagctgataagcaacttcagcaaagtctcaggatacaaaatcaatgtgcaaaaatcacaagcatttctatacatcaataacagacatacagagaggcaaatcataagtgacctcccattcacgattgctacaaagtgaataaaatacctaggaatccaacttacaatggatgtgaaggacctcttcaagaactacaaactgctgctcaatgaattaaatgaggacacaaacaaatgtgagaacattccatgctcatggataggaagagtcaatatggtgaaaatg

SEQ ID NO: 753723 - DNA, 582 bp, Homo sapiens
tattcatgaaacgtatctcaaaataataagagctatttttgacaaacccacagccaatatcatactgaatgggcaaaaactggaagcatttcctttgaaaactggcacacgacaaggatgccctctctcactgtgactcctattcaacatagtttggaagttctggccagggcaatcaggcaagagaaagaaataaagggtattcagttaggaaaagaggagatcaaattgtccctgtttgcagatgacatgactgtatrtttaaaaaaccccatcgtctcggcccaaaatctccttaagctgataagcaacttcagcaaagtctcaggatacaaaatcaatgtgcaaaaatcacaagcatttctatacatcaataacagacatacagagaggcaaatcataagtgacctcccattcacgattgctacaaagtgaataaaatacctaggaatccaacttacaatggatgtgaaggacctcttcaagaactacaaactgctgctcaatgaattaaatgaggacacaaacaaatgtgagaacattccatgctcatggataggaagagtcaatatggtgaaaatg

SEQ ID NO: 753724 - DNA, 582 bp, Homo sapiens
tattcatgaaacgtatctcaaaataataagagctatttttgacaaacccacagccaatatcatactgaatgggcaaaaactggaagcatttcctttgaaaactggcacacgacaaggatgccctctctcactgtgactcctattcaacatagtttggaagttctggccagggcaatcaggcaagagaaagaaataaagggtattcagttaggaaaagaggagatcaaattgtccctgtttgcagatgacatgactgtatgtttaaaaaaccccatcgtctcggcccaaaatctccttaagctgataagcaacttcagcaaagtctcaggatacaaaatcaatgtgcaaaaatcacaagcatttctatacatcaataacagacatacagagagscaaatcataagtgacctcccattcacgattgctacaaagtgaataaaatacctaggaatccaacttacaatggatgtgaaggacctcttcaagaactacaaactgctgctcaatgaattaaatgaggacacaaacaaatgtgagaacattccatgctcatggataggaagagtcaatatggtgaaaatg

SEQ ID NO: 753725 - DNA, 496 bp, Homo sapiens
aggacttcatgactaaaacaccaaaagcaatggcaacaaaagccaaaatagacaaatgggatctaattaaactaaagagcttctgcacagcaaaagaaactaccatcagagttaacaggcaacctacagaatgggagaaaatttttgcaacctacccatctgacaaagggctaatatccagaatctacaaagaactcaaatttacaagaagaaawcaaacaccccatcaaaaagtgggcaaaggatatgaacagacacttctcaaaagaagacatttatacagccaagagacacatgaaaaaatgctcatcatcactggtcatcagaggcaaatcaaaaccacaatgagataccatctcatgccagttagaatggtgatcattaaaaagtcaggaaacaacagatgctaaagaacatgtggagaaataggaacacttttacactgttagtgggagtgtaaattagttcaaccattgtagaagacagtgtggtgatt

SEQ ID NO: 753726 - DNA, 522 bp, Homo sapiens
cctcatttatacttttaagaggcaacccacagctatataaacccaagaggaatcatagaagggtgagcagctgccaaacaaaccctccccagaaggaagtcgacattatttgttttccagtgttttggtcttgaactatctggattgccttaccgtggtcctgatagaacaaatgcccttgcatgtagattaaggacttatttctgtttattgaaaattccaaccccttwtggctttgttctaatccttgatttccaaactggaagcttctcttgacattttagctttagtcagtttgtcctatttggctttacagatgctatatggtcaatcatttctatctactacaacaacaacctaattctaggagatcattatgggaagactgtggatctgaactattgggtccccttagtctcttattcgatccggatttagggatataattactccaagaaagtcacattgtaccactatctggccaccatttggggatcatggcaatccccaactgtggtggaa

SEQ ID NO: 753727 - DNA, 522 bp, Homo sapiens
cctcatttatacttttaagaggcaacccacagctatataaacccaagaggaatcatagaagggtgagcagctgccaaacaaaccctccccagaaggaagtcgacattatttgttttccagtgttttggtcttgaactatctggattgccttaccgtggtcctgatagaacaaatgcccttgcatgtagattaaggacttatttctgtttattgaaaattccaaccccttakggctttgttctaatccttgatttccaaactggaagcttctcttgacattttagctttagtcagtttgtcctatttggctttacagatgctatatggtcaatcatttctatctactacaacaacaacctaattctaggagatcattatgggaagactgtggatctgaactattgggtccccttagtctcttattcgatccggatttagggatataattactccaagaaagtcacattgtaccactatctggccaccatttggggatcatggcaatccccaactgtggtggaa

SEQ ID NO: 753728 - DNA, 628 bp, Homo sapiens
ttttttcttgcaccagaaactgttcttatcaatttacatatattaaccagttcaaacttcacaagtctaatcggataggttttattattataattgtcctcactttaaaggtgacacatgtacatgggcaaagagaagtaaagtcagttgttcatattttcttctctagtaaatattggagctggaactggaacccagaccgtctatttcctgagcctagacatttattgactacacaacacagcaaaatgtaattgttgctccaccattttacccatgtgccctttttgcaatactaagtagattcgcacaatatgttataagtgaaatataaaattacataatgcagattgtgtctccctctcaatacttttttgcaacaaaatgatcaatattaggggcagtagggatatgtgagtctacattataataggactattaarcaggaaaattataaaattgataaaaataagcattgtgattttaataaagtttttaaaaaaataatgggaattatgaaactaaccaaacaccggagtacagaaagttcgagacaataaaaatataggaactaaaaaataaatattaaaatacaaagaattaaatgtgtcatgtacatgttttagct

SEQ ID NO: 753729 - DNA, 627 bp, Homo sapiens
cggagcttgtagcgagccgagatcgtgccactgtactgcagcctgggcgacagagcaagatgccgtctcaaaaaaaaaaaaaaaaaccaaacaaaaaaaaagttgttcgatgcttaattaggtaaaccattttggatattaagatatggcatgaaaatttacaaacatttaacttttacagaaaaatgtcatttttatgtcatttatatgtgggcacattgctgacaatatgccttrgtcgaaaaaatactggtttatcttagaaaactgccattcaagaacctgttaatcttgggtaaatatcttttatgatccattttctcacaacagaagaatgaattcctgttacgtttcagattattgtaaagatcaggtgaactgatacagatgaaagtagtattaatatgaagattgctgtaaggtttatttaagatatgatagaggcatgtccgttttgtttcacaggttgactgaaatagtagccagcgcacctaagggtgaactactgaagagggtgcttaacccattacttcgtgagtattcctgcaaatagcagtgaaatgtttgcaaggcagtgtggttttcaggaatatattgaaatcttttatggttttattagaaaatttg

SEQ ID NO: 753730 - DNA, 668 bp, Homo sapiens
catcaaaataaaaaacttcagtgtatcaaaggtcactgtgaagggaatgaaaagatggcctacagaatgggagaaaatacctgcaaatcacacatctgataagggactactatccagaatatgttaaaagcccctacaactcaacaacaacaaaccaaacaacctaatgttaaaataggcaaagtaattcaatagacagttctccaaagaagatacacagatggccaataggcacaggaaaagatgtttaaaatcattaatcattagggaaatacaaatcaaaatcacaatgagataccacttcacatctatgaggatggctggtaataaaaacaaaaacagaaaacaacaaatgtcggtgaggatgtggckaacttgggacactcgcatattgctggagggagtgtaaaatggtgcggccactgtggaaaacagcctgattgttccttggtggtaatacagaatttccatatgatccagcatattccactcctaggtatatactcaaagtaatagaaaataggaactcaaacagatgcgtgtacaacaaccttcatagcagcaccgttcataatagccaaaaggtagaaacaacagaaccgtccaccagcagatgaacagataaacaaaatgtggcaaatgcatgcaatggagaaggattcagccac

SEQ ID NO: 753731 - DNA, 605 bp, Homo sapiens
atgaatttcgaaaaagttagagctagaattatagattggggaatatcaacagattaatagagtgtggctttaaagggcatagtttaaaaatctgtttatggaaagctaatttgtttaaatggctgagtatacatcayggagttccgcaacctgaagcaacggcacatggagatttattactagcattaaatgaggagggttgatgttatatcctgagggcagtgtgttaatatgcatatttataagaacaagcagttcttgctctatattttaccacttaagcacacctctgattgctacagtaatttaaccttcacctaatttcactaaattacttgtaaacatcagctagcaaaagttaattgaaggaaatgtaattggatattttgaatatagccctactacacaattaagcaattctttgtgactgatagttttaatgagacatcagatcaaagtaaacgcttagaaaatatatattgctgcctttcattatttggggttcaaatgaagcaaatccttctgggaaaataactttatgttttctagttttcaagcccataaatatttatcgaacacctgggaggaagagaagcatcattcat

SEQ ID NO: 753732 - DNA, 605 bp, Homo sapiens
atgaatttcgaaaaagttagagctagaattatagattggggaatatcaacagattaatagagtgtggctttaaagggcatagtttaaaaatctgtttatggaaagctaatttgtttaaatggctgagtatacatcacggagttccgcaacctgaagcaacggcacatggagatttattactagcattaaatgaggagggttgatgttatatcctgagggcagtgtgttaatatgcatatttataagaacaagcagttcttgctctatattttaccacttaagcacacctctgattgctacagtaatttaaccttsacctaatttcactaaattacttgtaaacatcagctagcaaaagttaattgaaggaaatgtaattggatattttgaatatagccctactacacaattaagcaattctttgtgactgatagttttaatgagacatcagatcaaagtaaacgcttagaaaatatatattgctgcctttcattatttggggttcaaatgaagcaaatccttctgggaaaataactttatgttttctagttttcaagcccataaatatttatcgaacacctgggaggaagagaagcatcattcat

SEQ ID NO: 753733 - DNA, 603 bp, Homo sapiens
tttggcatatggaaatgcctgcaaacatatttgtgatagttgtcaacctggcaactgtttgcagatgtgtatattttaaaaaatttaaccattaaaaaacaaatagcagactgggcatggtggctcatgcctgtaatcccagcactttgggaagccaaggtgcgtgatycgcctgaggtctggagttcgagaccagcctggccaacatggacaaaccccgtctctactaaaaatacaaaaattagcctagtgaggtggtacacacctgtattcccagctacttgggaggctgagttaggagaattgcttgaacccaggagaggaaggttgcagtgagccgagatcaccactgcattccaccgtgggtgatagagtgagactctgtctcaaaaaaaaaaaaaaaaaaaaaaaaagagggagagagaaagaaaaaaggtatgtgtgtgtgtgtttgtggtgtgtgtgtgtatatgtgtgtgtcaatgtgtttatggtaacacccccttggtcattgtgaattaagcttctactgtttctgttacaaattttaagagttcttgagatatggccgggtgcggagatacaattcccataccatccaca

SEQ ID NO: 753734 - DNA, 666 bp, Homo sapiens
tatagggtggcttttttggagatttctttattatggttatatatatatataacacaatttaccattttgttataagtgtacaatttattgacattaagtacattcccaatggtgtgctaccatcactactatctattttcacaatttttaaattattaaacagaagttctgtacccattaaagaataactctcacataamccctagtccccagtaacttatatactacttcctgcctatgaattttcccttttaccttatagtctaccttatataagtagaatcatacaatatttggcctttgcatctggcttattttagttagaataatatattcaagtttcattcatgttgtagcatgtatcagaatcttcattttttatgcctgaatactagtatatatgatacattttatttatccttctatctgttgttgcatatttaggttttttctaccttttgactattgtgcataatgctgttctgaatcttggtatataagaatgtgtttgagtccctgctttcaattatttatgacatataaccaaaagtggaattagtggatcatatgataattatatgtttaactcctggaaaaactgccaagctgttttccacagaagctttatcatttttcattaacactagcaatgcataagtgttccag

SEQ ID NO: 753735 - DNA, 647 bp, Homo sapiens
ataatacttaggtaatagattttctttttaaaaaatagagtcatggatccattggatttggttaaattaacaattagaccttcttaatacaaagcactgtctcttatctcaggttaatgtttctaatactttttgctacccttaacgaaaaaaatagaaaataagaaaataaaaaaaataacacaacttacccagagttgcacaacttacggaaatacttgttaaaaatgaaattcatgccatatatattttgttttttgcttgtttcatttaagcaaacattaagattatattgtaaagtatttgtgggcatctgtctgtaaatatttacagaagaaacataccagttatattctcactctatagctataataatcaatctataagatataaacattaatgagctaagcaaaagtaaaatgtttccaaactaaaatgagggacactgtcataaatcagtaaataaaagcttcatgctagtgaagaaatcatatcttcttggtaacatggataccctgggatgtaaccagcagagagatgatamatacctctcgactaatgtgccaggcatggtttaagcccttcaaatatgcaacaccacaaaatcatcacataagtcttataggccgggtgcagtggctcacgcc

SEQ ID NO: 753736 - DNA, 536 bp, Homo sapiens
atgagctaagcaaaagtaaaatgtttccaaactaaaatgagggacactgtcataaatcagtaaataaaagcttcatgctagtgaagaaatcatatcttcttggtaacatggataccctgggatgtaaccagcagagagatgataaatacctctcgactaatgtgccaggcatggtttaagcccttcaaatatgcaacaccacaaaatcatcacataagtcttataggccgggtgcagtggctcacgcctttaatcttagcactttgggagacttaggcgtgtggatcacctgaggtcaggagttggagaccagcctggccaacatggtgagacccccatctctactaaaaatayaaaaattagctgggcatagtggtgggtgcctgtaatcccagctactcgggaggctgaggcaggagaattgtctgaacctgggaggtggaggttgcagtgagccgagatggtgccatggcactccagcctgggcaataagactgaaactctgtttcaaaaaaaaaaaagtcttatgaaggaca

SEQ ID NO: 753737 - DNA, 673 bp, Homo sapiens
tgtaaaacaatttgcccgcgcagctgcctcaaactccaagcccactaatcagctaaggattgtatgagggcctcagaagaacactagctcttgttcaggtatgggcgcttttcaaaatgcaggagcagcgtaacattcagagtttctttaagacaattatattctgctgctaattaaagtgtagtgttgttgaattttctctcattgctccacaggtataaggcatgtgccaagaatgaatgaacactaaaacataattgttctgaatttcatttttgtctttgaaacattttatagtacatatatagtttttactttttattcacgtatttattgaataatcattgaatatctattatgaactatgtatgataatrgaataaacagacagttcctgtactcaaatagtttgtgattttggtaatgaggaaaaagcccatactcttcagaatcattagagagtggtaaatgatactgcataactatttattttgttcaattaatatttaatgacttccgtttagttttcatgtccaactgatgaactgttgctacattgtcatagttttggaatccatattgatttcaagatagtttctatattttaggttctcttcatctaacatttacattatttcaaagtcctttttgatatcttccttctattgattcc

SEQ ID NO: 753738 - DNA, 621 bp, Homo sapiens
aaactttatatgtatcaaaattattgttttttaaatacatggggcatataaaaaacatagacttacaacatgaacaattttatttcattggattatatgactgtgactatacttaagatttgttttaatgctgaatatgaattaactctgatttttcaattattcttataaatcacagtgcatagttcataataggaactgtagaaattacagctattgctattacaagtgatataaatgtgaagctaatgagaggaagcttagtagaatggggtatgagcataaacagaaagagacagtatgaaaccaaaattctgtttaacagtccttcagcattaattctattggaragtaagaatggaaaataaattgtcattttaaatgttatctatttaatatagttttattcaggtactgttttttcaaaactgctttgtttttcctgcaattaaaataatcagacctctgaactttctttgaattaagtaagaataaatagcatgttcaaggtaatacatatagctaaaggattgtttagatgttggcatattatcaaacattccagagctcagtttggccctggtcccaggaatcctgctgcttgcaatagaagaggcagcc

SEQ ID NO: 753739 - DNA, 621 bp, Homo sapiens
aaactttatatgtatcaaaattattgttttttaaatacatggggcatataaaaaacatagacttacaacatgaacaattttatttcattggattatatgactgtgactatacttaagatttgttttaatgctgaatatgaattaactctgatttttcaattattcttataaatcacagtgcatagttcataataggaactgtagaaattacagctattgctattacaagtgatataaatgtgaagctaatgagaggaagcttagtagaatggggtatgagcataaacagaaagagacagtatgaaaccaaaattctgtttaacagtccttcagcattaattctattggagagtaagaatggaaaataaattgtcattttaaatgttatctatttaatatagttttattcaggtactgttttttcaaaactsctttgtttttcctgcaattaaaataatcagacctctgaactttctttgaattaagtaagaataaatagcatgttcaaggtaatacatatagctaaaggattgtttagatgttggcatattatcaaacattccagagctcagtttggccctggtcccaggaatcctgctgcttgcaatagaagaggcagcc

SEQ ID NO: 753740 - DNA, 625 bp, Homo sapiens
ctaacaggttagttcaggacacaaaaatgtgtctctgacatgacccctgaggctatatttttggtgtgtttatttaagtaaagcaaagtgtgttcatttcctattgctactgtaacaaattgtcataaatttattaacttaacaaattatcttactmttctggagatctgaagtccaaattatgtctcattgatctaacctcaaggtttggcatagctgactgtgtagaggctctaaggggagcatatgcgtcctcgccctttttggcttctagaggccacctgcaaccttagctcatttaatcatttcagtatcttgcttccgtcattacatctactgctaccttctgatctcctctctctcaataagggcctttagactacacccagcccatcagttaacacagaatatcttctcatctcaggatctttaatccaattatatcacaggttgcaaggattaggatatggatatctttgaggggatattatccagcctaccacactaaccaatgataaaatgtgatagcagcattaaaaaaaaaacacaaaaacaaaagctatccttgtaatcacatttttatattttttgtcagatggatttgcgtttgaatgtaagtattccc

SEQ ID NO: 753741 - DNA, 634 bp, Homo sapiens
agggattgctagatcatatatatggttgatctatttttagtattttcaggaacagtatttcctgttgctataccaatttacatttccatcaacagtgtaggagggttcctctttctctgcaaccttgccagtatctgatattgtctgtctttttgataacagccactctaacccaggtgagatgatatctcaytgtggttttgatttgcatttccctgatgactaataatgttgaacattttttcatataccttttggccatctgtataccttgttttgagaaatgtctattcagatatttcgtccatttttgaaagattatttggggtatttttgttgaattgtttgagtttcttatatattctggttattaatcccttctcaaatggatagctcgcaaattatttttttccattctgtgggttatatcttcactttgttgatttgttttgctatgcagaaggtttttaacttaatgtagttccatttgggaatttttgttttctttgatatttgaaatctcactcaaaaaaatctttgctcagaccagtatcctgagtctttccccagtgtttttctctagtagttttgtagtttgagggcttcattaaaacatttaatcaagtttgatttg

SEQ ID NO: 753742 - DNA, 504 bp, Homo sapiens
acccacttcttatatgctcaaatttctaagacacgacaaaaccgctttttctctacccataccccaatcattttctgactcctttggaagggatatgggtcaatttcagaatgaaatatgaaagtctaagaggagctcaaaattttggctaaactgactttgttatgaaagtacactaaattaatatacaactgaaccatattaaataagttactgttttttactaaaaagatatgcaattagtgattaatattaattatcttattaattacttagtaacttattaatattgattaatattaatattgactaatattaactaataagttactttttttactaaatggatatrcaattagtgattaactctgttatggtttattttgagtttttaatgtattttaaaaaatgattagtagagaaaaccttttttctaaaagaatacagatgctaggtctttatggaaaatagtacagtgttgcagcattaaattaaaaagtgaat

SEQ ID NO: 753743 - DNA, 583 bp, Homo sapiens
aacgagtaaaacctgtggctcaataacatcagagtttccattaaaaaaaattgtttttgagatggggtctcactctatcgctcaggctgaagtgcagatctcagctcactgcagtcttgacctcccaggctaaagtcatcctcccacctcagcttcctgagtaacacaggcacataccaccacacccagctaatttttgtattttttataaaaacggggtttcaccatgttgcccaggctgatcttgaactcctcgactcaaatgatccacccacctcagcctctgaaggtaccgggaacacagtcatgagccaccgtgccaggcctcgaagttttcatttctttytggcttggaaactacattatcttattctaaggttgtttgccctcacagtactagatggctaccatctgtaatctcaggaaataagccctcatttacaactagccaagaaaagaagaccaggttcatagttcatttaaaaaagttccatttttcattggtcagaaaaaatgtcttcaactaggtccatgagggtctgtcattccagagagtcactcaaaatttatatgccacctgtta

SEQ ID NO: 753744 - DNA, 300 bp, Homo sapiens
cttaaacaaatttacaagaaaaaaacaaccccatcaaaaagtgggcaaaggtatgttggctgcataaatgtcttcttttgaacaaacgtgtgagaaaaagctcatcatcactagtcattagagaaatgcaaatcaaaaccacratgggataccatctcaagccagttagaatgaatggtgatcattaaaaagtcagaatttttaaaaataagtaagaccacatacatgaagggagaatcacagaaaaaatgtactgcgaagctgagactttgcaacaaaggctaaatgagttcccaatat

SEQ ID NO: 753745 - DNA, 409 bp, Homo sapiens
acaaagcttagtgggaaaactgacttcacaagattaggatccggtacactagccaggctggaagagaggtgatcacctcatcaacatataaaaatgaaatcaataacaagaatagtacatttgtaagccagctggaaaaaatgtaagacctataaaggagtactgatagctattagaagtttcatattttaaatgttttgagttgtcacatgattagaaaatataatggggggatgtcatgagctaaacagygcaaaattgcacagatgatacccatcaacagcacttataatatggtgacaaattaatttatatgacaagagtggttgggcattacaggaatctagttgggctagactgcaatgaacaaggggggctgaataggagcctcgtgaattagatccatgag

SEQ ID NO: 753746 - DNA, 522 bp, Homo sapiens
aggttgtagtgagccaagatcgtgccactgcactccagcctgggtgacagagtgagactctgtctcaaaaaaaaaaaaaaaggaaagtgacctgaactggcccttccttcacaggagtctggaagaacaaattgaaagctgccccacctgactggctaccagaaaaacacatcagaccacagaggaaacaccaccagatctactctagtttgcaaaatgggcraaggacttagcattggtgcccccctcacctcccaatctgtgaaatgggtcacacgggtgcagctacctcctgggatttcagggaggcccaggcagcagcttgggagcactggccgggacacagggccggcacgcacaaaccctccattcgtctttcctattcatcaccctgaagagcttcccggatctagaataaggactccccgggcccaaggtcacaccaggccttctcctgcctccaagcaggggtgccccagatggctccagaggccaggctccaaatgggcggcaaccgggtct

SEQ ID NO: 753747 - DNA, 553 bp, Homo sapiens
cggcgtgggcggatcacttgaggtcagcagttcaagaccagccttggcaacatggtgaaaccctgcctctactaaaaatacaaaaattagcccggcatggtggcatgcacctgcagtcccagttgctcgggaggctgaggcagaagaatcgcttgaacccaggaagcagaggttgcagtgagctgagattgcaccactgcactccagcctgaacaacagagcaagrctccatctcaaaaaaacaaaacaaaacaaaaaacagcgtagaagcctggtgcctgaaccagtgtgggtgaggggcaagtagtaagagataaggaaagagaagtgacggggaggtcacgtggggtctcgtgggccataaggaggtctctggctttcccctgagtgagaggatcaggagggctttgagcaggtgagagacgtgatctgactcaggtgttcacaggacccctctggttacatgtgagggacagactgcagggggtgaggagggggacaggatgggagcgggaagaccagggagggacctgctgagacagcccaggaagga

SEQ ID NO: 753748 - DNA, 460 bp, Homo sapiens
ctggccatgatgggctctaaaggatctgggggtggtgtgggaggattggggtcactaggagcaaaatagaaggctaaggatggagtagggaggcgaggtcccgggggcaggcgggaatgcttggaatctcgggagtaggtaggagaactggggtttctaacagcaggatggaaagctggggatggggctgcggaatgcaacctcctacacagcctccaccccrctcccagacccccagcactgagagtgagctctggttaggagcaaggctctggaatcaggccctcctgggttcaaatcctggctccatcccatcctagctgtgcagctgaatcactcagctgctcggtttcctcatctgtgatatggggatgacaatgctcacagccaccacttcatagcaatgtcgtgaggcttccgtgaattaatctatgtcaagcggttggcacactgtgagtga

SEQ ID NO: 753749 - DNA, 672 bp, Homo sapiens
tgatcatcctctgttccccatcctcccagcccttcctgctgtacctgtggggagctgatctcctcagtccccctgcttttccccggtctgccatcaccaccccaccaccatgcacccccttcctggctactggtcctgttactgtctactcctgctattctccttgggagtccaggggtccctgggrgctcccagcgctgccccagagcaagtccatctgtcttacccaggtaagtgtccctgactcatttctatgcctctaccagagaggcccagcggtgcttcgttgtttgagggctcaggaatcccacactgtgagcccctaggcgggtggctcattcctcctgagcctccatcatccacctctgtggaataggaagtacaggctgtggaacacctggaagtgtggggaatgatcatggtgctcagcccacagagagtgctcccctgctctcaaaaggggaccgctgctgtccttgttcattgcatctctgttgtgtttccgggacctggcacgtttgttcgttcatgcacggtaggcctcagagccagttgtggaaggaaccagtggatgaatgataacagagctgggttacccagccccttctccatccctcttctcctcttccccacgaggctgactgcctccggatctttgattaggatccttcc

SEQ ID NO: 753750 - DNA, 623 bp, Homo sapiens
tctggttataaatcctttgtcagatgggtagtttgcaaatattttctcccattctgtgggttgtctattcactctgttgatcatatcctttactgtgaagaagcttttgtccatgtttgacttggttgcctgtgcttgtggggtattgctsaagaagactttgcccagaccaatgtcctagagatcttattcaatgtgttcttgtagtagcttcatagtttgagatctgagatttaagtatttaatccattttgatttgatttttgtatatggcaggagataggggtctagttttattttttgtcatatgggtatccagttttcccagcaccatttatcaaaaagattgtctttccctcagtgtatgctcttggtaactttgtcaaaaatgacttcaatgatgggtgggtggatgtgtgcctgggttctgtattctgttccatttgtctgcatgtctgtttttatgccagtaccatgctatttgggttactatagttatgtagtataatttgagtcatatagttatgtagtataatttgagtcagataatgtgattcctccgattctgttcatttttctttggatagctttggttattctgggtcttttgttattccatataa

SEQ ID NO: 753751 - DNA, 594 bp, Homo sapiens
ttaataatcaagtggataggacgacctgttctgtggacatcactcagcctctttccccagccacccctgtcatcgcccaatgggcccatgaacaaagtggctgtggtggcaaggatggaggttatgcatgggctcagtgayatggacctccactcaccacggtcgacctggctatggccactgctgagtgcccaattttgccagcagcagagaccaacactcagcattcaaactggcaccatttcttggggtgatcagccagctacctggtggcaggttgattatactggacttcatttattaggaatgggcagaggtttttcctcactggaatagatactgactccgaatacaggtttacctatcctgcacacaatgcttctgtcaatacaatacatggactcatggaatcccttatccaccatcacggtaatccacacagcactgcctctaaccaatgcactcactttacggctaaagacgtgaggcagtgggctcatgctcatggaattcccatgttccctatcatcccgaagcagctggattgatagaacagtggaatagccttttgaaatcacaattacatgtcaacta

SEQ ID NO: 753752 - DNA, 630 bp, Homo sapiens
gttgattatactggacttcatttattaggaatgggcagaggtttttcctcactggaatagatactgactccgaatacaggtttacctatcctgcacacaatgcttctgtcaatacaatacatggactcatggaatcccttatccaccatcacggtaatccacacagcactgcctctaaccaatgcactcactttacggctaaagacgtgaggcagtgggctcatgctcatggaattcccatgttccctatcatcccgaagcagctggattgatagaacagtggaatagccttttgaaatcacaattacatgtcaactaggtgacaatactttgcagagctggggcatagttcyccagaaggccgtgtatgctttcaatcagcatccaatatatggtactctttcttgcataggcaggattcatgtgtctagaaatcaagtggtggaagtggaagtggcactactcactatcacccctagtgatccactagcaaaatttttgcttcctgttcccacaacattatgttctgcttgcccagaggtctttgttccagatggaggaacattgccaccaggagacacaacgattccattaaactggaagttaagattgccacctggacagtttggg

SEQ ID NO: 753753 - DNA, 630 bp, Homo sapiens
gttgattatactggacttcatttattaggaatgggcagaggtttttcctcactggaatagatactgactccgaatacaggtttacctatcctgcacacaatgcttctgtcaatacaatacatggactcatggaatcccttatccaccatcacggtaatccacacagcactgcctctaaccaatgcactcactttacggctaaagacgtgaggcagtgggctcatgctcatggaattcccatgttccctatcatcccgaagcagctggattgatagaacagtggaatagccttttgaaatcacaattacatgtcaactaggtgacaatactttgcagagctggggcatagttctccagaaggccrtgtatgctttcaatcagcatccaatatatggtactctttcttgcataggcaggattcatgtgtctagaaatcaagtggtggaagtggaagtggcactactcactatcacccctagtgatccactagcaaaatttttgcttcctgttcccacaacattatgttctgcttgcccagaggtctttgttccagatggaggaacattgccaccaggagacacaacgattccattaaactggaagttaagattgccacctggacagtttggg

SEQ ID NO: 753754 - DNA, 589 bp, Homo sapiens
aggtcccggagttcaaaaaagcagcatccttaccatcatttttaaggtgagaagagtttggtatgaaaaaataaagaagtctcagaaggacttgggagtgaggggatgtccaatgggtcaggagtcctactgtgagaggagtataaacatattggagccccaaactagatgaatagggaacattgtaggccacaagtttaagggtgctggcgatggaattacagtgtcgaagtgacaagactgacaagtattagtggaatctcttttgagaggagacagggattcttcaatgtgagaagacagggacaaggggagattttactgtgagaaaagcagggaccctattgtaacaagacaggatataawatgaaaacgccattgtgagttgatgagagcattgcaaggccaataataataagaatggggaacggggggaattaaagtggaaagtgggaataatataagggagagacttggggtttgtgtcgggaaatattgtagaattctgagtttgaatgcacaagctatactgtgagaaccattttgcaaataaggaggatatagagtgctccttagtgtgacaggacag

SEQ ID NO: 753755 - DNA, 595 bp, Homo sapiens
gcctgtggttggaggtaaaggaatacagttgatgtaaaactgtccttcctaccttcttcaatgcatcttttcttatttctgtgctacacccaggtgctgtaatctctcatctagtttccttagcttttgtgaagatatttttgcatgaggatagttgttcaaattgatgtttcagtggggggaagagcactggagagtcctattttatcattttactgacgtcagtccttgtataaatttttaaaagaaaaaaatacattgtaagtaaatactgtgactgggaaagagctttctatgggtggcatgaattgccccagcaaaacccaagacagacacgggctgtctcttatactggctcccagctaatgagaataacaggtccaggccacctgaaaacagaaagattcttccacataccctaarccattcccaatttaaagttacaatattataacccaaagacgtcacttggaacttaagtgattctcttttaagctctccccatggatttaaaataaaagcacaacaatatgttttggagatatttatttcttttcattccatttcccccaagagctgtatattgtcttcagca

SEQ ID NO: 753756 - DNA, 555 bp, Homo sapiens
atctactattcaattcagcagtcccactattgggtatctatgcaaatgggaagaagtcattatatcaaaagacatctgtatgcatatgtttatcacagcacaaatcacaattgcaaagacatggaatcaacctaagtacccatcaaccaatgagtggataaagaaaatgtggtatatatgtatatacctatacaccatgraattctattcagccataacaaagaatgaaataatatctttagcagcaacttggatggaactgaaggccattattctaagtgaaataactcagaaaccaaaaatgaaaattacatgttctcacttacaaatggttgctaagctgtggtacacaaaggcatacagagtggtgtaaaggacaatggagactcagaagagaggatagtagaagggaagatgagggatgaaaaactatctgctgggtagaaagtacactactcagatgatgggtgcactaaaatcctagactttgccactataaaattcatctgtgtaaccaaaaaccacttgtacccctaaagctattaaaatttttaa

SEQ ID NO: 753757 - DNA, 555 bp, Homo sapiens
atctactattcaattcagcagtcccactattgggtatctatgcaaatgggaagaagtcattatatcaaaagacatctgtatgcatatgtttatcacagcacaaatcacaattgcaaagacatggaatcaacctaagtacccatcaaccaatgagtggataaagaaaatgtggtatatatgtatatacctatacaccatggaattctattcagccataacaaagaatgaaataatatctttagcagcaacttggatggaactgaaggccattattctaagtgaaataactcagaaaccaaaaatgaawattacatgttctcacttacaaatggttgctaagctgtggtacacaaaggcatacagagtggtgtaaaggacaatggagactcagaagagaggatagtagaagggaagatgagggatgaaaaactatctgctgggtagaaagtacactactcagatgatgggtgcactaaaatcctagactttgccactataaaattcatctgtgtaaccaaaaaccacttgtacccctaaagctattaaaatttttaa

SEQ ID NO: 753758 - DNA, 555 bp, Homo sapiens
atctactattcaattcagcagtcccactattgggtatctatgcaaatgggaagaagtcattatatcaaaagacatctgtatgcatatgtttatcacagcacaaatcacaattgcaaagacatggaatcaacctaagtacccatcaaccaatgagtggataaagaaaatgtggtatatatgtatatacctatacaccatggaattctattcagccataacaaagaatgaaataatatctttagcagcaacttggatggaactgaaggccattattctaagtgaaataactcagaaaccaaaaatgaaaattacatgytctcacttacaaatggttgctaagctgtggtacacaaaggcatacagagtggtgtaaaggacaatggagactcagaagagaggatagtagaagggaagatgagggatgaaaaactatctgctgggtagaaagtacactactcagatgatgggtgcactaaaatcctagactttgccactataaaattcatctgtgtaaccaaaaaccacttgtacccctaaagctattaaaatttttaa

SEQ ID NO: 753759 - DNA, 575 bp, Homo sapiens
attgagaattaacagatggagtgaaagttctcagccttcctctgatatctgcctaagagtaggacacagatttacctttgtaaagatagtataaacttttctcccctctcctagatgtaccaagatgagaacaaaccttatcactggagacagagagccagtggcaccaacatgagtctgtgtaaatgaaactaaataaaataacatttatctttcattaaatcctcstgtatatatcctattactttcccataatttatcagccctagatgccctaattctctttcttgtattttgtcaattctcgacaatttattgctctttgttaaaatggtacatatgcccctaagtttaacagcttctttgagccttcgacttcttttctgtgaagccactgtgcttgtaatattaaaaattataatgacaaggcacaatggctcatgcctgtaaacccggcactttgggaggacgaggagggaggatcacttgagcccagaaatttgagacagcctgggcaacataatgagaccctgtccttatacctacaaaaaataaaaataagtaactgagcaaag

SEQ ID NO: 753760 - DNA, 575 bp, Homo sapiens
attgagaattaacagatggagtgaaagttctcagccttcctctgatatctgcctaagagtaggacacagatttacctttgtaaagatagtataaacttttctcccctctcctagatgtaccaagatgagaacaaaccttatcactggagacagagagccagtggcaccaacatgagtctgtgtaaatgaaactaaataaaataacatttatctttcattaaatcctcgtgtatatatcctattactttcccataatttatcagccctagatgccctaattcyctttcttgtattttgtcaattctcgacaatttattgctctttgttaaaatggtacatatgcccctaagtttaacagcttctttgagccttcgacttcttttctgtgaagccactgtgcttgtaatattaaaaattataatgacaaggcacaatggctcatgcctgtaaacccggcactttgggaggacgaggagggaggatcacttgagcccagaaatttgagacagcctgggcaacataatgagaccctgtccttatacctacaaaaaataaaaataagtaactgagcaaag

SEQ ID NO: 753761 - DNA, 623 bp, Homo sapiens
gacaaggcacaatggctcatgcctgtaaacccggcactttgggaggacgaggagggaggatcacttgagcccagaaatttgagacagcctgggcaacataatgagaccctgtccttatacctacaaaaaataaaaataagtaactgagcaaagttatgcatgcttgaagtctcagctatttkggaggtcgaggcaggaggatcacttgagcctaggaggtcaaggctgcagtgagctgtgagtgcaccactgcattccagcctgggtgagagagcaagactctgtctaataaaatttgtgtgctttttcttctgttaatttgtcagtttaattcacaggtctcagttactaaacccaggaggatagagggattttttttttctggatataccaaaatctgtgaataaatattgtgttgttggatgtttgtgttgcttccaggttttggctatatgaataaagcttttattaacattcatgtggaaatctctgcctgaacttaggttttcatttttgggggagggttaagtaattagaagtgatgttgctggaatgtatggtaaatgtattattaactttgtaaacatcttccatgaaagttatagcattctacattcctactg

SEQ ID NO: 753762 - DNA, 663 bp, Homo sapiens
tgagagtctttttgagtgcttactggcaattcatacatcttttttgtaaaatatatttaattttttgcccatttttattagatcatttttcttataaatgaatgttaaaagaattttttatgtaacaaagttgcagcttgataggaagaataagttctagtgttctatggcattgtaggagaactatagttaacaatatttattggatattttcaaatatctagaagagatgattttgaattcccagtgtgaagaaaggatacatgctggaggtgatggatatcacaattaccctgatttgatcattacacattgtatacatgaactgaaatataagactgtaccccataaaatatgtacaattatcatgtaacaaaaataatagaagaagagttctctatctagtctggatacaagtgctttttcatatrtatatgttttataatttttttctgctagcctgtgacatgtgttttaattttctttataattgtgtcatttgcagagcacacatctttaattatggtaaattccaatttatctttcttttcctttacggtacatttttaatgtcctatttgagaaaattttacctactttgatgttacaaagatttttgttatgtttctttttataagttttaacgtttcagcttttattttt

SEQ ID NO: 753763 - DNA, 633 bp, Homo sapiens
aactcttagcaagttgtatatttctaagaatttattcagtttttctaggttacccaatttgttggcatataattgtttctattaatccctcaattttcttttttatttttgaggcatctctttaacatctccctttaatttctgtttttattttagtgttctctcttattttcttagttggtctactaaggggttgttgattttgcatattttttttcaaaaaaccaatcagttttattgaattcttctacmgtttatttgatttatttctgctgagatctttattatttcccttccgtctgctagctatatttgtcttctttttctagttctttgagttataaagttcagtaagatcttaattctttttttaaagtagaaatgttttaatttattaatataaacttccgccttagtattacttttgttgcatctgtaagttctgataagttgtgtttttgtttttgttttatcttcgggttttgtaaaatacccttttgattttctctttaactcagtttgtgcaagtgtgttagttttcatgtctttgtgaatttttctcattttcttgtaattaatttctaatttcatgtcattgtagctggaaaagacacttggtataattgtttaaaa

SEQ ID NO: 753764 - DNA, 635 bp, Homo sapiens
tcctctcaatttttgaatcaagatttttgaacaaggttgtctgtgtatagtattcctaactgacatttgcttccttttattattttaaatatatcactgtactccgttcacgccttcaaggtttcttctgaaaaattctctggtactcctgtctaggattcccttacatataacaagttgctttttcttgctgctttcaaaattctgttcttatttttgataatttgattataatgtatatcagcgtgggtctctttggatttattttatttggtattccagagacttctgagatctgtatgtctgttttttccctagaaatggaaaaatttcagctagcatttctttgaattagcttttaggtaatttctctttttatgctccttacagtaaccccatacttgcatatattagtttgtttggcagtgtttcataagttycttaaactaccttcactgtttttactgattttttttttgttcctctgattggtttccagtgacatatcttcagtttcactcagcctttgttttacttgacctagtctgctgttgaacccacctgttgaacttttctgttcagttattttcttcttctattgttaaaattaaaacatctggaaccagtctgagaac

SEQ ID NO: 753765 - DNA, 649 bp, Homo sapiens
gacatatttataatgatctgttcctcaatttctttatatgtcaaacaaagattctgggaattaaaagattagttactctcaattttagtaatctatgaggtcagagaacttagaagactgtgtccgacatctctgtttcctaattagggaagcctaagctttagagagaaaagtgggcccatatgaagatttaagttccatatgggtaacgttctgggtttgacaatgtgttggtagaggggctccactgggaatctgcctcttgggatatgttagttgcaatagttcatgagtgctgctcatkgaaccagcttcacctgaatcatctaggaactttttaaaaggcagctcagtgctccacccttgtaattatgatttcctggatgcagccaggaatgggtgttctaaaagcatctttccaggtgattcagatgcagccgggtttggaaacctctaaattcatataaacttcctcagttgtacatctgtagaggataaatattttatgaaatgctcctttatctcttccataaacactgtctgattctatttgttacttactctcaaacacatatatttcacaatttgttcagactttaaaaagattaaatggtggttctcacctctttttctaagctccatttaaaaa

SEQ ID NO: 753766 - DNA, 584 bp, Homo sapiens
taaaatttaccattttaaccatttgtaggtatacagttccacggcattaagtatattcacactgttgtacacaatagctgctatccatttacagaacatttttgtcttcccaaactaaactctgtatgcattgaacaataactccatacctccttctcttgcagttatatttgtaaagacataaagaattctaaatacaatttaagccctcttccaacacctttcctratactaatcactttcttcaccctcaagataattccattcagatgttggtttgtatccatccctcaatgatttactagttttgccaagagtttacttgtgtctttcaagatttaaatacatagtttttactcaatattaactgtggagatttattaaaatgaacacctgtgactgtggtccattgattttaactattgtaacatgttcaattgtgtaattacatgtcagtgtaagttctttctctttctcgatgaatgtttaggttattttacatttttcactgttattatttaatttacttgatatttcaaaattgctatcaaagttggcataccaatttacattcatactagcag

SEQ ID NO: 753767 - DNA, 557 bp, Homo sapiens
tagcagcagcagaacaacaaaatcaatgtggtttaattggggttgtcacccataaacaatgttagacattaaaggctctatctctttcattatgtatatgaagaaaatgttctagacataaacgtttgcattcaaattttctttctagtttaactcactccacctacaaggcaaaccgctatactacaaatcatctccattttgtcaatagctgattaaattaaagatgaacagctgactcaagggaaaccagtacacacagaagaataaactgttttttctcctstaataatctgaagaaagagacactggcactgtggtcagtctgtactgggtgatgcagttgaaatgctgtgaatgtatggagtagtaaggtataatggagtgtacatgcccatgatgagtaagcaaagaaaaataatctgcagggaggaacaggaggaagaatgaggcaaaaatgtaaaggaaagtagaggcgataaagacatcataatagctcaggataagataaattgttggactttctggccttcaacttccagccccatataaggctt

SEQ ID NO: 753768 - DNA, 603 bp, Homo sapiens
  misc_feature 423: n = A,T,C or G
aacaatatttctaaagaatatagaaggcatacagaatatgtgttccagaaaacaaacctggctcccttaaaaaaacaaaaaaaaaaacaaaaaacactttagaccgggcgcggtggctcacatctgtaatcccagcacttagggaggctgaggcaggtggatcacctgaggtcaaaagttcaagaccagcctagccaacatggtgaaatcccgccttgagcttgcagtgagccgagatcgcgcgcccctacactccagcctgggcgacagagcgcgagtccgtytcaagaaaaaaaaaaaaaaaaagaaagaaagaaaccccgcctctactaaaaacacaaaaattagctgggcgccgtggcgggcacctgtaaccccagctactcgggaggctgaggcaggagaatcgcttgaacctggaanggtggaggttgcagcgagccaaaatctcgccacagcactccagcttgggtgacagggcagggctctgtctcaaaaaaaaaaaaaaaaaaaaatacaccctttgtttctaatatatgtgttcttgcttataaatttgtactatttctattgcattttatcagacatctgagcgccagtcaa

SEQ ID NO: 753769 - DNA, 603 bp, Homo sapiens
  misc_feature 423: n = A,T,C or G
aacaatatttctaaagaatatagaaggcatacagaatatgtgttccagaaaacaaacctggctcccttaaaaaaacaaaaaaaaaaacaaaaaacactttagaccgggcgcggtggctcacatctgtaatcccagcacttagggaggctgaggcaggtggatcacctgaggtcaaaagttcaagaccagcctagccaacatggtgaaatcccgccttgagcttgcagtgagccgagatcgcgcgcccctacactccagcctgggcgacagagcgcgagtccgtctcaagaaaaaaaaaaaaaaaaagaaagaaagaaaccccgcctctactaaaaacacaaaaattagctgggcgccgtggcgggcacctgtaaccccagctactcgggaggctgaggcaggagaatcgcttgaacctggaanggtggaggttgcagcgagccaaaatctygccacagcactccagcttgggtgacagggcagggctctgtctcaaaaaaaaaaaaaaaaaaaaatacaccctttgtttctaatatatgtgttcttgcttataaatttgtactatttctattgcattttatcagacatctgagcgccagtcaa

SEQ ID NO: 753770 - DNA, 501 bp, Homo sapiens
ttgttttgtgaattatggtttatttaattcatgctggctgctacaaagtaagcattagatggctacaattgtgccaaactcttgttggatacttttcctgagttcaaggtggaagttttcatgccctgcttccctgtagaaagaatagcatatttccagagcctttgwttaaaaaattaatcatctcaaaatagctcagtccaaataaaatgtaagcgagcactatttcatatttgatatttagagcaaatgctgtgggttgagtataaattcaaaggtataattagttatccttaactagttcttaattgtacattaaattaatttttcagtgaaactatgttctttttctttttccaattatgagctatgattcagggagacattttcacctctccgttatctatgcttttagagtctaaaatacctgctgacttattagcttcacctattagtatctgcacaagagattatgtcggtctgtaatttttatgagagcat

SEQ ID NO: 753771 - DNA, 421 bp, Homo sapiens
acctggatgtcagaatccagggtttcagtctaaggtgagacactgaatcattgtgtgggcttggacaaagcatataacttctctgggcctcagattcccccactggtaaaataatgtttaaactaaatgattactaagatcttgttaagcttaaaattctgattgccttttcctgactagctctgaggaggcttgggtctwtggaggctgtattagaacattacattttaaagggaataaaaaaaaaatcactccaaacctacagtttaaaggagacacttatccccgacagaaatggtttttctgtggttgcagaggtcagcagctgtgggaggctaatgtaggttgtctctggctcattggcaatcatgaggcttgatacgcatttgaaaaaaactaaacattcctaattaccttgaga

SEQ ID NO: 753772 - DNA, 649 bp, Homo sapiens
taaggctgggagttgaactctgactttaacatccacagtcttaaccatgagaccccattgtctctttttggggtgctaagaacattggctttagagaaatctcttacctgctatggaaacttgagaaaattatttaatctctcttagcctcagctactttatcagttaattacgcataaaatctgttgccttaaaataacatcataatagatacagattaaaaaaataaaaatgttggccaattattacaagtgacattcatttggagaacagtgagtgttttgtggtgaggaattctgtggttggattgagagaacctgtctatgtggggccagtgaccaggtagggaagatggaatggcgtggaagcaatgctcctcaacttgtctcccactgaatcagatgctccttggtgccagcaaagaaagaagtcactggaaatataacacatgcacagcacattatgacagcyttgaacacaagcaccacagcatgatatgcagatcaaaatgaacacatctgcaaataaacatgggcaaaattgggtccctaatcctgaccattattattatagtgttgcacatgcggtgactgtcttaattaccatgtgctgttcttttcatactctagaaatggactgagtggaccac

SEQ ID NO: 753773 - DNA, 615 bp, Homo sapiens
acacagccagatatatggcattggcatatgggtcacatttgcatttggggcttatttgaggcagttttctgaaaatgtcaaaggaggtgacatattctaaaggattgatattagtaatgaacattaatttctctcagatactttctatagtaaaagtattttttttgacccaaaattgtaagcgagtgcttgccaagagtgaaaaaaaaattacttaaggcacacaaaatttaaaatatttccctcaggagaatgtcatacaccagagttgctaaagactgaattactgaaaaaacaaaaaagcacttgttagcctctgtgtcctcctatgcctaaatccctttctttcttctggatctactatcggattggagacatcaccttccccsctagtgctgaagccacagtactgagagttatccttgaaaataatcctctttaaccagataaaagtggtcagttcctgagtcctatagcagatgcttttcaaacccatttacttagctgccttcttacagcaactgtattagttgaggtgttcacctgttttccatgaaacagcagaatgttttccacattttaagtggtttaaaaaaatcaaaagaaaagtaatat

SEQ ID NO: 753774 - DNA, 639 bp, Homo sapiens
actgatgaacttctactccaatctcaagacttagtcaactgttttatgctaatatgagacttctctgatcatctccattggtccattccaggaatacagtcatatttgcctctggaagtggactctaagggataagggatagtggtatggtttggctgtgtctccacccaaaatgtcatcttgaattgtaatccaaatcgtaatcccccatgtattgagggagggacctyatgggaggtgattcgattatgcaggcagttctaccatgctgttcttgtgatagtgagtgagttatcataagatctgatggttttataaaagactttataaggagatgttccctacttcgctctgcactgccctctcctcccaccacgtgaagaaggatgtgtttgcttccccttccaccatgactgtaaggttcctgaggcttttcaagccatgtgcaactgtgagtcagttaaacccctttcctttataaattacccagtctcaggtagttcttgatagcagcgtgagaacggaccaatacggatagtctatcaaataagtaatacatttcacgaataaaatagtctacacatggagacagtttctcaaattttcagtaaacattgtgtttcctctaaattttcatta

SEQ ID NO: 753775 - DNA, 607 bp, Homo sapiens
tgtaacaaggatccagtttccaataccttgttagtcatttctgtctgaggcctcatcagaatggcttttaccatccatttaccatttactttcatatagctgctcagaaatgtgctgctattgaatggaaaaaatgaatcaaagttttcatgaagtaataaatggtatgtatttatttaaggcaaatttagagatgttatgttccactcaaggtgggcaactggggatagacagaagagagtcttggtcatgggttgtaatcagtggcaagctttgctatagacctgggctgagtatagcttgtcagcagatagctctctcagtttattttttttttctttctagattacagctccctttctaacctyaggaagacctaaaaaattcagaaaaagaaatttggacaactctgtattggtactactaaaaccctaatgtttatgcaagatgacctataatgtgttttaggatatattatcatgtttgattttgaaaacaatcctaatattggtgtgctactgatataactgcacctaatacttatatagctagtaagtgatcatgtagagactagaaggcaagtcttctttcacaacacagaggtggt

SEQ ID NO: 753776 - DNA, 492 bp, Homo sapiens
gattccctatgtttacatttggagaactcagcatcagctacacctgaggcatagaacacatagatgcatcattgttactcccatttgacaagcaaacattaactatactgatatcttaaatttcttgcaatttcaatttttatatctaaatttggaatttccttctaaactgtaattttccaagataagataagtttatttttactacaatatcccccttgtgactaacaagacattcttcatggggctgatgcatratagaattttaattaattgagatgttgatagatcatcttacacagtatttatgaaaaaagtattcaattgaaaaaaaaagatgaccccccatttaataataaataacattttaatgattcaagttattaggccattttcacaatgatagttattcaaagtagaccaaactgagtttaaaaattaattgaagttcattttcttctgtaaaagtgtttgtcaaagttggaagttggt

SEQ ID NO: 753777 - DNA, 610 bp, Homo sapiens
tcagtgatgacaacactggccgtgtgggtcctggtgggccttgagtgggttcctctgctcagacatgaggtgcttagacctcgccctagctctgccctgtgaccttggcaggtcacccggggtcactttcccatcggagtgggggtggggactggaaccagccactcccaggtccctcctctgaggttgctcttggcactggtcctggggacagggctgcaggggactctggcctctctctcccctctcagttccacttgcctttgtcctgctgcctgagaagagggcatggacagccggggacaagacgggacaggcaacctcgcagtggtggtaaccctgtgcatgaaccctgggcctggcacgtggacctcctgtgaccgtccccacaggcccgtgagctagagcttggcactgcccaagaccacacagtccatgcgcrgtggagctggggtccaggctgcccaccaggcagtgactgcaatggtggcagcaggggacagtcaccatggtgagctcaagccaggcgctgcactgaccttgagggagggctccatgcttccccttcccacagctgcagtgagggctaggagagcagggtcggctgcag

SEQ ID NO: 753778 - DNA, 563 bp, Homo sapiens
atatagactggctgaaaggattttttttaatgacaaaactatatgctaccaacgagaaattcactacacccattaaagacacatatagactgaaagtgaagggatagaaaaagatattccatgcaaacaaaaaccaaaagcaagcaggattagctgtatttatatcagataaaacagactctgtaaagcaaaaattgtaaaaagagaaaaggtcattatgttataataaaaggatcaattcagcaagaggatataataaatatacatgcacccaacaccaaagcactcagatacataaatagcaagtattattagatctaaagggagagatggactccaatacaataacagctggggacttcaacaccccactcgtggcactggasaagtcatttagacagaaaacaacaaggaaacattaggtttaaactgttctttatatcaaatggacctaacagacatttatagaatctttcatctaatagctgaagattacattttcttttcatcagtacatggaacattctccagcataaaattctccatcaacaagtgaatggata

SEQ ID NO: 753779 - DNA, 609 bp, Homo sapiens
aagcagcggagggaagtagcatggcatgtgaatggcatctcaggctacaggagcatgtgacccgaggaacctttgagctctctgagccacagatgaatctgggaagacaggaattcaacaaagcacaaaaataaggtaacataaccaaatgcaacagagggggaggctgtgaggcagggtccagcaggcgctctccctgttcttgtacagccatcagcagaatggtgtttactgttttttttttttttttggacagagtctcgctgtgttgcccaggctggagtacagtggcacaaccattgctccctgcagcatggaactcctcgatgccctcccctctgccaacccccacacctcactctccccagcagctgggaccacaggtgtgcrccattatggtcacttaattttcttaattttttttgtagagacagtctcactatgttgcccagcctggtcttgacctcctgagctcaagagatccacccaccttggcctcccaaagtgctgggactacaggtgtgagccaccatggctggcctggtttttacatttttaaatggttgaaaaaatacaaacaaacaaaataatattttatgacatcaaaat

SEQ ID NO: 753780 - DNA, 445 bp, Homo sapiens
gctggggctgaccggtcatgaaacacagctgttgtcataaattaaatcctgtaaacttacaatggaataaattatgtgaaaacgaagggaataaactctcacagtgtccctgtgatgacttcactacattctaccatggtctccgccctcagggttccttrcatctgtggtgtctacgtggtggaaacggtggtgccaggctgcacgtctctccccagctccgtccagagacctccaatgacagcttgaaccagccacggcgagaatacttaaacagtggcagtcatcaaacagtgcaaatgagggcctcatttattcttttgttgagttcctattcttaagaaagtgcagattcagattaaacgtgttgtgtcagtagccaacacactgtgagtggcacaaaaaaatgaggaaatgttcttccagtacaggaaaaccatgaacc

SEQ ID NO: 753781 - DNA, 535 bp, Homo sapiens
tccaaggcatcagtgaaagtagcataatacagtttgtcataaagacaaagacctaccatagaggaaaacatttgacaatacaattcaagctgagaagatggtaacactgggaatcctatgaaagattgtcgaagtgctaggagtaaataaatccagaataagcaggtctcagaaaacaatatcaaaaaaatatatataacattgaaagtgagtcatcactttggaagacaaggcctgtagcatgcaggacaatacagagttagaaaggttgagtcttcttgcatcagacttatgtcattcacrcacacacacacacacacacacacacacacacacactattggctcacatagttattgaggctgacaacccaaagatttgctgtcagcaagctggagacctaagaaagctaatggtgtagtcccagtacaagtctgaaaagaatgcacatgccatatcaatgtccacaccaggaacctggagttgttatctgctctaacaaagtctgaaggttaggaatcaggaaagtcaatgg

SEQ ID NO: 753782 - DNA, 610 bp, Homo sapiens
ctataactcctataagtactatgaaaccaaatgatttctgttacttgctttattacaatagttcttttaatgcagtaatctaaaaatgaacccaaaagatccccaagggctactggcattctgtgtatctgctttcctttttcttcttttgggattcccaaaatacatgtatcttagtttgcctaatagtgttccacaagtcttttagactctgttcatttttctttaatctttttttttaaatatttgtcagtctctgtaacctgtattgtcctatttcgagtccacttattcttgattatgcccrattaaatctactttcgaatttctctagtaaaattttcatttatttattgtacttttcagcctgagaatttctttctgatttattttcagattttctatctatttattgatacatctctgcaggaatttcatcagttctttgtgcatctttaagagagttgctttaacgttatcgtctactagtagatctgccatcatgtatttttagggataatttctattgatattttttcctttgactaggcaatacttttctgttttttgtatgccttatacttttttaaaatctgcatatttcaatcta

SEQ ID NO: 753783 - DNA, 550 bp, Homo sapiens
ttaacattctgctatgcacattttaataagtacactttaaacgaacagtaggctcttactcattttatggttttggatcttgcttttcatttgataagaagattgagagacattttcccaccccatatatgtgtttctgaatttataactttttccgaataccatcatgtgttatatattctagattctccattatgtattcmccattcctatagagatattgatttgccctcacttgattgccatgcaaaaaatttttggggagacaaccttattgatacaatttggttcagtagacatgtgtagttttagcactcaccctgtctcttgggacaaccttcctcctttttccaaacttcaattcagaaatcacagagttagtcatctatttttagaactttgtattattttatcgagtattgttcatgatatgaatgcaaatgcaagtaaccagtaaaaattaagtattgttgctttttgattccataattctgccttaatttggtcatatttccttattctaataaaatatcattctattaagcaataa

SEQ ID NO: 753784 - DNA, 491 bp, Homo sapiens
aacctcttttttttttttttttttttgtaaattacccagttttgggtatgtctttatcagcagcatgaaaatggactaatatagtaaattaaactggtagagtaaaacaggtagaatggagtgtggatggaaagatacttgaaaatgtggaaatgactttgaaacttggaaacagggagaggttggaacagtttgtagggctcagaagaagacagraaaatgtggggaagtttggaactccatagagacttgttgaacggctttgaccaaagggctgataatcatatggacaacaaaatccaggccgaggtgttctcagatgaagatggcgaacttgttgggaactgtagccaagtcgacacttgttgtgtttcagcaaagagactggtgacattttgtccctgccttagagattggtggaactttgaacttgagagagatgatttagggtatctggtggaagaagtttctaagcagcaaatcattcaaaa

SEQ ID NO: 753785 - DNA, 580 bp, Homo sapiens
agaaaaaaaaaagctattttaaaattcttatggaaccaaaaaagagcccaaatagcccaggcgatactaagcaaaaagaacaaagttggaggcatcacaatacttgacttcaaagtatgcctcaggcctacagtaaccaaaacaacatgacacaaaatcagacacatagaccagtggaacagaatacagagctcagaaattagtctgagccttatttgttcttcaataaatttgacaaaaacaagcaatggggaaaggactcyctattcaataagtggtgctgggataactagctagacatatgcagaaaattgaaagtggatgcctcccttacactatatacaaaaatcaactcaagatggattaaagacttaaatgtaaaaccaaaaactataaaaatcctggaagacaacctaggcaataccattctgaacagaggaactggcaaagacttcatgacaaaaatgccaaaagcaattgcaacaaaatcaaaaaatgatatatgggatttaattaaactaaagaccttcaattaaaagaaagtatcaacagattacacagacaacctacagaatgggag

SEQ ID NO: 753786 - DNA, 580 bp, Homo sapiens
agaaaaaaaaaagctattttaaaattcttatggaaccaaaaaagagcccaaatagcccaggcgatactaagcaaaaagaacaaagttggaggcatcacaatacttgacttcaaagtatgcctcaggcctacagtaaccaaaacaacatgacacaaaatcagacacatagaccagtggaacagaatacagagctcagaaattagtctgagccttatttgttcttcaataaatttgacaaaaacaagcaatggggaaaggactccctattcaataagtggtgctgggataactagctagacatatgcagaaaattgaaagtggatgcctcccttacactatatacaaaaatcaactcaagatggattaaagacttaaatgtaaaaccmaaaactataaaaatcctggaagacaacctaggcaataccattctgaacagaggaactggcaaagacttcatgacaaaaatgccaaaagcaattgcaacaaaatcaaaaaatgatatatgggatttaattaaactaaagaccttcaattaaaagaaagtatcaacagattacacagacaacctacagaatgggag

SEQ ID NO: 753787 - DNA, 630 bp, Homo sapiens
tgaatggtttctaaatgatactactttgttttcatattaatgcagttaatatttaaatactatgccagaagaaataaaataagaccttataattgccatcaaacttgtagaatcttcacagtctacatcttattctgaatattaattgaattaaattacagcactccttcactctgagaagttttcctgcttctttgtttgttctgcagctrtccctattctatcccggagctctgcttcatttagtatcttgagcaccaatttaaagaaaaatggcattatgtcaccccactactcaaaaaccctccaatgacttccatttctatttataaataaaagccaaaaatcttttcatagcccacaagaatgggcattatctgagcctccctttgattctgattttattcccttcccattgttctcagacataaaatgtaacctttgcctttctttggtcacattaagctcattctcgcctcaataccagtgtgtggttctttcctcaacctaaaaatgatgtcttggataaccacactgaatactgtattagtctgttctcatgctgctatgaagaaatacctgagactgggtgatttataaagaagagttttaattgactcacagttctgc

SEQ ID NO: 753788 - DNA, 574 bp, Homo sapiens
atggtatacagaaatttggtaagtacacttattccaaatgggagaaattggccaaaacgaaggggctacaggccccatgaaagttggaaacccaattgggcagtcatcattaaaccttaagttccaaaatgatctcctttaactccatgtgtcgcatccagggcatgctgatgtaagaggtgggctcccacagccttggacagttcaacccttgtggctttgcagggtacagtccccttcccagctgctttcatagactgtcattgagtgtctgcagtttttcctggtgcacggttcaagctgtcaatggacctcccattctaggatctggaggctggtggcctccactcacagctccaaaaggcagtgcccagtgggactctgtgtgggggctccaacyccacattttcattctgcactgccctagcagagattctccatgaacctgcagaaaacttctgcctggacatccaggtgtttccatacatcctctgaaatctaggcaggggttcccaaacctcaattcttgacttctgtacacctgcaggctcaacaccacatggaaactgccaag

SEQ ID NO: 753789 - DNA, 627 bp, Homo sapiens
actcggctgcaagcctctgactaagcagtcctggggatctcacattacgaccacagaagaacgcaggcaacgctgatggaccagaaaaatctcttaggttcatcattcatactgagaaaactgccttcaaacctctcatttccagctgcatttagagatacagaactgccatctagtgactaagaaggaaaaagcaaggactttccatgaaaaataattttttttacataataacaaagcactaaagttagtaaaattaacacaacttagcayatcaaagttctagtaaaacttcaaaatgtataagtgaactaatatacctatttgcctctataatgtatctggacatccaactgatacatggtagagtttacatataataaaataaatttagaatctcatctcattcatctgacgattttggcatcgggtgattacccatgtaaaagtataatttttatcatagtataagtataaaatcaaacagatctgtactcaaatagcgagcctaccctttatcaagtttgtgatctgatgcaagttattttaactcatataatcattttctttagcagttaaatgcgcattataatagttactttaaaggattattgtgaggatttctta

SEQ ID NO: 753790 - DNA, 627 bp, Homo sapiens
actcggctgcaagcctctgactaagcagtcctggggatctcacattacgaccacagaagaacgcaggcaacgctgatggaccagaaaaatctcttaggttcatcattcatactgagaaaactgccttcaaacctctcatttccagctgcatttagagatacagaactgccatctagtgactaagaaggaaaaagcaaggactttccatgaaaaataattttttttacataataacaaagcactaaagttagtaaaattaacacaacttagcacatcaaagttctagtaaaacttcaaaatgtataagtgaactaatatacctatttgcctctataatgtatctggacatccaactgatacatggtagagtttamatataataaaataaatttagaatctcatctcattcatctgacgattttggcatcgggtgattacccatgtaaaagtataatttttatcatagtataagtataaaatcaaacagatctgtactcaaatagcgagcctaccctttatcaagtttgtgatctgatgcaagttattttaactcatataatcattttctttagcagttaaatgcgcattataatagttactttaaaggattattgtgaggatttctta

SEQ ID NO: 753791 - DNA, 445 bp, Homo sapiens
ttgctctagcattttgcaagctacatcaaatcatgaagcaaaaaccaggtgacaaacttcctggtatcaattccaactatcatcttttaccaaactaaaattcaggttatcacattcaattaacttcgagtcaagtgctccaccagtatatataccagcaacataaaatgtttcataatgttttataaagttccctaaaatttaagaatatcatataaatgtttcagttagaaaagttgagaatgatacagtagggaacagaaaacatgaaaatatcacccaatcaatgatgyaaaacatgggataaaagggctctccatgcaactgattaattcaactatatctacccctaagtattttgtatcaataaatgttatcataaatagagtagtgtagaaaatgggatcaatacttttaattgtgtgttttcctttgaaaacgaaaa

SEQ ID NO: 753792 - DNA, 664 bp, Homo sapiens
ctcaaatactacaaaaaaggaccatcttttcataaaaggtgatatgatgtcatatatcatggcaccatatatttttgttaaaaattagcactgaaaataattttaattttaataatttgtgcatctttccattatgataaaaattgttttaaattaaaatgacacccttacttaatttttaatttcttttttatggaaaaaaagtgaatctttttttcataatttattctgaagtattggtacctsggtatatcagtcagaccttttgcaggaactggaaactatgctaggtgcatgaaacagaagtgtttactataaaatcaggtgttttatgggaagtttggaaggtttgaagcatctgtgtctaaggtgacacttttcaaagaaatcaaatacaactggattatcaggggagttaaaacttttgaggccaccattgcaatttgtagagtggacatttgaatgttgttgtagagaagctttgttttcagaccttaactgctaacagagcagtccagacacgggaatatgatccttacctcattcgactttctaaatctttgtgtggttgcatctaattggatgaatctagctgcaagggagtctgcaaatgtagtttttctttgtatttctgtaaacgggaaggggaggatggagattgcga

SEQ ID NO: 753793 - DNA, 615 bp, Homo sapiens
ggggagattttagcctttcaagtttccaaaacaagttgtcctccttgcagataaaacagtccaaacatgtagtcatgctcaacttctaagagctgttagataattctcatacttatctgtactcaaaaatcagaaatgggtacagcccagtattaaaaagcatttcagctagtttactgaaaactgacggaaaaataaaagccaaactacaaaacaatcaaatctgcctcagacatgttccccttgaacttaactcccatttcttccctcttatctcactcccaactcaatcagaagtaacagttccttttagatatatacycagtaatgagatcactgggtctaatgagagttgtgttttacgtttttttcagaaatccccacactgttctccacagtggctgaactaatttatacccctgccaacagtatataagtgttccctcttctcacagcctcgctagtatctgttgctctgactggtgtaaaatggtatctcataatgatttggatttgcatttctctgatgattagtggtgtagaacattttttcgtatgtttgttggccacttgtatgtcttcttttgagaagtgtgtgttcacaccttttaccca

SEQ ID NO: 753794 - DNA, 635 bp, Homo sapiens
ccaccccaacaccaccagccagcttcttctcctttatgctatatattgagataaaggtaccactattcttcatccacctaccaatgttaggaatctagaaaccagtcaagactcctacctccccttcacctgcatactctggtctggtatcaagtcctgccaattacagctgctctgtatttgcggaaaccacccctcctccttaactctattttcagcatttagttctatactttatcttacatagataaatgcaaaagatttctgattgatctcccaaactctagtccagtggttctcaaagtgtgttccttggacaaatgggcamcatcatcacctgggaagttatcaaaaatccaaggaaaagttagaggggagtttcaagatggctgactagaggcacctggtactcgcctcctccacaaacaagaactgaaatagtgagtagatatcacaggtcaaacagatcacataagagagaacattggaattcaagaaataagtgacaggtaacatgggaggcaaagaagaagagggaagtggggcagtctgctcagccaggatcggctgggagctagagaggttctctaatgtgattaaggttctccaggctccctcatgtggtaaagttaagt

SEQ ID NO: 753795 - DNA, 586 bp, Homo sapiens
taaaaatgcaatactcaaatagctttttgaaaatgttaacagtttataattttattgatgaaaggacagccatactctttgctccacaaatggaaagtgttttcacttttagatatatcaacagcgattagaataatcaattcaatgattctttaatttctaaattacatattttcctctagtaaccttttatacacatctgccttcatcatttgacaatttatgatgcatagcaactaaattttggtacagaaacatcccaaattatgaaagaatacatgtatgtgggatagtccaggttcttgttcccaaatgttgtgcattgaagttatttttattgactacatgaatgaaaataccatatttcctttgtttatagaaatattctgttcatttacttattgattctcaagtttgataaatttcctctgatgatacatarcttgggactgtgctaagatgataaatttcaccattatttttagaatctggacaagagagttgttctctgtctctttgcagtcatattctgatttatctaacaattatgaaatgtttccaattgttatttttttctctttgagct

SEQ ID NO: 753796 - DNA, 625 bp, Homo sapiens
ctcatcatttcaactgtgagcaaaagagagacatgaaaggaagctgacattttcacaagagatcatcagatttaatgaatcaaatttaacgcaatatctcactttcttaggaatatttagtcatttccatgctacaacaaatgcaattgattggaaagcaatggagaaatgagactaaacacattttctgtggagtaaaatgtttctaaatattccatttcactgacactgaaatgctaaacagctaaagtttttcttaatctggattagaaaataacttttgcatttcccccaaatttttcctaagatggttgttattttgtaattttaatagtgatctttgccagtatatagagaagggctcattttataagttgtttgagcaaatatcaatatgtgtattgctcactctaggcaaatwagatggattatgagattcaagattaacagtcagatacattatgggtgattaatgcatgacaaagggttaatcacaagatttcttttaaaagtatgcatgtataatatgttttgatagacagcaataacattacacacaccttccaatgagacagaaacaacgtaagaatgtgcctatcctgaaatgaaaaataaaatgagagtg

SEQ ID NO: 753797 - DNA, 576 bp, Homo sapiens
tttaccaatgagaattcctgacagcttttgtaatctagccgctcttctaattcatccctttttcttttcttttttctttttttttttttctttttttgagacggagtttcatcattcctattgcccaggcaatggcaacaatggcacgatctcggctcaccccaacctccacctcccaggttcaagtgattctcctgcctcagcctctcaagtagctgggattacaggcatgcaccaccacgcccagctaattttgtatttttagtagagacggggtttctccatgttggtcaagctggtctcaaactcccaacctcaggtgatccacccrccttgacctcccaaagtgctgggattataggcatgagccactgtgcctggccctgattatccctttttctttagaaattggagcccctcttttgtctctagagcacttcctgaacttagaagtatatctctggctgcagtcctcagccttggcccacataaactgttaatcttgcctcggtttcttccatttaggtagacatttccatctcatgtcctctgtcttcacagtccccagcttttgtg

SEQ ID NO: 753798 - DNA, 595 bp, Homo sapiens
ttaattcattagagacttttgtagtagttaaagaaataatcgtggcctctccaagggtaacgccagtgaatacggagaaaagtaaatgtacttgagaaaggcaaaataaaaggactatatgactggattcaggggatgtgggagaaagaaggaaaaatcttaaagacayttttactttggtggtttgaccaggtgactggggatcattcagagactgagaagagatgagaaggggcaagttataaaagatgaacagggaggaaagatgttgagtagtggaactgctgagtttggagttctggagacggtatctagacggtagctagatatttaagtctgatgctcagaaaggaaatctaatggatggcatagatctggaaaatttcataaaatagataggaatttatacaaataaggattttttgtttgttattttgagacaggctctcgctctgttgaccaggctggagtgcagtggcgctaccacagctcactgcagccttgacctcccaggctcaagcaatcctccacctcagccttgcaagcagatgggactataggtgagtagataggactacagggaaaagccattaaa

SEQ ID NO: 753799 - DNA, 483 bp, Homo sapiens
tattcttaagggcctgatagttttcaaggtatagccataaaaatatgaggaaggttggatttttagtattaaaaatggacagttgccagtttatggacatggaaggtgggatattaaatatgaatcaaagtaaaggatcagtactttgtaaatattttggagcaaaagtcaaagctgtagacatggatatagcatgctttgaggtcttttgaaagcatctatttttttttyttcgtaattctcattgtttcaagttgtcccttcatggtctcctcctcagagattcgtttctgatgttgcatcctcattagtatgtgaagcttataaaattggatgagatgaggtggtaacctgagactaagaagaggatgaatttctttttgccctcccttcctcagtaaggcttttgcattgaatctttatgaaaatctcatgagaattttgtcaaaaagatgaaaatgtcagagatgatctccagtttta

SEQ ID NO: 753800 - DNA, 613 bp, Homo sapiens
tcacttatgataatcatagactctctaactaagcagagacaaacattatttagacagagaagctaaaaagcaaacaaattacttgacctctgggatccaaggtctgtgtgatcaagcaaatcatggtgacttctctttcctatattctcctaggcccaaaacaagtaaccactttttctgtgtctgggagctatttaaacatcacaaagtatcttagcactgtatttggccataccaagtgctaaaacaaatgtctttgaatgaygggaattaaaactagcaaacttttagagtttcaaatgttttaatcaagtcttagaaacagccatatcagtgtaacaatttcaaatatttgcttcaattgttttaaaacacacacacacacacacacacacacagagagagagagagaccatgagaaaaagatacagaactaactctaaaagaattcaagaaaaatttaaggatgggaaaagataattatacttttttagttgcacagggtgcgaatggggtggaagaaattgagcaaaaatgtaattagtttgttacttctaaccaaaccacttctgaagcataactttataggctcttactctgatttttcattcta

SEQ ID NO: 753801 - DNA, 543 bp, Homo sapiens
ccacgatcaagttggcttcatccttgggatgcaagggtggttcaacatgtgcaaatcaataaatgtattccatcacataaacagaaccaatgacaaaaaccacatgattatctcaatagatgcagaaaaggcctttgacaaaattcaacaaccyttagtgctaaaaactttcaataaacaaggtactgatggaaggtatctcaaaataataagagctatttatgacaaacccacagccaatatcatactgaatgggcaaaagctggaagcattccctttgaaaaccagcacaagacaaggattcctctctcaccactcctattcgacatagtattggaagttctggccagggcaatcaggcaagagaaagaaataaagggtattcaaataggaagagaagtcgaattgtctctgtttgcagatgacatgattgtatatttagaaaaccccatcatctcagcccaaaatctccttaagctggtgagcaacttcagcaaagtctcaggacacaaaatcaatgtgcaaaaattgcaggcattcctg

SEQ ID NO: 753802 - DNA, 586 bp, Homo sapiens
agatactggcaaagcaaatccagcagcacatctaagagcttacccaccacgatcaagttggcttcatccttgggatgcaagggtggttcaacatgtgcaaatcaataaatgtattccatcacataaacagaaccaatgacaaaaaccacatgattatctcaatagatgcagaaaaggcctttgacaaaattcaacaacccttagtgctaaaaactttcaataaacaaggtactgatggaasgtatctcaaaataataagagctatttatgacaaacccacagccaatatcatactgaatgggcaaaagctggaagcattccctttgaaaaccagcacaagacaaggattcctctctcaccactcctattcgacatagtattggaagttctggccagggcaatcaggcaagagaaagaaataaagggtattcaaataggaagagaagtcgaattgtctctgtttgcagatgacatgattgtatatttagaaaaccccatcatctcagcccaaaatctccttaagctggtgagcaacttcagcaaagtctcaggacacaaaatcaatgtgcaaaaattgcaggcattc

SEQ ID NO: 753803 - DNA, 547 bp, Homo sapiens
aacatcctcaactattatcaatattcttctgttttcttgttatttgtcctttgtatttgaaatttatgaaataagcacgtggcattcttggatagaaatattttttcattccatttgctgtttttctacaattcttccatatgatcgatgggaagcaggaggcctgtagtatggtgaacagcgtagagataatgcagtatcatctatagttagactgcactctgccactcacaagccacctcatgatctcaagcatgtcccttagcctctggtgactcagtctcttcatacatgaaatagagaccataaaaattcctacttcatagggtttttgyggatattaaataagttaatgaatgtaaaggccatagagtatgccaggcatataataatgtttgccattagccagacttgacttcctagtaagtttaaagctctttgaagaaaaagaacttgacaaaaaattgtttttcacaaagcacttacatttatgttggacacatactaaatatgcaatacataaaggcttgttaactggttattttat

SEQ ID NO: 753804 - DNA, 547 bp, Homo sapiens
aacatcctcaactattatcaatattcttctgttttcttgttatttgtcctttgtatttgaaatttatgaaataagcacgtggcattcttggatagaaatattttttcattccatttgctgtttttctacaattcttccatatgatcgatgggaagcaggaggcctgtagtatggtgaacagcgtagagataatgcagtatcatctatagttagactgcactctgccactcacaagccacctcatgatctcaagcatgtcccttagcctctggtgactcagtctcttcatacatgaaatagagaccataaaaattcctacttcatagggtttttgtrgatattaaataagttaatgaatgtaaaggccatagagtatgccaggcatataataatgtttgccattagccagacttgacttcctagtaagtttaaagctctttgaagaaaaagaacttgacaaaaaattgtttttcacaaagcacttacatttatgttggacacatactaaatatgcaatacataaaggcttgttaactggttattttat

SEQ ID NO: 753805 - DNA, 554 bp, Homo sapiens
ctaggaagttccaaactttcccacattttcctgtcttcttctgagcccttcaaactgttccaacatctgcctgttacccagttccaaagttgcttgcacattttcaggtatctttacagtagcaccccactcctggtaccaatttactgtgtttgttctcacactgctaataaagacatacctgagactgggtaatttataaagaaaaagaggtttaatggactcaccgttccacgtggctggggaggccttaatcatggcggaaggcaaaagtcatgtcttacatagtggcagacaagagagaatgagaaccaagygaaagatgtttccctttataaaaccatcagatctcataagacttattcactaccacaagaacagcagggaggaaactcccccatgattcaattctctcccaccagttctctcctatgtcatgtgggaattatgggagctacaattcaagatgagatttgggtggggacacagccaaaccatatcactaatgaattcttgcagttcatttgggactcaatttctcttctcccttaaga

SEQ ID NO: 753806 - DNA, 688 bp, Homo sapiens
gctgtttcatggtttttaacagtggaaaaaacaagtttaccacactcctggcccttatttatactctgattaatggaacacataaatactaaaaggaatgcagtaaaaaggaagtatacaatcaaactataatttgcaagtgaattatagttgtgtttctttccacttgtatacaatcccatgtttcatgcttctatcataagaataagtacattggctcaccctcatatgcacaatgccattggagatcttctctacaaataacaataggagacaagaagaacaaccatgtatttaagcaagtagagcctgtttaattatagacattgggaaaagcctaattatatttttcgtgctatattatcctgcaacccctgctgctgtttttttctgtataaaagtcttgcttgatgatatgtgaatcagtcagaacttcaattacccttttaaagaagcatttttatactgtatatggtttgataaaggaaataatgccttaccacattttcttcgccattatcgggtgcactgggacagcgytcaccaggagggacacaacatctttctacaggaaaaaaaaagagaacttaaaaataatttctttgcaaacaccaaaattctcccttagtcctatctcaatataatcatgttattagaatcatctgagttactctccctgcatatcttt

SEQ ID NO: 753807 - DNA, 419 bp, Homo sapiens
tctaagtctataaagtagagttcatgcggcactctacactcctcaaatactgactcagagcacctatttgactgtttacacataattttgtgatttctgaatcaaggtctgaagcagctaaaagggacagaagaaaaagaaacaagtgctgggaaaaacaacccattagaaaatactgcatgtatgtgtgtgtgtrtatatatatctatatgtaagattgttctatatattataatgcatactaactatattgcatataaatgatcagcagcctgatcattaacagagcacatcatcaggaactcttggtaatccggtaattaggagccatgaagctctttgaatttcttcagttttaatctaatacctgtttggttcaatgtaactatgagaattagcaacagttaatatattaatac

SEQ ID NO: 753808 - DNA, 419 bp, Homo sapiens
tctaagtctataaagtagagttcatgcggcactctacactcctcaaatactgactcagagcacctatttgactgtttacacataattttgtgatttctgaatcaaggtctgaagcagctaaaagggacagaagaaaaagaaacaagtgctgggaaaaacaacccattagaaaatactgcatgtatgtgtgtgtgtgtatatatatctatatgtaagattgttctatatattataatgcatactaactatattrcatataaatgatcagcagcctgatcattaacagagcacatcatcaggaactcttggtaatccggtaattaggagccatgaagctctttgaatttcttcagttttaatctaatacctgtttggttcaatgtaactatgagaattagcaacagttaatatattaatac

SEQ ID NO: 753809 - DNA, 419 bp, Homo sapiens
tctaagtctataaagtagagttcatgcggcactctacactcctcaaatactgactcagagcacctatttgactgtttacacataattttgtgatttctgaatcaaggtctgaagcagctaaaagggacagaagaaaaagaaacaagtgctgggaaaaacaacccattagaaaatactgcatgtatgtgtgtgtgtgtatatatatctatatgtaagattgttctatatattataatgcatactaactatattgmatataaatgatcagcagcctgatcattaacagagcacatcatcaggaactcttggtaatccggtaattaggagccatgaagctctttgaatttcttcagttttaatctaatacctgtttggttcaatgtaactatgagaattagcaacagttaatatattaatac

SEQ ID NO: 753810 - DNA, 640 bp, Homo sapiens
atttaaatcttctggtactttgctttcagattatttcccagtattaagtacaattataaggatgttcatcacaaccatgtaatgtaaaacactggaaatgcctgaatacccaccaacaggggaacagttgtatcatttataacattagtatactacaagttgctgtgcgttaaaaataagtagatttccatgtattgacttggaaggaagctcatggcatattaggaaaaagacgcttactaataacatggaatgatgtcattgctgtttcatgaaactttacatgcacacttacctcccacctttagcaccactttgtttgtaatcacttgaattgctgttcctacatagcaggtgtaaattccttcgtccagaaggcttactcttctgaaaaatagygacgcattcccattttgaatctcattatagaaaagggatgtcctgtttgcatatctgggatcttggctttccaaatggtcactgcctttgtagtaactgtgaaccttatagctatcttgatacttccagtgtattacgacttcggatcccctctcaaatgaagaagggagaattatatcttcatcaagtcttccaatgacgatttgttcattcataggaacataaatgaagaaagccaaag

SEQ ID NO: 753811 - DNA, 640 bp, Homo sapiens
atttaaatcttctggtactttgctttcagattatttcccagtattaagtacaattataaggatgttcatcacaaccatgtaatgtaaaacactggaaatgcctgaatacccaccaacaggggaacagttgtatcatttataacattagtatactacaagttgctgtgcgttaaaaataagtagatttccatgtattgacttggaaggaagctcatggcatattaggaaaaagacgcttactaataacatggaatgatgtcattgctgtttcatgaaactttacatgcacacttacctcccacctttagcaccactttgtttgtaatcacttgaattgctgttcctacatagcaggtgtaaattccttcgtccagaaggcttactcttctgaaaaatagcgacgcattcccattttgaatctcattatagaaaagggatgtcctgtttgcatatctgggatcttggctttccaaatggtcactgcctttgtagtaactrtgaaccttatagctatcttgatacttccagtgtattacgacttcggatcccctctcaaatgaagaagggagaattatatcttcatcaagtcttccaatgacgatttgttcattcataggaacataaatgaagaaagccaaag

SEQ ID NO: 753812 - DNA, 559 bp, Homo sapiens
aacatacttgcctggaatgttaaagatcagggtaattttctgtctcgttaatctaatattgacagtggagtataaaagtctctcactattactgtgtaggagtgtaagtctctttgtaggtctctaggaacttgctttacgaatctgggtgctcctgtattgggtgcatatatatttagaatagttagttcttcttgttgcgttgctccctttaccattatgtaatgtaatacccttctttgtctttcttgatctttgttggtttaaagtctgttttatcagagactaggattgtaacccctgttttttttttwattttttttaattttttatttttttgctttccatttgcttggaaaatattccgccatccctttgctttgagcctatgtgtgtgtttgcatgtgagatgggtctcctgaatacaccacactgatggtcctgactctttatccaatttgccagtctgtgtcttttaattggggcatttagcccatttacatttaaagttaatattgtcatgtgtgaatgtgatcctgtaattatgatgttggttagt

SEQ ID NO: 753813 - DNA, 559 bp, Homo sapiens
aacatacttgcctggaatgttaaagatcagggtaattttctgtctcgttaatctaatattgacagtggagtataaaagtctctcactattactgtgtaggagtgtaagtctctttgtaggtctctaggaacttgctttacgaatctgggtgctcctgtattgggtgcatatatatttagaatagttagttcttcttgttgcgttgctccctttaccattatgtaatgtaatacccttctttgtctttcttgatctttgttggtttaaagtctgttttatcagagactaggattgtaacccctgtttttttttttattttttttaattttttatttttttgctttccatttgcttggaaaatattccgccatccctttgctttgagcctatgtgtgtgtttgcatgygagatgggtctcctgaatacaccacactgatggtcctgactctttatccaatttgccagtctgtgtcttttaattggggcatttagcccatttacatttaaagttaatattgtcatgtgtgaatgtgatcctgtaattatgatgttggttagt

SEQ ID NO: 753814 - DNA, 573 bp, Homo sapiens
tacaacttacaagggatgtgaaggacctcttcaaggagaactacaaaccactgttcaagaaaatacgaaaggacgcaaacaaatggaaaaaacatttcatgctcgtggttaggaagaatcagtggagtgaaaatggccatactgtccaaattaatttacagattcaatgctatccccaacaggctaccactgactttctttacagaattaggaaaaattactttacatttcagatggaaccaaaaaagagcttgtatagccaagacaatcctaagtaaaatgaacaaagctggaggcatcatgctacctgacttcaaackatactacaaggctacagtaagcaaaacagactggtactggtagcaaaacagatatatagaccaatggaacagaacagaggccagaaaaataatgccacacatctacaaccatctgatctttgacaaacctgacaaaaacaagcaacggggaaaggattccctatttaataaatggtgttgggaaaactggctagtcatatgcagaaaacggaaactggaccccttccttaccccttatacaaaaatcaactca

SEQ ID NO: 753815 - DNA, 568 bp, Homo sapiens
ctatattggtgatagtaaaagacaaattcaagtattttatgtcgttcaagaaattggcttgtgtaggattgtgcacgtgacctttaatttccacttctaattttgtcactaactgttatgaatcacacttaaaaaacaaaccatggctatgatctttttaaagctgtaaagcaagactcaataattcacagagctaaccaaaggtgagtacataggaatatcaaaggtatacattagcaaaagattaaacaagtaagtcaataaggaagaaatagaaagacacagccacacaagcctcagaatacaaaagctgatggtgaatcaggatccagaggaatgcaggagtcagaaaagtaacacaaatamgcagaagagtgaccagctggatagggaagtgcagtggcccttgctagggtaataatgcccctccctcacattgccacagatccaggtggagctcacccattatcttgggcctggacactccagggtactctggttgatgtcctacagccggaaactgcatgtcttagcctaaagtctatctttgacgcagaaaaagtagcta

SEQ ID NO: 753816 - DNA, 610 bp, Homo sapiens
ttccctttttggaaaatgaaacagaagtcatccattaactaggaataaactgttcttccatcaaagtttatttactggtggttcctttctgtccctactgcatgtaaaaatgatcatttttgtgcatttcttcattttaggatgtctctcaaagctaaatattgtaaaatacattttctaacttatgtctttctaccctagatttctgaagccaaccacactatcaagtatttttaagaattccatgtgaaagtcaaaatgccatcatgatgcatacaatttaagtcaattgttctggcactatgaatgatcagtatgatcaccttgtaaaatacgaatgaaagtgctttggttttaccttcagagactcmtcttgcttaaagagatcttcaaagtccttagcacagaggtcaggagcattgagaagttgttccacttctaatagggcttgtgagacatgagtgatttcagtcaaataagtagaaggcacataagaaatttccaaaggcatgtcttcagtcatcaccatcatcgtttcttcacggacagtgtgctggtatagatatacaaaagaacaattttttttagcttcctaacagtgaaacctcct

SEQ ID NO: 753817 - DNA, 591 bp, Homo sapiens
taaatttctaattctaatttgcaactggcatttaaaattctaattttcctggaaatctagatatgggattgggtgagggggactcatatctgttttattcctaacacaggcaactttcctgtatctataggaaagttcactgagatacaacagatacgaagtagttaggctggtatgtaactttgtattaagccctcttctcctccaaattctagacattagctcctgtttttgttgctagtctcttgctaagttaagctgctaatgaagctgctatatgagcagaactgactgcggaatttatattttaaaaagaactccagaatgtcctgatatataagggagcactagcctcttctcttgcacctacacttttctgactgggatccaagtgctagacatgatgagaatttccagctccagagtccttttggagtttcccagtaatacmtctttccctattctttataagagcaaaaaataaatactacttggcaggcaaattcagaaagatggatgacctgtgctctcttctgtctacactataggcagcaaaattcttgtaattgaaattattctcccaataacttt

SEQ ID NO: 753818 - DNA, 616 bp, Homo sapiens
gatgaacatcttttagatttttcagtagaattaaaactggatgataaaaattcagcacatatcaactatattccaaaaatcaataaaagtgcctaggagaaacatttaaaaggttaaggaaattaagaaaatggataagataataagataatttaagaaaaattatccaaaacttagaagtaaaacaaaagatgatcgtgtgtgtttcaaaataatggtagcrttgttttctaacaaactcctcacaccctcacaagagcttcaatattttcagagtaaagcaactcttactgtttactattaatttgggcccacacatgttacaacgctatgaagttcaatgcaaattttagaaaactgatatgatgtaaatgactttttacccagtagaggatataaccccaaaggctgtagggtatcaacgagtttagtatcttattcactaatcttattccagaatacttttttaaaaattcactcattatagaagcatttgtttcttgtattctcttttgaaccagttttgtcttcctaccagctctccaattactgtattaaataaaacctaccgtgagttcactatgatttacatgaaaattatgtttcttcataaaat

SEQ ID NO: 753819 - DNA, 611 bp, Homo sapiens
atgtttttccctccaaaactgatgttgaaatttaattgccattgtgacagtattaaggggtgggagctttaggaggtgattaaggattgagggctccaccctcacgagtgggtttggttcccttataaaagtgggagttcagcccccttttgatctttcttgccctctaatcgtccatcatgtgatgacatatcaagtaggccctcgcagaggctgacaccttaatgttagacttcctagtctccagaactgtgagccaatacatttttgttcattacaaattattacctagycttaggtactttgttacagcagcacaaaacgtattaagagagttacctacttatcttttctgaacatcattacaattccatttcaaaatttctgctcttaatgatatcccaaggagactagaaaatatttcaacagttcagccactcttcaatgaaattatcttgcgtggtcatgtactcgttaaattgccctgaccattctttgaaggatagcactggttatgagattaaatttgaaagttcctatgaactatcagttgagtgaatttgcttattatagcatatatcttaatcatatgttcataagcctccattaag

SEQ ID NO: 753820 - DNA, 588 bp, Homo sapiens
agtaattcttggttgtggatggctgcatggtgcattcctcttgcgtcactcttcacaagaggccagtagtacatcctttccttatttgtgacaacgaaaaaggtctccgtacattgtcaaacgtcctctgcaggacaaaatcacctctatttgtgaaacacttacctagaatgatcttctaagattcttatactctcccattttccatgcttttggctatttatactgctttatgagatatttcttcaaatttatcttctwcttttgaacttttatttctgctcttcatttttaatagacttgattttttaaagcaattttacatttatagcaaaatcgaggggaaagtacagagatttcccgtatactctctggcccccttcctcattacacacagcctaccccgctatcaacatcccacaccagagtggtacatttgttataactgacttacatacattgatatatcattaacactcgaagtccatagtttacattagagtttgcttgtgatgttgtatcttctatgggtttggacaaatatataatgaaaggtatccaccattatagtatcacacagagtagttt

SEQ ID NO: 753821 - DNA, 588 bp, Homo sapiens
agtaattcttggttgtggatggctgcatggtgcattcctcttgcgtcactcttcacaagaggccagtagtacatcctttccttatttgtgacaacgaaaaaggtctccgtacattgtcaaacgtcctctgcaggacaaaatcacctctatttgtgaaacacttacctagaatgatcttctaagattcttatactctcccattttccatgcttttggctatttatactgctttatgagatatttcttcaaatttatcttctacttttgaacttttatttctgctcttcatttttaatagacttgattttttaaagcaattttacatttatagcaaaatcgaggggaaagtacagagatttcccgtatactctctggcccccttcctcattacacacagcctaccccgctatcaacatcccacaccagagtggtacatttgttataaytgacttacatacattgatatatcattaacactcgaagtccatagtttacattagagtttgcttgtgatgttgtatcttctatgggtttggacaaatatataatgaaaggtatccaccattatagtatcacacagagtagttt

SEQ ID NO: 753822 - DNA, 641 bp, Homo sapiens
gtgtgatcttgccattctaactctcagattcaatgaaagctgtatgtcttttaaaatttatcagttgcatcagaccatatatattaactcagaataagttcaaagatttaagcagtttctagaaaaaaaatttttctctctacttgaatgaactatttataccaagtttacaaagatgaaagttatttcagtgaaaatgtataaatggataactagcttcacatttatcatgagttggggctgtcatttgacttttgtcataacattttacctaatccacaaaatgttattttcaaataagactttggtgctttagaaaaagcaccaaagagctttttctaaagctgtacatgctttgagaaagtaaagtgagccatgaaaggagaaaataaaggcctagtttttgtatcccaatagatttttaccaagcttcccctgaagaaagtttagaatgagcatgatgggaaaagggagaaattgtatgctgcagatagagggagraaaggccaactaggtccaacaagtaaaaagaggactagtctcaaactattaaatatatgatttacctagcaaaagctttaagtcacagctgaattacactggggaaacaattacagactttacaatggaaagaagcatct

SEQ ID NO: 753823 - DNA, 632 bp, Homo sapiens
aaaaaactgcatcaattaacaggcaaaataacaagctagcatcataatgacaggatcaaattcacatatagcaatattaaccttaaatgtaaatgggctaaatgccccaactaaaagacacagactggcaaattggatagagtcaagacccattggtgtgctgtattcaggagacccatctcacatgcagagatgcacataggctcaaaataaagggatggaggaagatctaccaaggaaatggaaaacaaaaaaacaaacaaacaaaacaacaacaacaacaacaamaaagagggttgcaatcctggcctctgataaaacagactttaaagcaacaaagatcaaaagagacaaagaaggccattacataatggtaaagggatcaatgcaacaagaagagctaactatcctaaatatacatgcacccaatacatgagcacccagattcaaaaagcaagttcttagagacctacaaagagacttagactcccacacaataataacgggagactttaacactccactgtcaatattagacagagcagcaagacagaaaattaacaagaatatccaggacttgaactcagctctggacgaagccgacctaatagacatctatagaactctccacc

SEQ ID NO: 753824 - DNA, 583 bp, Homo sapiens
aaccaggtgggaggtgattggatcctggggacagttttcctcatgctgttcccgagagtgagttctcatgagatctgatggttttatagggcaattttctctgctcttgtttgctctttctctcctgctgccttgtgaagaaggacacgtttgcttccccttctgccatgattgtaagtttcctaaggcctccccagcaatgcagaactatgatttaattaaacttcttttctttataaattacctggtctctggcagtttttatagcagtatgaaaacagactaatacagtgggggacttcagtactccactggcagcactaaacaaatcatcaagacagaaaatctacaaagaaacaatggactggggctgggcacggtggctcatgcctgtaatcccagcactttgggaggccgaggcgggtagatcacgaggtcaggagatygagaccacagtgaaaccccgtctctactgaaaatacaaaaaattagctgggtgcagtggtgggtgcctgtagtctcagctactcgggaggctgaggcaggagaatggcgtgaacccaggaggcggagcttgtagtga

SEQ ID NO: 753825 - DNA, 553 bp, Homo sapiens
cactcttatttagggccagcactgtgcctggcatcagcaaatgattaaatcattacttctggatgaatatatatacacataagttatatataatgtattatatataatagattcattcaaaatgattgatacactartataatttaaaatatatagtctatatattataattcagtgtatatatttagcatatatttttccatcagtatactatttgtatagcctttgttatctttatataaatagtattgttgtttctcaagctgttacagtttgtctattattgactaacaaatcacccctaaatttgatgacttacagctacatcaaggctacatctcttaccactttgaaggatcaatgatttgagaagccgagtggttattgtttggggtccctggcacaattgcagtcagactgtggcttaaccaggaaccaggaggttgaggcagtgggggatggctggagatctctgtgtagtctcaagtcctctctgtgtggtctttccccttggctactttgagcttcctcacagcatggcagtctcagggaa

SEQ ID NO: 753826 - DNA, 619 bp, Homo sapiens
catgaagtctatctgaaagcttcattttttgacactattccaagactcattaatagcgtgctctctttagtatatgaaaatggtacattggtgcctgtaatgctcagcattgtttgtaggattttttatcccacatcacyttattggcagtgaacatctactaaattattcttctctctaacttgacatcttttatttttagcattaactatttaacatgcagttcaattgatgtattttcaatttttggaagcatatatatatatatacaattacatataacaataatatttatcaaatatcaataacacattttcattagaaaatcattatgctcttttttatttttgtattttatagtttttacaaaactgaaagatttaccagtatactaagattgttataaatggatgaagattcataaatataaaacaacattaccactctctggtttgcaaggtaagggaaatgtcctcaaaacaacaataatagtagtaatattaataatacaatttatgtttttactagtacttttcaattcacaggtatttacaaagacatttggagagatattatcaacattttatagaaaaggaccctcatcctgactatgctatgt

SEQ ID NO: 753827 - DNA, 560 bp, Homo sapiens
gggatcctattaaaaaaaacaaaactggccgggcgcggtggctcacgcctgtaatcccagcactttgggaggccgaggcgggcggatcacgaggtcaggagatcgagaccatcccggctaaaacggtgaaacccgtctctactaaaaatacaaaaaattagccgggcgtagtggcatatgcctgtagtcccagctactcyggaggctgaggcaggataatcgcttgaacttgggaggagcacaaatgctcaaaagaattctaaacttgaaaatgaaaattggtattcactatcataataacacataaaagtaagaaacacacagatctcatgaaacaattacacaaaggaggaagagaaaaaatctcaatggaaatatgacagaatttcaccaaacaacaaagataaacagaggacaaaagataaaaaaaattcacaaaacaactagacaaaaatcaacattataacagaaataaaacctcatatgttaatattaaccttggatataaatgtactaaatggtttacataaaagatacaatttggtggaatgaatttttaa

SEQ ID NO: 753828 - DNA, 679 bp, Homo sapiens
aggttggtgcaaaagtaattgtggtttcactattacttttaatgacaaaaccacagttacttttggatcaacctaatagaatgacaattgaaagtatatgatagcctagagacttttcagtggctaatttattctgagacaatttgcttaacataagtttcaatctaggcaaataaaaatagttgttttttgttgagaacctattgttattattactattttatgataagaaattaaggctctagatgtttatgtgactctccctaggtagaaaggtctgtcattggcaaaggtaaaactgaagcttagattagcttgagactaaagcctgtggcctttccactggctgaacaagaaaaagtgaaacagcaacttagcgtgaagattaagttgaaattctgagattctgattcatggtggaagggggacaaaatcagaaataaakaattgatacatataaataaaggaaaccatatttctttttttaaaaaatatagctattaattcaactaaattgatcttgttgagatcaattctttgagtaatatatcatgatagataacttgctgatactatgaaaggtgtattatattttggtccaaaaccaataaacctaggaataaatttaggctaatccttttgttcaaggatttgagatcacatcataaagattgagtgt

SEQ ID NO: 753829 - DNA, 683 bp, Homo sapiens
ctttaatttaaatatgaaacacctatgaacacacagggtgtatgacttgctcaaagtcaagcagctagagagagctgagtttcaacctcacactgagtgagacttcaaatttgggaaatataaccactcactatactgggtgcaacttcattgtctgtaagatctacatgtctagttacaatcagatgtggcaggaatattagattaggtaacaactgttttaagattagagagaggcactggtaatagcatcaacatcttttgagaggatacatttcttgtgccaaacatcagtaatacgtytcttaatatccggttttaatgacagtgttgagacatctttgtatctttatgggcagtgaaagatgtagtctaatgggcagtccgtgtagactaagcctatgtattcaagatcacatgcgagctacctctaaggaagcctagaaaaaataaattttattttgtcacaagacaaaatattatttgtcttgtgaatattatattctataatgtagtcaacagcttaatagaaatacattattagagtcttcactttaaatgtgaagcacgtttggaacacacagtatgtatgaccaggcttcattactgcagttcctggttagataacgttttggatcccagaagtagtgactattgattttagagtactgactgatgtcctc

SEQ ID NO: 753830 - DNA, 622 bp, Homo sapiens
ctcttttgccggtgacaaaaactagtattacacattggcctgggatctaagttttcaaagtccagtttactagtttttcatatatatttttgacaattaattttatattttaccgtaaaattggaatgcagctttacttagygataaagatacaaatctatagaaattttaaataatgtatttagcatgcatttacttaaggaaaatctttatatacttcaatcttccttgaaatacattgtgtttttttctttattctacaaattctgaagtaaacgtgactttttaatatgcttttgtatataacagttttgaatgtacttaggtaatcaactgttttccatattataagctttttctattttatttgtattaaaatgttagttaagtaaaaaaaatagtttatttccaaagcaaattgtagatatgaagacagtggttaacattctatattttggtataagctttggtataagtttgaatttgctatatatgttattagctttctactactgaggcacttattttatctatatctaagttacttaacttccatgagactcaattacatcatcattgaaatggcttaataagactgtttgggaaaatggaaatgattgtc

SEQ ID NO: 753831 - DNA, 636 bp, Homo sapiens
attttcacatacagaaactaaaactaagcatcatattttaaaatataaatatctacctaattgattttgatttattattccacatgaagatgtctgttcaaggaagatagctcttatttcctaaaagtgaatacacttatgctttttaatatgcatctttttttctctttaratgcgagttattttcaattgctttgacttagatgaatggaagaaaatcaacttcctccaaccatagcacttttcaaagacctctcttattttaaatatgtatatttttctccttcctgtatgatagtgtcagatttattctcttaagtagcagtgagtatgacttttagaatgagtgtttgtaaaattttattagtgctatacagtctgtttcttgatgggacctggtgtttgtatacacattaagtttttatattgtgaaactaatacataagtatgtaaaatgattttgtacttagaaattcaactatacataaaactagtagggtggtgtgtattcttgtacactttacttaatatagagagaattgtggatttttattgagagagttgattggaagagtcccagctcaaccgctagtcatttttttgctttggataatcactcagaacctctgttttacc

SEQ ID NO: 753832 - DNA, 636 bp, Homo sapiens
attttcacatacagaaactaaaactaagcatcatattttaaaatataaatatctacctaattgattttgatttattattccacatgaagatgtctgttcaaggaagatagctcttatttcctaaaagtgaatacacttatgctttttaatatgcatctttttttctctttagatgcgagttattttcaattgctttgacttagatgaatggaaraaaatcaacttcctccaaccatagcacttttcaaagacctctcttattttaaatatgtatatttttctccttcctgtatgatagtgtcagatttattctcttaagtagcagtgagtatgacttttagaatgagtgtttgtaaaattttattagtgctatacagtctgtttcttgatgggacctggtgtttgtatacacattaagtttttatattgtgaaactaatacataagtatgtaaaatgattttgtacttagaaattcaactatacataaaactagtagggtggtgtgtattcttgtacactttacttaatatagagagaattgtggatttttattgagagagttgattggaagagtcccagctcaaccgctagtcatttttttgctttggataatcactcagaacctctgttttacc

SEQ ID NO: 753833 - DNA, 613 bp, Homo sapiens
gattggccacaaagaaaatattctccaaatggagcttctttccccctaagcctcccccaaatcattacctctgcttctgattcaatccctcaaaacctcatccatcagcttgaatgagagacaactattcagccaccatgtccatccgctttcttatccccccttgctcacccccagcgtctcagcccaaatcttccctccttccagccaacaaagctcccatgcctgtcatctcctgatgtcaatgcagcgggcaggggagtgggggaccactgaccccacatgcctattctctgcttagattacccaaaataccaggtgtcgttatttttcagagktgcaaaaatataatacaaagtcattctaaactgtcactgaattcagagtactttttgccattgtctagtcactgaattcagagtactttttgccattgtcttattttctcaatcaacaaatgctaagagtacaattatatgaagttctacagatttatttgttacttgcattacttagtaatggttcttatgcataaaggttaggaataacttctttgaacaaatatcctatataaaaaaacaacaaagtggtttttaaaaatcacattgctgtt

SEQ ID NO: 753834 - DNA, 645 bp, Homo sapiens
ggaatctcactgtcattcaaattatttggcagattatataattctcctgagactcagttttctaaactgtacaatgaagaatgctgattccttacttatctcaaggaattgttggataaaatgtaatgaaacatgaaaattatctaaaaactgtaaagacttatataagtgtgagttatatacttctaagtcagcatttaccactagaamaatataaatattaccatgaaaagattcttattcagttaaaggttgtaggtagaaaattaattaaaattatttaaatataaagcaaattgaaatatttatctttcaattttttaaataaattagcagtctaatttgtcatgtatgaagaaagatgtttttactttttgaatgtaagtcagtaacaaaaatatttctcatttattattgtcattagtaccaagctatgaaattttaaattgattaatgaaacatttaagtttatctttaaatatatttcttgatacattcttgatgtgtaagaaaattggatttgatataactatattttgaaacaagaggaaaaagctccaaatataaaattaccgtaaaatgacagtaatgtcatcatatcaagaacactaaatatgtgatcatctattgaaatataactttcaa

SEQ ID NO: 753835 - DNA, 539 bp, Homo sapiens
tctctcaaaaaaaaaaaaaaaaaaagaaaaaaaagaaaagaaacaaaaggatatatctgaaatatttttgaagaaatataaactaccattattataacagatccaagataatggaagagtgtagacaaagaagaaatgagaaagccctaccaggcaataagaattcttatggcacctgcaaatatatgcctaggtgtcttcataaacgctgtcacctttgttatgatggtcattctgcatcagatcttaatgtgactttccaaatacagtttcctattgtgaaagaatgatctgatctgttaatatattctcctagcaacataagtattatgtatatttatattgtgtgtgygtgcgtgtgtgtgtgtgtgtctcactgtaaataagcaagttagttgacattctggctaattagtgaggatcacttaacaaaagtctgtcttccacagacttattagttttattacacatgagtgaatgaacgaaataaatttcttttacatgcaaaactgatgaccagatgctagcatgtgctgtac

SEQ ID NO: 753836 - DNA, 539 bp, Homo sapiens
tctctcaaaaaaaaaaaaaaaaaaagaaaaaaaagaaaagaaacaaaaggatatatctgaaatatttttgaagaaatataaactaccattattataacagatccaagataatggaagagtgtagacaaagaagaaatgagaaagccctaccaggcaataagaattcttatggcacctgcaaatatatgcctaggtgtcttcataaacgctgtcacctttgttatgatggtcattctgcatcagatcttaatgtgactttccaaatacagtttcctattgtgaaagaatgatctgatctgttaatatattctcctagcaacataagtattatgtatatttatattgtgtgtgtgtgygtgtgtgtgtgtgtgtctcactgtaaataagcaagttagttgacattctggctaattagtgaggatcacttaacaaaagtctgtcttccacagacttattagttttattacacatgagtgaatgaacgaaataaatttcttttacatgcaaaactgatgaccagatgctagcatgtgctgtac

SEQ ID NO: 753837 - DNA, 524 bp, Homo sapiens
  misc_feature 489, 490, 491, 492, 493, 494, 495, 496, 497, 498, 499, 500,501, 502, 503, 504, 505, 506, 507, 508, 509, 510, 511, 512,513, 514, 515, 516, 517, 518, 519, 520, 521, 522, 523, 524: n = A,T,C or G
atttcaacctctgtggttcaaaataatttaaggatcttgtacctttgtgtttattttctgtttcaactaaggatagacttcagaaggcatagcttcccttgtaacgtttttaaacatctttttcatttgtagaagaacatttcaaaagcccaaattaaattatcattaaaatactttgacactttacaatcttccaagtggaatttaagttgtatgccttgatactgtagttttacagtttccccatcattggtaaatattcttctatgatgccactataatgctactggtagaaaatrtgtgcatataatttatcagtatattttcatgtaaaattttataaaaatctcaaagttatgaagatagttttacacaccctctaaactaggtgtcagcaaactataacccataagccaaattcaacccaccacaaaaatatttgctatcaggcctttacagaaaaagtttgctgaaggtgtctggaattcnnnnnnnnnnnnnnnnnnnnnnnnnnnnnnnnnnnn

SEQ ID NO: 753838 - DNA, 613 bp, Homo sapiens
agtgtacagtaaaatcctgggccctcacattcactcaaccctcactcactgactcactcagagcaacttccattcctgcaagcttcattcacggtaagtgccctgcatagatgtacctttttaaaaatcttttttttttgagacagagtcttgctctgtttcccaggctggagtgcaggggtgcaatcttggctcactgcaacttctgcctccagagttcaagcaattctgatgcctcagcctcctgagtagctaagattacagacgtgcatcaccacrcctggctattttttgtattttcagtagacagtgtttcgccctgttgcccaagctggtctcaaactcctggcctcatgtgatttgcccacctcagcctcccaaagtgcttggattacaggcgtgagccaccgcacccgatctaaaaatcttttataccacattttactgtaccttttctatgtgtaggtaagtttagatacacaaatacttatgactgtgttccagttgcccacagtgttcaatgcagtaacatgcaatacaggtttgtagccctgaagaaataggctatatcatatagcctaggtgagtaataggctatataccatctagacaa

SEQ ID NO: 753839 - DNA, 608 bp, Homo sapiens
caaaaattagctcaaaatggatcatatggacagggatgatggcttatgcctctaatcccaaccctttgggaggttgagcggggaggatcacttgaggctagcagaccagcttgggcaacatagcaagacaccatctctacgaaaaatacaamagttagctgggtgtggtggcacatacatgtagtcccagctactcaggaggctgaggtggcagagttgcttgagtgcaggagttccaggctgcagtgagcagtggttgcatcattgcactccagcctgggcaacagagtacgaacctctctctctttctctttttttttttctctctctctcacacacacacacgaaaaaaaaaagaaaaagaaaaaaaagaaattgagggaaataaaagattaaaatcccgatagaaaaatgagaaaaataatgaacaaagagttcacaaaaatcataaataagtgacctctaagcttataaaagatatacaacttcacggtaaaaagaagaatgcaaattaaaactgcgtggggatatcatttctcacctatggatttggcaaacatgcgaaagattttttaaaagcactcctttggcaaggctgtggggaaacc

SEQ ID NO: 753840 - DNA, 607 bp, Homo sapiens
  misc_feature 582: n = A,T,C or G
ttgtactgcaggaagagtgccagccaccccaaaagtggaccaccaagccaggtggtcgggaggcatgtgcagaagtgtgtccacttgacctcacagggttctcccatatttcctgcaggttccctgcagaacctttccctcagctttttcacttgggactcgggttccgycctgcacggcctgtgctggcccatccctcatttcctcagagacaactctggcctgtctatggtgcctctcctagctgatctgaaagggggcttggaggtgatcgcagcagtggcagagccccctacagagggaactaccctgctaccttccagatagggtctccggagacgttacctcctttgtctattacttatatatagagagaacacagcacaagaagtggtaaacatccccaccatcctgttgcttttcctttcccttttgtttgttaacaaaaaaaaaaaaagaagacgaagaaggaaccgggtaatctgtaagttcccttctgataatctatggttcttttatcaagaggaattatctagggcagggggactctgagcccgggaattgattttttaaccgaagtanacggcggattcttgatatccctttg

SEQ ID NO: 753841 - DNA, 607 bp, Homo sapiens
  misc_feature 582: n = A,T,C or G
ttgtactgcaggaagagtgccagccaccccaaaagtggaccaccaagccaggtggtcgggaggcatgtgcagaagtgtgtccacttgacctcacagggttctcccatatttcctgcaggttccctgcagaacctttccctcagctttttcacttgggactcgggttccgtcctgcacggcctgtgctggcccatccctcatttcctcagagacaactctggcctgtctatggtgcctctcctrgctgatctgaaagggggcttggaggtgatcgcagcagtggcagagccccctacagagggaactaccctgctaccttccagatagggtctccggagacgttacctcctttgtctattacttatatatagagagaacacagcacaagaagtggtaaacatccccaccatcctgttgcttttcctttcccttttgtttgttaacaaaaaaaaaaaaagaagacgaagaaggaaccgggtaatctgtaagttcccttctgataatctatggttcttttatcaagaggaattatctagggcagggggactctgagcccgggaattgattttttaaccgaagtanacggcggattcttgatatccctttg

SEQ ID NO: 753842 - DNA, 636 bp, Homo sapiens
  misc_feature 39: n = A,T,C or G
aactatatggggataagttgaaagcatttcccctgaganctggagcaagacaaggatgcccactgtcaccaattgtcttcatcatagtactggaagtcctagacagagcaatcagacaaaagaaagaaataaatggcatccawatctataaagaggaagtcaaactcttgctgtttgctgatgatatgattgtatccctagaaaaccctaaagactcatccaaaaagctgctagaactgataaaagaattcagcaaagtttctggacacaaaattaatgtacacaaatcagcagctctcctatacaccaacagcaatcaagctgagaatcaaatcaagaactcaactccttttacagtagctgcaaaataaaatataaaatacttaggaatatacctaaccaaggaggtgaaagaactttacaaggtaaactataaaacactgctgaaagaaatcatagatgacacagacaaatggaaacacatcccatactcatggatgggtagaatcaatattgtgaaaatgaccatactgccaaaagcaatctacaaagtcactgcaattcccatcacaatactaccatcattcttcacagaactagaaaaagcaatcttaaaattcatatggaaccagaaaa

SEQ ID NO: 753843 - DNA, 653 bp, Homo sapiens
catctatttaatttcttacgttagtagtaattgtttttataaattttggagctccagtgttaggtgcatatataggattgtgatattttcctgttggactagtctttttatcattagataatgtccctttttttttttaactgttgctgctttaaagtctgttttgtctgatataaaaatagccacttctgctcacttttggtgtccatttgcatgaaatatctttttccacccctttactttaagtttatgtgagtccttatgtgttaggtgagtctcttgaagacagcagatacttggttggtgaattcttattcattctgcaattctacatcttttaagtggaggtgaaggatttaggctatttacattcaaygttagtatagactatgtgagccactattctattcatcattccagttgtttcctgaatacctgtttttaaaaattgtattattgttttataggtcctgtgagatttatgcttcaaggaggttttgttttcatgtattttgaggttttgtctcaagatttccaactccttatagcagttctcataatgctggcttgggagtggcaaattctctcagcatttgtttgtctgaaaaaagctttatctttccttcatttatgaagcttagtttcactggata

SEQ ID NO: 753844 - DNA, 593 bp, Homo sapiens
caatcagattaaatttgaatatacattaatatatagatagacatcaaaatataataaagtccttggttaactgctggaggagcaaagacttaaagggctaagatctcagagaaaaggaaataaaaaaatagtaaagaaattttgcctaagggtagttgtctgtttctggaaaatcgacatagaaagttgctgctaaagaaaagacaagccagctgaggtttttgaagacttatgggacttgggaggcaacaattggagttcggggctataaaagaatctagtacttayagaccaatataccaaagagaagcaaggcacataaacgtgagttccttattttggtatttttcccataaggtattttcccgattctaaatagataatgaccagatgggcaagaagccaaaattaaatataaataaaattaaaaccaggacattttcagcagtaacgttattctgcagtgacaaaaactgaagttcagtaagcaacctttggaaatgtcttcagctcagttagaaacctttggtagctataccgttccaccaggcacaagagactttgataaagttttacaaagaccgtaaagatat

SEQ ID NO: 753845 - DNA, 593 bp, Homo sapiens
caatcagattaaatttgaatatacattaatatatagatagacatcaaaatataataaagtccttggttaactgctggaggagcaaagacttaaagggctaagatctcagagaaaaggaaataaaaaaatagtaaagaaattttgcctaagggtagttgtctgtttctggaaaatcgacatagaaagttgctgctaaagaaaagacaagccagctgaggtttttgaagacttatgggacttgggaggcaacaattggagttcggggctataaaagaatctagtacttacagaccaatataccaaagagaagcaaggcacataaacgtgagttccttattttggtatttttcccataaggtattttcccgattctaaatagataatgaccagatgggcamgaagccaaaattaaatataaataaaattaaaaccaggacattttcagcagtaacgttattctgcagtgacaaaaactgaagttcagtaagcaacctttggaaatgtcttcagctcagttagaaacctttggtagctataccgttccaccaggcacaagagactttgataaagttttacaaagaccgtaaagatat

SEQ ID NO: 753846 - DNA, 593 bp, Homo sapiens
caatcagattaaatttgaatatacattaatatatagatagacatcaaaatataataaagtccttggttaactgctggaggagcaaagacttaaagggctaagatctcagagaaaaggaaataaaaaaatagtaaagaaattttgcctaagggtagttgtctgtttctggaaaatcgacatagaaagttgctgctaaagaaaagacaagccagctgaggtttttgaagacttatgggacttgggaggcaacaattggagttcggggctataaaagaatctagtacttacagaccaatataccaaagagaagcaaggcacataaacgtgagttccttattttggtatttttcccataaggtattttcccgattctaaatagataatgaccagatgggcaagaagccaaaattaaatataaataaaattaaaaccaggacattttcagcagtaacrttattctgcagtgacaaaaactgaagttcagtaagcaacctttggaaatgtcttcagctcagttagaaacctttggtagctataccgttccaccaggcacaagagactttgataaagttttacaaagaccgtaaagatat

SEQ ID NO: 753847 - DNA, 623 bp, Homo sapiens
tattagaataaccccactgagaagaactggcaaaataatcacagatagaagagatataataagcatttagaacaacatcctcctctcatctgtaaaaggaagattacttttcctttctctaattctaatacagcaaagctagaggttatgaacatcatttcactaccatttgcacgctaaagacctaatgatggtggatgtatttttatcttctagacttctaaatttgatagaatattgacattggtctcacggggctattgaatgatttcctgggtcatgtctgaaatctagctaaatgtattatctctaaaggagttaatacaaggtcatcgaaattaagattgtaaatgtctaaactgatgaaatcagtactgaagaggccccaatatttccatagacaaaakagggaactaaagtgtctaaaatgttgaatatgtgtcatcgtcttatataacatgaatagagagcaaaataatcaaaattaagaagttgggaaattgggttatcagctatttcccaaaatcatatgtggagctgcattttgatatttcgctcaggtcagttttaacatttcagtgtgaagttctggtatatacataattgatgaactgaagtagagt

SEQ ID NO: 753848 - DNA, 614 bp, Homo sapiens
aacatttaaaaggacacttaatttaggaactatttgattaataataagagaaaataatggatatacaataattgtagttgattgattttgaaaaaacactagtaagccagagaatacagaaaaaaaagggatttgtggttgccataatcaatgatccatagttctattattaaagcaaaacagattgttttgttgttttttgagacagggtctcactctgtcacccaggctggagtgcagtggtgcaatcttggctcactgcagccttgacctcccaggctaaagtgatctgcccacctcagcctcctgaggaacggagactacaggtgcaggccactaggctctgctaatttttgcattttttgtagagaaggggtttttccacatttcccagctggtctcgaactctgagctcaagcaatacgcccrcgtcgtcctcccaaaggcactcgccaccgtgctctgccgcaaatagatcttgaagacccacagcttggttttctgtgaccatttgagcaaggtagtaacttcctttgaaaatcagtactcttacattattcttccattttaataacagtatattgcaaaaagaatgctaaaatttgtacccagtg

SEQ ID NO: 753849 - DNA, 572 bp, Homo sapiens
aacttctctgtgggaactgaagggtctatcaaagataccttttcttttgcatgactagagtgctacttttccaaattaattgaacgttttgaggacttaagaagaaaaaaggaagaagtgtattcataagtgggagctaagtaatgtgtatacaaggacagagtgtgaaataataaacattggaaactcaagggtctgagaaggatgagaaagtagtaagggagtgagtaatgagaaattacatcatggtacaatgtacactattcacgygatggttacactagaagaccagacttcaccactaaacaatatatccatgtaaccaaactgcacttgtaaccccttaaattcatacaaatggaaaaaaaaaaaagaaataattgtagactctttttttgaaacatatacatttttaagtacccatatttctctggagtaccacatacctaaatcgttaactcatttatttaaatcttagcttacatacgaaaagtgtcttttaaagaaatgaactaaagcaatataatttagtgtgtgtgtgtgtgtgtgtgtgtgcgcgcgcacatgcatgt

SEQ ID NO: 753850 - DNA, 572 bp, Homo sapiens
aacttctctgtgggaactgaagggtctatcaaagataccttttcttttgcatgactagagtgctacttttccaaattaattgaacgttttgaggacttaagaagaaaaaaggaagaagtgtattcataagtgggagctaagtaatgtgtatacaaggacagagtgtgaaataataaacattggaaactcaagggtctgagaaggatgagaaagtagtaagggagtgagtaatgagaaattacatcatggtacaatgtacactattcacgtgatggttacactagaagaccagacttcaccactaaacaatatatccatgtaaccaaactgcacttgtaaccccttaaattcatacaaatggaaaaaaaaaaaagaaataattgtagaytctttttttgaaacatatacatttttaagtacccatatttctctggagtaccacatacctaaatcgttaactcatttatttaaatcttagcttacatacgaaaagtgtcttttaaagaaatgaactaaagcaatataatttagtgtgtgtgtgtgtgtgtgtgtgtgcgcgcgcacatgcatgt

SEQ ID NO: 753851 - DNA, 545 bp, Homo sapiens
cggtataaaaattgtttgtgtctcctaaggctatagtgtagagtggagataataactaatacataatacagaaaaggtactaagaaggataactggcacatgatacagtctgcctctgttctcagctaacagacacacagcaaatgtaaatgtgtggatacacaaacacacacatacatgcaacaagttgcatttgggtccttaaacttataaaataatacttagtgatatttttagatttctattaatgcatattacttacaaacaatattcatacccctatgagtaagtgggtagaaawgatcaaatgaatggaatagttatgcctgagatagggttgtgtgcaggagacctccgcttttctttttttattccagatgaaaagaaaacagtaatcacaggattggcaaaaattaaaaaaaaaaaagtaagaagacattattttaaatgaattaattgctggaaaaataagtgcagtatctacctttgatgcattgacaagttggttgaataagccctgagaaaactaaatgcaaggcaacctg

SEQ ID NO: 753852 - DNA, 598 bp, Homo sapiens
aaaaaccctatctatgatctagtatcagcaattcttctagatcttgaagcttgaattcaagcaggaagggagagaaaaacagtaaaaatgaatgataagatgtacagcaaatatatagtacttcagaaggtggtatgtgcaataaaggtgacagggactataggaagtaggaaagaaatattttgatatcagaggttttaaacaaggctagctgctgaacaagaatgaagacaaacaargctgatatgtataaagaaggtagagtatggcaaactaatttctatcattaaaggcctcccatcattcatacatattttttagtaattaaaacatactcaatgtaacctctttcatactacagataaaaagtattgcaattttaatttcgaatgtcagaaataaatttacagtaaatgcaatggtcattagaatgcatctctgtgataatacatagttgtattcttttttcctagaaataataactaatagacaaccttttaaaaataattttgtgctcatgctctgaaacttttttctgccataaccttgtctagttgataaatgttaacataaaataaacatctatattattcaaaaa

SEQ ID NO: 753853 - DNA, 610 bp, Homo sapiens
tccatcccagggagaaattagaattctgtcatagaacacgggcaggggtgaccagaggccctggctgtgagtacccgcatcacaaggaggagtggatcagggtcttgcttatagaagcagtctagccatgcctcaaccaaatatccatgtcatgcttgggaaccacctctacccatgtcagtttagacactccaaatcccgcaggctggaacagctgaatcatccagaaaaccaaggtggcagtctgcctctctctgggcactctgtcccagggagagttcagcactctacctgtagaatacaggcagggttgtgggagtgccgaggtgggaggtcctccccagtgagtaggaatggatcagggtcccactttaagaaacagtctagacatgatctggcaaaacagctgtgctgtgctgtggggaaccttcctmatctggaccatttggactctccaaagcctgcagactggaacagctgaatcaatcaagcagcataggtggctgcctgccccacctcccaggggctctgtccagtctcaggcaggctctaccctgttgcctgtgtctgactggaattccaagtcagtgggtcttatcttgtaggatgc

SEQ ID NO: 753854 - DNA, 626 bp, Homo sapiens
taagtcatgccaagctctctctgctgtatcccaaagtctggcaccctgcgggtcagcccccaagggccatccaacctccgtctcccaacataagttcactttgtgtctctcatgacagggaggaaacttagcattccttggagacctgaaaggatgcagtgagcttaaacattttcaagagcttactaatcagtcagcccttgttcatccctgagcagatgtgtggtggtattgtggtagaccttcactgggcactctgccaaataactggagtggcacttgtacattagtccaattggctatccctttcaccctggcatttcatcaaccatagggaggaaaaataagacatcgtaacacaagagaagccccttatgggtcttttgactctcacatccatttagaygcaattggagtcccacagagaataccagattaattaaaagcttgaaatcaaatagctgcaggatttgagtcaatattttggtaggtgacagttaataaaaatgtaaattggataaactacatctattacaaccaacagcaattaccttttcacgagttaaaagaaaaactcatgtcagcccgagccctggggctatttgacccgacaaaaccctttacac

SEQ ID NO: 753855 - DNA, 539 bp, Homo sapiens
cctagccagaggggactctccaatcccagaggtctaaacatgagttctggtaaacctcgccactgagggctacagtgctctgtgtctccaagtaaatttaaaaggcagcctaggcgataaggacagcaaatcttaggtgagtcctagtactgaattagtaccagagaaagtggactgaaggggcatacaayatactgaggcaccagctggggcagccaagggagtgctggcatcacccctcccttaaatccaggctgcacagctcatggctccaaaagaaacctcttccttctgcttgagtagaggagaggggaaaatgaacagatctttgtcttatgttttggataccagatcagatcagccacagcaagataagttactggtcagagtcacgaggcctctgttccaggcccttgttcctggaaaacatttctagacatgccttgggccagaaaagaacacactgacttgaagggaaggacctggttctggcagtacttatcatctactaaatgaagaactctcccatactgaataaa

SEQ ID NO: 753856 - DNA, 535 bp, Homo sapiens
tcccaaaagagtcattatcccttgactctataaaaccaggcatctaacttttacctcacaattatttataaataacatcccattcaacgttaaagtaacataagtggtaggtctgttatattccctagggcagagggctctggagatgtggcagccccatcagcactgttcagattatcttgatagagatcaaaatcctgtgtataggcaggccacagaagagatcaaggagagctgtggaaacagttgctgtagagtctctaaaaatcttcatagtaaacttggagcaaaaattccttaaacttcccactctgcctccactgcaatgaaattgttgggcctagcctcacttctttatgattmtcagtttcagcccccacacaaccatccccataacgtcatgccactctggctcaatctcagcttgtagattcagactccagacatttggtccctactataggacttgtcataggagggaattaagaaggaatgagggccgggcatggtggctcatgcctgtaatcccagcact

SEQ ID NO: 753857 - DNA, 517 bp, Homo sapiens
attagctgcctccaaagcacctgcattttagttattcatccctcgccccaaatccctatcgatcactaacactgtttttgttattttttaattattattatactttaagtcctggatatatgtgcacaacatgcaggtttgttacataggcatacatatgccgtgttagtttactgcacccatcaacttgtcatttacattakgtatttctcttaatactatccctcccccagacccgcaccccctgacaggccctggtgtgtgatgttccctgccctgtgtccatgtgttctcattgttcaactcccacctatgagtgagaacctgaagtgtttggttttctgtccttgtgatagtttgcagagaatgatggtttcccacttcatccatgtccctacaaaggacatgaactcatccttttttgtggctgcatagtattccatggtgtatatgtgccacattttcttaatcaagtcatcattgatggacatttgggttggttccaagtctctgctat

SEQ ID NO: 753858 - DNA, 636 bp, Homo sapiens
tgcccgttagttgatgcagtttcttcctagcatcggtggcctttacaatttggcatgtttttgcagtggctggtactggctgttcctgtccatttttagtgcttccttcaggagctcttgtaaggcaggtctggtggtgacaaaatctttcagtatttgcttgtctgtaaaggattttatttctccttcacttatgaagcttagtttggcaggatatgagactctgggttgaaaattattttctttaagaatgttgattattggcccccactctcttctggcttgtagggtttctgccgagagatccactgttagtctgatgggcttccctttgtgggtaacccgacctttctctctggctgcccttaacattttttctttcatttcaaccttggtgaatctgacaattatgtgtcttggggctgatcttctcaaggagtatytttgtggtattctctgtattacctgaatttgaatgttggcctgcctagctaggttaggaagttctgataatatcctgaagagtgttttgtaacttggttccattctccccatcactttccaatacaccagtgaaacatatatttggtcttttcacatagtctcttatttcttggaggctttgttcttttgttt

SEQ ID NO: 753859 - DNA, 588 bp, Homo sapiens
ttcaagattgcctatttttaatcatgtaataatttttattttattactattttatttttataaaatgtttggatatttctatttgattaaaaaaaatatttttcattatatcccagcaatactttgtaaatattttttacttcctgaagtccctcttttaggcttcactttagggaagaagactttggtataaattttctcaatttttatctataaatgttgagatttaactttgctcctaaatgatagttttgttcatatgtgttgacaactatttctctcaaaatttgtagttattctctactgtttttctgttttccattatttttgttgaaagrtctgttattctttctttttttctttcctttatatgcaacctctccttttccattggttacctttaagattttgtctttgttatcagtgttccttagttccattcaacgtatctgatttctttacactgattttgtttataatactctgtacttccgaaattagtggattcgtgctgtatgaatctagaaaaatccacaattatctctttaaataatttctttcttacatttttccccatttttctccttc

SEQ ID NO: 753860 - DNA, 588 bp, Homo sapiens
aaccccaatcccaattgccaaaaagaataaaataattaggaatacaggtaaccagggaggtgaatgatctctaaaataggaggtacaaaacaatgcttaaataaatcagagaagatacaaacaagtggaaaaaacattccatgcttatggatcacaaaaagcaatattattaaaatggacatatttcccaaaatgatttatagattcaatgctgtgcccatcraactaccaattacattcttcacagaactataaaaaacctcttataattaaaatagaatcaaaaatagaggctgaataaccaaggcaattctaagcaaaaacgacaaagtgggaggcatcattctccctgacttcaaactattacacaaggctacagtaaccaaaacagcgtggtactggtacaaaaacatacatagatacatagaccaatggaacagaatagacagcccagaaataaggctgcacatatacaaccatatgatcattgacaaagttgacaaaaacaaccagtggggaaaggactcgctactaaatacatagtgctgagacaataggcaagccatatgcaaaagactaaatctagat

SEQ ID NO: 753861 - DNA, 566 bp, Homo sapiens
ggacagggacttataaataatttttctgactctattttaaaaaaatctataccatggaagatatctttgctcctaaacataatcaaagttgaattttatgttctcgacagaaggcaaaatggatatattggtataatgcagggcttccacaaactgcttaatgtttgtttggataattacatacttagatatataaaaaagatgtatgtataaataaatgartgaatgcagtgatatgccagagctaacttgtatgagctcacaggagcctactattaaatacttaggaattttttacattggttgctaaatagagagtttttacatgtgaaattatatgttacaattaaataaattatattaaaagaaagataacaaatactcaaaagttaccacttcttcctaattatttcactaaatttaattattgtacatgactttgaggttatatatgcctattgcatttgtatagtagaaatgctatagaatcacatgtgtatttctttctaaccgtgtttaatgatatccaatttttaccttaaaatggaccatgatgagagtatgca

SEQ ID NO: 753862 - DNA, 627 bp, Homo sapiens
tgcttttctttataaacatttaaagttttagaaagtattaatatattctatgattataactcaaatgatataaaaataaaggataatttacttaaagaggcttataaacaaaatactatcaaatttaaacttaggaatttcatgttacaaaaatatcttcagcttagtactaaatactcaggataaaatgttaataaaatacatttactttttatcacaattcctgataatatggtgaacaagagttttaaagaataatttgacagaaatggttatttctaaattattcaccgtcatgcattagagaaatatttccacaactttygtctcataattttcactatgagagaagaattttactctgacccatttatgttggatgtgtttaatagtttatacagtataacaaataaccataatttctgtgtttggatgtgcataagaatagctaaattgcttcttgcaagcgaatcattcagtggccacagagaagacttaaggcaggaaatgagagatatgtacaatacattgtaactgagttaaggtcctgtcagtttaaaagtgtatccagccagttgccatagctctggctacagaaaaaaacaaaaacaaaacaaaacacacaca

SEQ ID NO: 753863 - DNA, 627 bp, Homo sapiens
tgcttttctttataaacatttaaagttttagaaagtattaatatattctatgattataactcaaatgatataaaaataaaggataatttacttaaagaggcttataaacaaaatactatcaaatttaaacttaggaatttcatgttacaaaaatatcttcagcttagtactaaatactcaggataaaatgttaataaaatacatttactttttatcacaattcctgataatatggtgaacaagagttttaaagaataatttgacagaaatggttatttctaaattattcaccgtcatgcattagagaaatatttccacaactttcgtctcataattttcactatgagagaagaattttactctgacccatttatgttggatgtgtttaatagtttatacagtataacaaataaccataatttctgtgtttggatgtgcataagaatagctaaattgcttcttgcaagcraatcattcagtggccacagagaagacttaaggcaggaaatgagagatatgtacaatacattgtaactgagttaaggtcctgtcagtttaaaagtgtatccagccagttgccatagctctggctacagaaaaaaacaaaaacaaaacaaaacacacaca

SEQ ID NO: 753864 - DNA, 578 bp, Homo sapiens
atttagctcccacttataaatgagaacatgggtttttgattttctgtttctgcattagcttgctaagggtaacagcctccagctccatccatgttccttcaaaagacatgatctcattcttttttatggcataccacattttctttattcagtctgtcattggtgggcatttaggttgattccatgactttactattgtgaatagtgctgcagtgaacattcacatgcatgtgtgttcatggtagaatgatttatattccyctgagtatatatccagtaatgggattactgagtggaaaggtagttctgcttttagctcttcaagaaatcaccacactactttccccagtggatgaacaaatttacattcccaccaacactgtataagtgatcccttttctctgcaacctcaccgcatctgttatttttttactttttaataatagccatttgatgggtgtgagatgatgtctcattgcagttttgatttgcatttttctaatgatcaatgatattcagcttttctcatatgcttgttggtcacatctatgtcttcttttgaaaagcgtctgttcatg

SEQ ID NO: 753865 - DNA, 475 bp, Homo sapiens
gatgatcttcttgtagagaatcttgcagaagttctctgtatttcctgaatttgagtgttgtcctctctaacaagattagtaattttttctcagtttcttgctttcttctcatccctttcagggatgccaattatttatagatttggcttccttacataatcccatgtatctcagaggttttkttcattcctttttattcatttttctttatttttgtctgactgtcttgtttcagagaaccagtcttcaagtcctgagattctttcctgaccttggtctattctactgctaatacttgtgaatgtatcgtgaaattcttgtagtatgtttttcagctctatcagatcagctaagtttttatccttgctatttagtacatcagcttctgtatcattttattgtgatttttagtttccttggattgggttttcccattctcctgaatctcgatgatcgttattcctatccatattct

SEQ ID NO: 753866 - DNA, 475 bp, Homo sapiens
gatgatcttcttgtagagaatcttgcagaagttctctgtatttcctgaatttgagtgttgtcctctctaacaagattagtaattttttctcagtttcttgctttcttctcatccctttcagggatgccaattatttatagatttggcttccttacataatcccatgtatctcagaggttttgttcattcctttttattcatttttctttatttttgtctgactgtcttgtttcagagaaccagtcttcaagtcctgagattctttcctgaccttggtctattctactgytaatacttgtgaatgtatcgtgaaattcttgtagtatgtttttcagctctatcagatcagctaagtttttatccttgctatttagtacatcagcttctgtatcattttattgtgatttttagtttccttggattgggttttcccattctcctgaatctcgatgatcgttattcctatccatattct

SEQ ID NO: 753867 - DNA, 475 bp, Homo sapiens
gatgatcttcttgtagagaatcttgcagaagttctctgtatttcctgaatttgagtgttgtcctctctaacaagattagtaattttttctcagtttcttgctttcttctcatccctttcagggatgccaattatttatagatttggcttccttacataatcccatgtatctcagaggttttgttcattcctttttattcatttttctttatttttgtctgactgtcttgtttcagagaaccagtcttcaagtcctgagattctttcctgaccttggtctattctactgctaatacttgtgaatgtatygtgaaattcttgtagtatgtttttcagctctatcagatcagctaagtttttatccttgctatttagtacatcagcttctgtatcattttattgtgatttttagtttccttggattgggttttcccattctcctgaatctcgatgatcgttattcctatccatattct

SEQ ID NO: 753868 - DNA, 623 bp, Homo sapiens
acataaagataagtctggcattcgaatgatagctgccagtcagttgagcaaagcaaaagttgtcagctactacttaatccacagagcaggctgtgaagccatgaacagcaaatggagtgtatacaaaacaacaataatactttttttccctccaaaacaaaaataaaattcatttttaacagaattttacaaaggttataaccaattatttggatcagtatttttggtgtgtatagcttttctcactaaatctgttaaaacttatgttaaattttaaaataatgactaattttaaaatttagttattttaaaataaatgtttattactagatttttatgttacaaagtgagtgcatactcatttttctgttaactctctattttttcttatttttatggctaaaccctgagctagcagtagcccagtcaaaatcttgtgttctgatccttgtcttgaccagaccttakttatcttaaagtgtccacagctgtgtctaatccacggcattgaaaaaatattatgatggtccaaaaaaggctgcttatttctgcctgaatcaaggatgctacgttgaatagaatgaggtctgttctgagctataaatatttatagatcggtgttt

SEQ ID NO: 753869 - DNA, 588 bp, Homo sapiens
ttgttgattttctggaataaatgtacaacattgtgtccctataagggcacagatgccaccttgggcagcttactatatctaaggccatccagttttgcagcaccatctttcatctttctggtttgatcaacctcattggttaacaggaggagggtgacttgggtgtaattcaggggccaagctgtgtgctctgcaagggctgtaacctgtgtttctacagtaatgacacctgctccagggatggtcaaagctaaggggtagagccaccaaggggcttgcagcacttgcaaaaagtgggaacgtagcacctcccagttgtrtgggcatctaggcaatgtgggaagcacagtggcaggcacaaaggccatccccaggtacaagggccagtccagttcactggtgcatatggccattccatgtctccacagacccataaactcccagggggcacaaagtccattggagcttgacgttgatgaggccccctattccactacacccttggtgtggtgatatatgttatatttgtgcaggctatggtgggcaaataccccatgttgacaccatcccattgttgctgtatacatc

SEQ ID NO: 753870 - DNA, 588 bp, Homo sapiens
ttgttgattttctggaataaatgtacaacattgtgtccctataagggcacagatgccaccttgggcagcttactatatctaaggccatccagttttgcagcaccatctttcatctttctggtttgatcaacctcattggttaacaggaggagggtgacttgggtgtaattcaggggccaagctgtgtgctctgcaagggctgtaacctgtgtttctacagtaatgacacctgctccagggatggtcaaagctaaggggtagagccaccaaggggcttgcagcacttgcaaaaagtgggaacgtagcacctcccagttgtgtgggcatctaggcaatgtgggaagcacagtggcaggcacaaaggccatccccaggtacaagggccagtccagttcactggtgmatatggccattccatgtctccacagacccataaactcccagggggcacaaagtccattggagcttgacgttgatgaggccccctattccactacacccttggtgtggtgatatatgttatatttgtgcaggctatggtgggcaaataccccatgttgacaccatcccattgttgctgtatacatc

SEQ ID NO: 753871 - DNA, 624 bp, Homo sapiens
aaaagaggtactaaaatattcttacctcctttcacccatgtcatattcatatttgtccccttattaaagacacatttgttctgtcatgtcatcaaaaactgcttacagaaatgagtaatacaatgatgagtatcagaaattccaagaagaacaaaataagttgccagcccctgaggagttttccaggaagccaggaaaaacaaggtacacaarcctgaggaaatcaataataaaattctgttaagtatgctgacaattatctttggatcaagttccaaatgtgaatgtgtgtcataagaatttggagaaaagtgtcattaatgtccagtggaagagagtgggacttcacctggacactgaagtgtgggtaagtgttgcaaggggagggagggaggaggacgagcagaattccaaggcagggaaaacaacatgagttaagtatggagcaagcttgtctgaggtggagctgatagagaaggagaagcttgtatggggagtttgtttgaggacaatcttgcccatggattttgatctgtatacatcaagtagatagaattaattcaatatttctaaggagaattataggatgaaaatgatattttataaagaagactctgagatcag

SEQ ID NO: 753872 - DNA, 624 bp, Homo sapiens
aaaagaggtactaaaatattcttacctcctttcacccatgtcatattcatatttgtccccttattaaagacacatttgttctgtcatgtcatcaaaaactgcttacagaaatgagtaatacaatgatgagtatcagaaattccaagaagaacaaaataagttgccagcccctgaggagttttccaggaagccaggaaaaacaaggtacacaaacctgaggaaatcaataataaaattctgttaagtatgctgacaattatctttggatcaagttccaaatgtgaatgtgtgtcataagaatttggagaaaagtgtcattaatgtccagtggaagagagtgggacttcacctggacactgaagygtgggtaagtgttgcaaggggagggagggaggaggacgagcagaattccaaggcagggaaaacaacatgagttaagtatggagcaagcttgtctgaggtggagctgatagagaaggagaagcttgtatggggagtttgtttgaggacaatcttgcccatggattttgatctgtatacatcaagtagatagaattaattcaatatttctaaggagaattataggatgaaaatgatattttataaagaagactctgagatcag

SEQ ID NO: 753873 - DNA, 592 bp, Homo sapiens
atggtatattttttctttcagatgtgaaactatggaaatacatttataagaagttttcaataaaattgagaaatctatatatttttgaattcctgatatttttaaattacgaaagtactaatgtatttacttcttggcagaaataaagatgaatataaatatttctatgtctaaaaaatgtgtygcaaataatgttaacttactttttcatatttcaaggctagtttcaataaatgtatcactcatgacaaatatttcggccatagtgtaatttttgaattttaaaatgacttttttaaagtcttcactttgtttttgctatagactatttgaaaatatatttatattcatctacttactgattcaaaaatatcccagtgtttctctacttatctcataaggtattacaacattcctcgaattaaacattttaaacttatttatttatgtatttatttattttttgaggtagggtcttactctgttgcccaggctaaattgcagtggcacaatcatagctcactgccacctcaaactcctgggctcaaatgcagactcttgattacctgggactgcagggatgcaccaccat

SEQ ID NO: 753874 - DNA, 560 bp, Homo sapiens
catttatgtttcatttatgttattctaaatagcttgtttttaacagtaagcatatagatacaaactaaattaaaatgcagttcgaacatcattcattcaacagaggttaattgaatgctcactaaaatacaaagcagtggtctagaaacatggaatagaatattgaagaaaacatgcaacctattctccaggattgtacaattcaagatgaggaatcttgcctagaggtgtcaaayattaataactttaagcactgaaaaagtaactttattgaaccaaactagtgtagttgcctcctcttcaagtcttcccaagatttatcttaggaaaccaaaatactaaagaaacataatccaaatcctgaagacaccatcttttacaatcagcacctttcaaactgatcaatcaagcacaaattgggccttccttccttcctttcttccttccattctcttcccttccccttccttcccttcccttccccttccttccttccttccttcctcctccctcccttccttccttttttctttcattctttctgtctttcttttcttttt

SEQ ID NO: 753875 - DNA, 560 bp, Homo sapiens
catttatgtttcatttatgttattctaaatagcttgtttttaacagtaagcatatagatacaaactaaattaaaatgcagttcgaacatcattcattcaacagaggttaattgaatgctcactaaaatacaaagcagtggtctagaaacatggaatagaatattgaagaaaacatgcaacctattctccaggattgtacaattcaagatgaggaatcttgcctagaggtgtcaaatattaataactttaagcactgaaaaagtaactttattgaaccaaactagtgtagttgcctcctcttcaagtcttcccaagatttatcttaggaaaccaaamtactaaagaaacataatccaaatcctgaagacaccatcttttacaatcagcacctttcaaactgatcaatcaagcacaaattgggccttccttccttcctttcttccttccattctcttcccttccccttccttcccttcccttccccttccttccttccttccttcctcctccctcccttccttccttttttctttcattctttctgtctttcttttcttttt

SEQ ID NO: 753876 - DNA, 531 bp, Homo sapiens
tatatcgcatctagtgacaatgtgtgttataaatggaattccaggatttgatttaaatataaaatcagtatcatccttatcctgtgaaattctaaaatcattatcaatgcaactggcattatagtcaagtttggttaaaaaaaattccatagccgggtatggtggctcacacctgtaatcccagcactttgggaggccgaggtgggcagawcatgaggtcaggagatcgagaccatcctggctaacacagtgaaactccgtctctactaaaaattcaaaaaaattagccaggcatggtggcgggtgcctgtagtcccagctactcgggaggctgaggcaggagaatggcgtgaacctgggaggcggagcttgcagtgagccaagattgtgccactgcactccagccggggcgacagagcgagactccatcaaaggaaacaaaaaacaaacaaacaaacaaacaaaacaaaaaaaaaaaagcattccatagctgagactaatgagctttaaatatcttcttaaataatccaa

SEQ ID NO: 753877 - DNA, 635 bp, Homo sapiens
aaaaaaaacttgtgaaccttaactatatacaaatcctaattgttaattataatttaaagaagcttaaaattgttttaaaaattaaattgataattttgtattcttacagataacaagcatgctaataaaaaaagagagagaacccatatcattaggaacattgttgatatgaatatccaaattttaaaccattatgcaaacactattatggtcatttcacctctaatatacatgtttcagtgaatttacaccattcttttactcctcaaatttatttaataactttaatcaaggcttatgcaccatggtgttttcttcagcgctgggctctgcaaatagtttctggtaatttaatcttccccaatttcctatagtttttattctacttataataaaacaatttaaaggctttcatacaatagatcccctttaagaatcattcctatcagtgggcagagaccctayattgggtacttttatagatctaaggaaggctttacatcccaactctatttttcaccaaggtactctataggaaggtaggtaggtaatataagcaatacatttttttgagaatggcccttgcatggggggcggtgtgtgtatttatatgtttaaacattacatacatctaa

SEQ ID NO: 753878 - DNA, 486 bp, Homo sapiens
aaactgtaaatctggctctttcttgactgctcctcagaaagtacaagaaatgggaatttagactcaatttcaaataccaygtgtaaactgagacacagggcagctcattaggagtgtgttcacagccaacaggaacccaaggccaccctcaaacattccttttccagaaagtcctctctaattacatacacacagacagacatgtgcatacatacatatatgtatatatatgcctgtacatatgtgtatatatgcacacatctcgtatatggatacacacacgcacagcaggactattcaccccaagtgcaatgtgtttgagttcgacaatgaggtttagattctaatctggcacaggacattgtcttggcagggtattcagccttttcatctgcactggtctccttctcggggagccaatgagatccattctattcccaaggcccaagagtggatcccagcagccatgttatcctacatgactac

SEQ ID NO: 753879 - DNA, 628 bp, Homo sapiens
tcaaacacagctctcctccattaaataaataagatatctaataggatgacatgtgcctctgaccatgacatgtcacggaagagaagaattcaggaatcaaatttacctagaagctagtcatggcataaaataactaaacctgcaattatagtaacccaccaccagctggcagtagtgttaaatcatgttctgacagtggtttttacaaatcgagttcccatttaatgtggaattcatgcatgaagcgaacaatagagattgcaattcagcaattcaaatctctatagctttaaaaaattccccaaaatatttttctagataataaataataatccatgctctttataagcatttgaaaaaaaaatcttaaaatcacctgtaatactacctcccagaattgtcatgtgttcttttactgtcttttttcyttatataagtacttttcttaattgggatatacatgtgtgtgcatacatacaagacaacacaaatacatatatacatacacatatatagtcttcattttatccacacacttaacatagtacttagcacatagcaagttaatataaacattggttaaaaaattaatacttgaatacattctagatttaaaaaaaaacagagt

SEQ ID NO: 753880 - DNA, 582 bp, Homo sapiens
gtccttgggtatagtaaatggaaattttctctagctttagaattgctaataaaagcattttaggattcaggagctaaggcagtttcaggaagctgccagcaggtgataatcaggtgccatccctacagctgatgtgacatttttctctcaccagattaatttattgataactacatctaagagcataagttccatgaggtagtgagtcctgtgtgtcatctccattgctctggccccagtgccaggcacaggcccaggcacattgtgrgtgctggaaaaacaggatttgaatgaatgagtgaatgaataaatgactatggaaaatttgagggttttcctgtacatcagtttttgttttgttttgttttgttttgttttgtttttgtttttgagatggagtctggctctgtctcccagatggagtgcaatggcatgatctcggctcactgcaacctccacttcccaggttcaggtgatcctcatgcctcagcctctcgagtagctgttattacaggtgcccgccaccacgcttagctaatttttatatttttagtagagacagagtttcaccatgttgtccag

SEQ ID NO: 753881 - DNA, 493 bp, Homo sapiens
tttaataacttttctggatcttttagctgtgagaacagaatagctctggaatttctatgtgagccgaattacaatagtgcagaatcacttgttatttcttacttattattagaagatacctatttggtactatacatctatgtatgtgcacacagacatgttggggatggtgrtgacacaagaggggtctggttattatgcagataattcatataatgatagattagaagtcctaaaaaactagcaaattataaaaagcagccttcaaaaatatttagtacactgtaattggaagcttttatataaagatgaaaaacagggcccctggttttgaggtgtccataagcaaatggaaagtacaaacatataagtagataatctcaatatggtgtggcaatacagcaatagctgagctcagagtgctgtgggggtgcataggaaggatacctaagaatacctagtctaaccaggttgtcagggcttagggacatct

SEQ ID NO: 753882 - DNA, 493 bp, Homo sapiens
tttaataacttttctggatcttttagctgtgagaacagaatagctctggaatttctatgtgagccgaattacaatagtgcagaatcacttgttatttcttacttattattagaagatacctatttggtactatacatctatgtatgtgcacacagacatgttggggatggtgatgacacaagaggggtctggttattatgcagwtaattcatataatgatagattagaagtcctaaaaaactagcaaattataaaaagcagccttcaaaaatatttagtacactgtaattggaagcttttatataaagatgaaaaacagggcccctggttttgaggtgtccataagcaaatggaaagtacaaacatataagtagataatctcaatatggtgtggcaatacagcaatagctgagctcagagtgctgtgggggtgcataggaaggatacctaagaatacctagtctaaccaggttgtcagggcttagggacatct

SEQ ID NO: 753883 - DNA, 576 bp, Homo sapiens
ctttacaagaccaggtcatgaagaatgaaagaagtgcctgctttgcctaatgtggaaacacctacacagagagtcaaggaaaatgaagaatcaggcaaagatcctccaaacaaaggaataagatacattttcagaaaccaatcctaataaaatagagttaaataacataccccacagaaaaccgtcacgaaaatgctcaccaaggtcaagagaatcataaatgcaggaagagatagacaacaatacaataatagtaggatattttagtaccgcacttttaatgatgaataggacatccagacaggagatcgataaggacatagaggacttgaataacacrtagaccaaatagacctaatacacacagaagttttggacatatactacaacaggagtgaacctgaaggacattacggtaagtgaaataagccaatcacaaaagacaaataatatgtgatttcgcttaagtgaggaacctaaagtagtcaaaatcatagataacagaagatataacggttgttgccaggagttcataacccctggcagggagggaaatagggggttgtttaatgggta

SEQ ID NO: 753884 - DNA, 609 bp, Homo sapiens
taactgcttctgcctaaatctaccatgctgtttgtaagactgtatgtttatgatatgattttgaacatcatcttcaggaaaaaattcttactggtttatgctcagatttatgggtctattctttgccccaaggtgagatgaaagcaaaatcaataaggttagttttggattgcttgaagtaagtaacacragccaattttcagtaacctcagatcagtgaagtaggagaaaattagataaagagagaaaaatcaagagggcacgcttgtgtctctaggcacatcatttgtgtcgatgacagaattcatttaaaaattataagcaatcgtgttttagtagcattagagaaaacagcataggttgtattaaatttgatactagaagtactagaaataacaacaaaaatgttttgccctggcacctccctgacccccaatcagtaaccagcctcattagtcatggcacctctcacatgaggcccctatcaccgctttcataaatatagtaagattctctgaatcaaaatcctgtgttgtctcaaaaaataattataaataataattatgattatcatttattgagcacctattgagtacctggcaccgtact

SEQ ID NO: 753885 - DNA, 602 bp, Homo sapiens
actagcccttctcaatcaggggtgactatccccttcaggggacatttggcaatgtctggagacacttttgattgtcacagcgggagtctgtgtgtgtctgtgctacaggaatctggtgagtcaaggccagggatgctgttcaatgtcttacaacccaaaggacagccccccaaaaacaaataataattatcccgtccaaaataycaagagtgccaaggttgagaaactctaatctctcttctcaatcaacttcctttctgctagcctcaaagaaaggcatcaccctctttagaacttccacagctctttctggtgtgaaaaatcacctgtgtctgattcatctccctgacagaagaaaaccctcctcaggccaggatccccgcttcattcatttctgagtgtggcctcatttctcctccagcacacagtcctccctccataaatattccagccatttcaaacaaaatgaaaatacccttcaggaccaatcacgagatggctttgtgattggtaaccatgcatacccagtgtctacaaggagaaggaaaacccatggccggggctcattttcagcctaaaagttgaatacaaatctaccagcc

SEQ ID NO: 753886 - DNA, 602 bp, Homo sapiens
actagcccttctcaatcaggggtgactatccccttcaggggacatttggcaatgtctggagacacttttgattgtcacagcgggagtctgtgtgtgtctgtgctacaggaatctggtgagtcaaggccagggatgctgttcaatgtcttacaacccaaaggacagccccccaaaaacaaataataattatcccgtccaaaatatcaagagtgccaaggttgagaaactctaatctctcttctcaatcaacttcctttctgctagcctcaaagaaaggcatcaccctctttagaacttccacagctctttctggtgtgaaaaatcacctgtgtctgattcatctccctgacagaagaaaaccctcctcasgccaggatccccgcttcattcatttctgagtgtggcctcatttctcctccagcacacagtcctccctccataaatattccagccatttcaaacaaaatgaaaatacccttcaggaccaatcacgagatggctttgtgattggtaaccatgcatacccagtgtctacaaggagaaggaaaacccatggccggggctcattttcagcctaaaagttgaatacaaatctaccagcc

SEQ ID NO: 753887 - DNA, 608 bp, Homo sapiens
gtagcttcagcccctcttctaaggctcagagtaggaaaatggatttgaaatgatgctgatcaggaccttcaccccaaactgcctcaaataaataactaaaggagaaacagcatcctttggtgcacatccttgctgtacacataaggctttgtagaaggtgccatggctctctccgttccagtcagatgctgcccatggacctttgtacagagaaatcctggaggtgcgctgggatcagtgtatccctagtgtatcctattcacatacatagaagcacacaggaacatttttttgaatgaatcaatctttgaaagtttgaaaaatgccagctgaggaaataaagttcacctctcctaaatcacttygaggaagaaaactaattggaaatcagttttctcacttctcctgataatccattacttacccattgtcctattccaggacaaaagacaacacactacacaaagaaaaaactctccttcccaacacatgtgctacattgaatctccagatatgatgaactgagacacttacagagttaagtgtgaaagggcgaactgatttcacaataaattggttaactatttaagtgtttcaagattctactt

SEQ ID NO: 753888 - DNA, 660 bp, Homo sapiens
gagagggcatggatatagagaagaatggagaactgcaaccattcttgtaatctaccacatcctaaaataatcaaagatgttgattcagcagttagaaagtcttctcaccaagaaaacaccaggccagatgcttcttactggcaagttctaccaaatgttcaaggaacagacaaatccaatcatatgaaatatcttcaaaaatagaaaaaggaccatgtcataattcatttttatgaggctattaaagcccagacaccaaaactagacaagaacagtgtraaagaagaaaataatggcccaaatgtattaaagataataaacacagaattcaaagcacaaattaaagaaactaaatctgtcaaagtataaagaaagaggatgcacaatagccaagagtttattttaggaaagcaaggttggttcaaccttggacaaatctattaattggctatattaataaaatataggaaataaactccactagattaaaaaaaggactaaataaaattcagcaaacatttatgattaaaaaatatggtaaatattaagaataggcttgaggctagtcgtctgagaccagcctgagcaacactgagactctgcctctaaaaaaaatataaacatttattttaaattaggaaaaaaagaacagaaaggaaa

SEQ ID NO: 753889 - DNA, 633 bp, Homo sapiens
tgatcatggctcactgcaacctcaacctcccagtctcctgcctcagcctgtcaagtagctgggactacaggcatatgccaccatgcctggctaactttagtttttgtagacacggggtctccctatgtttcccaggctggtcttgaactcctgggctcaagcaatcctcccaccttggcctcccaaagcaccaggattacaggcatgagccactgaaactggccccattctactttcttaggccactagtaacctagtgtgaggggagggtaagagagaaacagaggcaacaacaacgatgatggcaattactacattactgttactgactacaatcaacagcatttgaggagaactgagtatgtgccaagtactaagcatttcacatggaccgtcactcattggctaagtccagtcattattcttgtcttcagacagagaaactgaagtaccmagccattaagaaatatgtgcaacagtgcactgtcaagctaggatgctacgtaattagaaatgaggactctggaattaggctaacaacattagtgacttagaatctttttggagaagggatctataagaaagtgttaacactggctacttttgcaaagaaggcctaggagttgacatggg

SEQ ID NO: 753890 - DNA, 654 bp, Homo sapiens
tcagtatattctcttttttttttttttttttgagacagtctcgctctgtcgcccaggctggagtgcagtggcactatctaggctcactgcaagctctgcctcccagattcacgccattctcctgcctcagcctcccaagtagttggggctacaggcacccgccaccatgcccggctaattttttgtatttttggtagagacagggtttcaccatgttagccaggatggtctcgatctcttcatctggtgatccacccgccttggtctcccaaagtgctgggattacaggcgtgaaccactgyacctggccatgaattagtatattctaatggaaaaaaatagcagtggattccctttaacatatatataaacattttcatttttaacataggatcttttttattatgtgttttcctacaacaaaataattatttttatattgtggtaaaatacacataacataaaaatttaccgttttaacccttttaagcatacagcttagaggcattaagaatgttcaaaaatgttgtgtaactgtcaccactatttctagaactttttcatcatttcaaacagaaactctgtgtccattcaacaatgacaccatgtttttcccatatcccaagcccctggagaaaaataatatcatttcaa

SEQ ID NO: 753891 - DNA, 647 bp, Homo sapiens
aagaagaggaagaagaagaagaagaagaagaaaagaggaggaggaagggagaaagaaggagaagaagaaaaagaagaggtgagggaagaggaagaagaaagaaaaaggaggaggaggagggaggaggaggaagaaggagggggaggaggaggaaaagaaaagaaatggaaactacatttgcaacagttcccacaggtagaggttggaatttgtggtcttaacctaacagtttgattgcctgctycagcaaaaattttaacaactttcatcaaatttaaaaaagacgcagagttttataacactcaaaatgctcagaacataatccaaattactgggcacacaaagaatgagaaaaatctcaaattgcctcgaaaagcagtcaactgacatcaacactacaatgacatagatactgaagttatctgacaaaggctttacagtagctatatacaaatgctccagtaagcatcacaaacacatttggaataaatgaaaaaatagaatatcttggtaattaaatagaaagtatgaaacagaaccaaatagtaattttagaactgaaaaatacaataaccaaagttaataactcattgtatgggatcaatagcagattggagatgacagaagaaagagttagataacttaaa

SEQ ID NO: 753892 - DNA, 471 bp, Homo sapiens
tccagagttctcactctctctcctctctagtattctatcttgcaagttctagacactgtggcccctgaagattcccatctcggtgtcttcacctcatggagactgctagacactgcctggattcccgtttcccatactgcatcctgtaaactgtagccaggcagtaagttagggcartcgtggagctcagctctttcattttccatcactttggggtcactgaccttcattgcatgatatctaaagtatcaaaacttgtttactatatcttgttgatttttcagtggttttaggcaggatatatctttttgctattattctatcttggtcagaaaaagatccatctttctttatttctcctggaggatattttatattctatctaaaatattatcaattttatctaacttttcatttttacacccatcaagttgtagttaatatttagtaaaaatttttgttaaacttact

SEQ ID NO: 753893 - DNA, 564 bp, Homo sapiens
aaattttaagccagattttgaaaatgtaattatataaatacatccaaaatgtgtgtgtgtgtgcgtgctgtgtgtatgtgtgtgtgtgatggttcatttttaaagaattttatattttgttattcttgaactttttcacatacagattgatttcccataagctcttgttaaaatggcctcagtttaattttttgtgctctgctcaaaasagtattaatgaaatgaatcaatgtccaaagtatgctacctggtaagttggtgaggatcccagaaatgaaattaggagacctacatttcagtcttagtcaatattttgtgttgtttctcattaaaaggaatgtatttcaaagaaggaaattctagaccagttgttcttaaagggtagtccagctccctgtgagagtccccaagacacttgcagaagggccaggagctcaagattatttttatgattgtactaagttgttctttgccttgttcactctcactgtctcatgagtgtatagtggaaggtgcatgtacagaaagagaacatatagaggctgcataacttgtgatgacatc

SEQ ID NO: 753894 - DNA, 650 bp, Homo sapiens
agttactaaaagagattttcacactttctcccttttttgttgtcctttgtaggaaggcaaatagaaagaagatgagatagagaaaaagggggtagggaatgagaaggaagatggaagacagagggaagcagtgaagatacttaagagtagacagagcctccctaagccccygtcttctaaactttccatccagcctaaaaccccttagtcacctggcagttatgtaacccccaatcccaaaatcccgggaaccttcaaattacccttgggggaggcttgggattagatgctgaggacagaggattagtgtcacactcaggggtaggtttgtataccaacttgtccccagcgggaacccagattcataggacctatgcctccttgcagggagtaaagaaaccttacctgactttcaaaatcaaccagtcgcagggcttactggattcctaacataaagaaacaaaatttgtttcatattcaatggtgctgggccactctattactatgtagatgtgttagtttcaaacacagaagccaatatataaaagcctatattttatatgattacaacccaggtgtatgtgttttatcttatacttatgatgcttttaaaatatagagtaatttctcttgcaaggaatataataatt

SEQ ID NO: 753895 - DNA, 601 bp, Homo sapiens
acaggcatgggccaccatccctggccacacaattgttttttaatttagttatagtagtctgtaccactgtaggatgacaatagttaacaataatatatagtttcaaatagctagaaggaagatactgaacagaaagaaatgagaaatgtttgagatggtagacatgctaattaccctgactgatcaccatacattatacacatcaaaacatctttatgtaccccataaatatgtacaattattatatgtcaatttttttttttttttttgagatggagtctcactctgtcacccaggctggagtgtagtggcgcaatctcggctcactgcaacctccgcctcccaggtgcaagcgattctcctgcctcagcctcctgagtagctgggataacaggcatgcgccaccacacccagctaatttttgtatttttagtagagatgggktttcgccatgttggtcaggctggtctggaactcctgacctctggtgatcagcccacttcagcctcccaaagtgctgggattgctggcgtgagccaccgtgcccggcgtatatgtcaattttttaaataaataaaataataaatttttaagcacccaa

SEQ ID NO: 753896 - DNA, 600 bp, Homo sapiens
cttaacatacaatgtgatacatcatatcaaccaaataaatgacaaaaacagtatgatcatgtcaactgaaactgaaaaagtatttgataaaattcaacatcccttcatgctattaatccttaaagaaacaggtacagaagaaacataccacaacataataaaaactacaggaaagacacccacaactagaatcatatggagtgaggtccaggctgcattgagttgtgatcccaccactgcactccagcctgggcaacagagtgaaacactgtctcaaaaaaaaaaaayacgtaaaaagaggtatgagcctcttttataggtgcagtgactcacaactgtaatcccaacactttctgggaggctgaggtgagaggatcttttgaggccaggagttcaaggtcagcctgggcaacatagtgagaccctttatctacaaaaaaaattttaaatatttgccaggtgtggtggcacgtgcctgtagttttaaacaattatcatatgacccagatagtgtattccttagtgatacaaccaagggaaatgaaaatatacatccacactaaaatttgtacacaaatgttcacagcagcattgtgcata

SEQ ID NO: 753897 - DNA, 600 bp, Homo sapiens
cttaacatacaatgtgatacatcatatcaaccaaataaatgacaaaaacagtatgatcatgtcaactgaaactgaaaaagtatttgataaaattcaacatcccttcatgctattaatccttaaagaaacaggtacagaagaaacataccacaacataataaaaactacaggaaagacacccacaactagaatcatatggagtgaggtccaggctgcattgagttgtgatcccaccactgcactccagcctgggcaacagagtgaaacactgtctcaaaaaaaaaaaatacgtaaaaagaggtatgagcctcttttataggtgcagtgactcacaactgtaatcccaacactttctgggaggctgaggtgagaggatcttttgaggccaggagttcaaggtcagcctgggcaacatagtgagaccctttatctacaaaaaaaattttaaatatttgccaggtgtggtggcacgtgcctgtagtyttaaacaattatcatatgacccagatagtgtattccttagtgatacaaccaagggaaatgaaaatatacatccacactaaaatttgtacacaaatgttcacagcagcattgtgcata

SEQ ID NO: 753898 - DNA, 602 bp, Homo sapiens
ttccattcaattccattccattttaatctattacattgcaatccattacattcgagtccactctattccagtccattccattctggtccattccatttgattccactccattcgattccattcaatactactgcattccattcgattctattctattcgaatgaattcctatcgaacccattcttttygagtctattctatttgattaaattccatttgagaccgttacatttcggtccattcgattccattccattccattccattcaatgccattccatttgactatatttcttgagaatccattcaatttgagtccattccattccattccatttcattctattccatttgatgacattcctttcgattctattccattggactccattactttccattccgttccatccgattccactccattatattcctttccattccatttctttcgtttccattccatttgagtccattccactccagtccattccattggagtcttttccactcccgtgaattccattcgggtccattccattccattcccatccatttgagtccatttcattcccttccactccattggatatctttccatt

SEQ ID NO: 753899 - DNA, 602 bp, Homo sapiens
tctccttttcctggaggtaccagctatgcagataaaagcagaaattaatgtcagtagcagtgtgttcatcatgtgtctatgccttcatgacaaaggaagtttaaaaacttgtgttcctggtttctgcattgggaaagtaatattaataatgttagaaattctccaaacatggggcgacttattaaaayatgctcaggccaggtgccatgactgacgcctgtaatcccaacactttggggcaccaaggttgaagaatcatttgaagccaagggtttgaggctagcttgggcaacatagtgagactgcatctctacaaaacaaaaacttttttaaaattagctaggcattgtggtgtgtgcctgtagtcccagctactcaggaggctaaggcagagggtccctagaacccaggagttcaaggatgctgtgagatatatgatcgtgccactattccaacccaggcaacagggcaagaccctgtctctttaaaaataataaaataaaataaaagctgcttgggcaaactgttaaacgtttgcttctattcctgagatacccaactgctccagaattttttttagaatacattactagatttactat

SEQ ID NO: 753900 - DNA, 548 bp, Homo sapiens
tggtgtggatgtcctttttgttgatgctgttcctttctgtttgctagttttccttctaacaatcaggaccctcagctgcaggtctgttggagtttgctggggttccactccagaccctgtttgcctgagtgtcaccagtggaggctgcagaacagcaaatattgctgcctgatccttcttctggaagcttcatctcagagggacacttggctgtatgaggtgtcagtaaatccctactggcagctctgtccattctcagagttcaaacttcatgctggagaaccactgctctcttcagagctgtcagacagggatgtttaagtctgcagaagtttctgctgccttttattcagctataccctgcccccagaggtggagtctacagaggctkccaggcctcgttgagctgcagggagctccacacagttcaggcttcccagctgctttgtttacctactcaagcctcagcaatggtggatgcccctctcccagcccaggctgccaccttccagttcgatctcggactgctgcactagcagtaagcaagg

SEQ ID NO: 753901 - DNA, 562 bp, Homo sapiens
cattagagtattaaaggattctatgttcactcatatatttacctttaccaaagaagtttatattttgtatgcttttgtatttctatccaatgccttttcatttccacttggaggactccctttaacattttttgtaaggtaggtctagtggtgatcaactccctcaccttttacttctctggggaactctttgtttgtccttcatttttgaagtagagttttactggctatacagttcttggttgacagttttttttttctttcagcccttttaatatatcatcccattctcttctgrcctgtagagtttttgctgataattccattgataaccatatagcatctcccttgtatgtgacaagttgctttgatcctgttcctttcaaaattctctctttgtctttaacttttgacagtttgattgtaatgtgtctcattgtaggtcttttgcaaattatccaacttggagttctttgagcctcttggatttgtatgtccatttccttctttaagtttgagaagtttttggttattatttttttaactggctctctgccccttt

SEQ ID NO: 753902 - DNA, 562 bp, Homo sapiens
cattagagtattaaaggattctatgttcactcatatatttacctttaccaaagaagtttatattttgtatgcttttgtatttctatccaatgccttttcatttccacttggaggactccctttaacattttttgtaaggtaggtctagtggtgatcaactccctcaccttttacttctctggggaactctttgtttgtccttcatttttgaagtagagttttactggctatacagttcttggttgacagttttttttttctttcagcccttttaatatatcatcccattctcttctgacctgtagagtttttgctgataattccattgataaccatatrgcatctcccttgtatgtgacaagttgctttgatcctgttcctttcaaaattctctctttgtctttaacttttgacagtttgattgtaatgtgtctcattgtaggtcttttgcaaattatccaacttggagttctttgagcctcttggatttgtatgtccatttccttctttaagtttgagaagtttttggttattatttttttaactggctctctgccccttt

SEQ ID NO: 753903 - DNA, 604 bp, Homo sapiens
ttctgaaccccgaatgctcagggagactgatttgagtaataataaaactctgatctcccgcacagccagctctgcctgaattactctttctccattgcaattcccctatcttgataaatcagctctgtctaagcagggcacgaggtgaacccattgggcagttacacagtctattggtgatttccgatagggaatttttcaattgagctactgtattccttagctccagagtttctgtatggttccttttttttttagtttctatctccattaatatwttcattttattcatgaattatttcctgctttcacttagttgtctatttctgttgtcactgggcttcattaagagagttaatttggattctttgtcaggtaactcatttatctatttctttagggttggtttctggagatttattttgctcctttaatttagtcatcaggtttctctgtttcttcttatgtcttgttattttttattttttatttatttttgccaagatttgggtgtttgaaaaaactgccacttctcccagtttttatcagctggcttcatacggaagaccttcatacctgaatcagcatggctataggttccagc

SEQ ID NO: 753904 - DNA, 548 bp, Homo sapiens
ttagatcggactcgaatataatggatttcaatgtaattgattagaatggaattgaattgaatggaacagaatgaaatggaatgaaatggaatgaaatggaatggaatagaatggaatgcaatggagtggaatagagtggaatcgagtggaatagaatcraatggaataaaatggaatggaacagaatagaatggaatggagtcgaatggaatagaccagaacaaattgaaatagaagatattggaatcgcacagaaaggaatggaatgtaaacgactcgagattaatggaatcaaatggaatggaatcgaatggaatggaaccgagtgtaatggaattgaatagaatagaaaggaatagaatggaatggagtgtaatggaaagatatcaaatggattggactggaatagaatggactcgaatggaatgggttggaatggaatgtacttgaatggaatggactagagtagaatggactcgaatggaatcgactggagaggaatggactcgaaaggaatggaaacgaatggaatggaatggaatagaatg

SEQ ID NO: 753905 - DNA, 548 bp, Homo sapiens
ttagatcggactcgaatataatggatttcaatgtaattgattagaatggaattgaattgaatggaacagaatgaaatggaatgaaatggaatgaaatggaatggaatagaatggaatgcaatggagtggaatagagtggaatcgagtggaatagaatcgaatggaataaaatggaatggaacagaatagaatrgaatggagtcgaatggaatagaccagaacaaattgaaatagaagatattggaatcgcacagaaaggaatggaatgtaaacgactcgagattaatggaatcaaatggaatggaatcgaatggaatggaaccgagtgtaatggaattgaatagaatagaaaggaatagaatggaatggagtgtaatggaaagatatcaaatggattggactggaatagaatggactcgaatggaatgggttggaatggaatgtacttgaatggaatggactagagtagaatggactcgaatggaatcgactggagaggaatggactcgaaaggaatggaaacgaatggaatggaatggaatagaatg

SEQ ID NO: 753906 - DNA, 612 bp, Homo sapiens
aaatagaaagcaatgaaattgaatggaatggaatgaaatggaatggacttgaatggaacagcatcgaatggaatggcaagaaatagaatggaatggaatggattggaatggaatggaatggacccaaatgtaaaagaatcaaatggaatggactaaaatagaatggactcgaaaggaatggtatcgaaaggaatttattcaaatagaatggaatcgaattaaacgcaatagtagggaatggaattaaaagaaatggaatcgaatggaatggcccagaatggaatggactggaatagaacgaactcgaatggaatggactgcaatgtcattgattcgaaagcaatggaattgaatggaatataatcaaatgcaatggaayggaaagcaatggaatggaattgaatggaatgcaatggaatggaatgtagtggaatcgagtggaaaggaatcgaatgcaatggaatcaattggaatggactggaatgcaatggactagaatggagtggactggaacataatggaatcaatcagattggaatcaaatggaacagcatggaatggaatgacatggaatggtcacgaatggaatggagtcgaatgtaatgtaatcga

SEQ ID NO: 753907 - DNA, 612 bp, Homo sapiens
aaatagaaagcaatgaaattgaatggaatggaatgaaatggaatggacttgaatggaacagcatcgaatggaatggcaagaaatagaatggaatggaatggattggaatggaatggaatggacccaaatgtaaaagaatcaaatggaatggactaaaatagaatggactcgaaaggaatggtatcgaaaggaatttattcaaatagaatggaatcgaattaaacgcaatagtagggaatggaattaaaagaaatggaatcgaatggaatggcccagaatggaatggactggaatagaacgaactcgaatggaatggactgcaatgtcattgattcgaaagcaatggaattgaatggaatataatcaaatgcaatggaacggaaagcaatggaatgraattgaatggaatgcaatggaatggaatgtagtggaatcgagtggaaaggaatcgaatgcaatggaatcaattggaatggactggaatgcaatggactagaatggagtggactggaacataatggaatcaatcagattggaatcaaatggaacagcatggaatggaatgacatggaatggtcacgaatggaatggagtcgaatgtaatgtaatcga

SEQ ID NO: 753908 - DNA, 597 bp, Homo sapiens
tccattcagttctgttccattccactcgattgcattccatactgttgcgttccattcgattccattctattcgaataaattccatttcagaccattcctttagagtccattctatttgagtccattccattcgagtccactacatttggttccattccattctattccatgccattccattctattctattacattcragaccatcccattagtccattccgttccattccattccattcgatgccattcctttcgattccatttcattcgactccattccattcaattcctttccatccaattccattccattctattctattccattccattcctttactttccattcgattccatttcatttgagtccactccactgcagtccattctattcaactccattccattgcagcccatttgagtccattctattccattccattacattggacatctttacattaccctccgtttcattctatttctttcaaatccgttcaattccattccattcatttccattccattcgactccattccattctattcttttccattcgattcaaatccattcgattccattttgttccagtgca

SEQ ID NO: 753909 - DNA, 595 bp, Homo sapiens
tattgttttttctgacaattttgttccacagttgtttgaatcggtggatgcagaacccatgaatatggagagtcaatttcatttcataatgcccaaaggtaaatgcgtaactttttccgcacagctaatcttctagcaaccccattgctgtccatggcaagcaggcttagttaatctcgccctttccagtttcaggttcattaaaaaactcttgtcaaactctctttcatcccaycttattcttcattctcacttccatcagcatatcagtccaggccctagtaacattaatgttactaatggcactgttagtaatattacttaccagcattcaagtgggtctccctgatgccattgtctcccatcctgaaatcactgctctttatatagaacttgtatgatgtcattcattggctcaaaaacttttaaagccttcctttttctactaccccaatctaaatttctatgcctggcttttattaaaacccgtaatttggccccaccctagctatttaactttattttccactattcgccagtctcctccctcatcaacgagaagacataccataatcaacctcaccactaacccttg

SEQ ID NO: 753910 - DNA, 423 bp, Homo sapiens
agcctctctttaacatgtacatagtaatttgggtaagtcaagctccatcctgaaggacataataagggactctttaagcacattattatgaaggcccttcagggataacaccagagtgatgaggtgccctataccagggacaatggagacagagtwcttgggattcatcactggagtcctcaaagcatcttccaagggcataataaggaaggactcaaacacctttgaatctccgtgagaccaggcatgaggtcttttgaaagagttctttaactggagtgaatgtcaaagagaagtataataaaataaaagacgtgagtagggtcccccttgttcataaaatgacactacctaaatcaccaaatctcactgagccttggtttaactcaagaggttccatgccactataagaggtggtaactg

SEQ ID NO: 753911 - DNA, 576 bp, Homo sapiens
ttgagccttaagttttcttggccatttctaggctaataaactaagaatcatgtaaactaagccaaagtagaatagacataaaagtcctaaacacttcaactttctatccttcaagaaatatacctcgcaaagctcatttgagagaggaaaagctttcctccaccctctgttttacagcgctgaggcttctcatcacatttctatgacttgtagcttaaatccatgttacatggtcactggcattgttagkgcttctcttttaacactgttggaattaatcaatttggtggcatatttaattaattctatcactagagggttgtaaaattacatatatgaatacctcactttagaggccacttaatttttttccaaggggatatttgactatatttcacttgtgtcttatttaatgattttataatttaaaccctaaattataaatctagaatttagaaagtatatttccccactggattacatttttggaaatattattttatatgtgcacaaatattacaaaatcactgtagacacctgaaaactatattatcttttaaaggcaatatttacatt

SEQ ID NO: 753912 - DNA, 454 bp, Homo sapiens
ccaccccagcacccagaaattagaaaaactagctgaggtgtgagagggggaatggtgacagccctggaagtcaggataaaaaagagacgaagcctccaggccgccatcctcaccagtgcccaccgggccctgaagctctgcagggggtggcttatgggctcagaggcttgtggaccaaggcttctcagctgcttctgaggctcccagctctgcaaggggctgggtttcttctcctggtaaactgctcccaatgcctgtcctgactcactcacttagctgggctacctgctgggcctccttcctggtggrccctccccatgtgcctccctgtgcaggtggggtatcccctcgagactccattattctttgaggctttcaggccaggatgaagaaccccagcctctcagcaggagcagccacttgggggaagcagagggaatagaaaggcacacat

SEQ ID NO: 753913 - DNA, 588 bp, Homo sapiens
ttatattcacttatgtcctctgcaatgatagacaattctaacatcttattttcccacattgatgattttgtttttttctctcatgtaatttctttggatgttaacatttttgccttgttctaaaatgtcaagacacaacaaccagtattttactattatggcgttaggtgtaagtttttcactgatgctctttagcagatttargaagtttgcttgtacccttcctttccagggagattgtgaatgaatattggattggtcaaatgctccctgtgtctgttgaaaggctctttctgttaatttcctttatcctattactttgtgtaaggcactgattgattatcggatagatcaatattgcatctgtaaaataattccatttggtcatggtgtacattcattttgatatattcttgattcatttcgcttttttgagaatttctctgtgtgtattcatcagggaaattcatccatacacatatttacttctgatgcttttgtctgcctttagtatcagggtaatactggcctcacagaacaaattgggaagtgttcccaataactgtcccatattttctggaaggtctt

SEQ ID NO: 753914 - DNA, 584 bp, Homo sapiens
ggcctgtatccgccactgggcactccacctcttcaagtggggtcctgtgcattccttttggaggcttcaaaagactttcctctctgactcccggcgtcttcacctggacactgtaggaccccagatctgtgtgtttcccaagtgtytatagcgccaggtgccccattgtgacagggaagatgaccaaattaagtgattagggccgtttgaaaaaaaagcaggagagatgctgtatggaggaggcctgacatgactgcctctagcctgcggctgctggtgccatgcgcaggccggactggtctctgccagggtgatgtgatccgttgtgctgaagattctcaccatttccttcctttccccatcggggacacctgggtaaccagctgaagcagtagttccccatccggaacaaagactgcagaccctcgcatgggctccagcctgcaggacacaagcgtgagccttggaggaccccacatacctaggtggttgtgggctagacctgtggccttcgctgggttcttgactcatttctggagtgcgagggttttgttctttttcaactggaggtggcagatgactgt

SEQ ID NO: 753915 - DNA, 584 bp, Homo sapiens
ggcctgtatccgccactgggcactccacctcttcaagtggggtcctgtgcattccttttggaggcttcaaaagactttcctctctgactcccggcgtcttcacctggacactgtaggaccccagatctgtgtgtttcccaagtgtctatagcgccaggtgccccattgtgacagggaagatgaccaaattaagtgattaggrccgtttgaaaaaaaagcaggagagatgctgtatggaggaggcctgacatgactgcctctagcctgcggctgctggtgccatgcgcaggccggactggtctctgccagggtgatgtgatccgttgtgctgaagattctcaccatttccttcctttccccatcggggacacctgggtaaccagctgaagcagtagttccccatccggaacaaagactgcagaccctcgcatgggctccagcctgcaggacacaagcgtgagccttggaggaccccacatacctaggtggttgtgggctagacctgtggccttcgctgggttcttgactcatttctggagtgcgagggttttgttctttttcaactggaggtggcagatgactgt

SEQ ID NO: 753916 - DNA, 650 bp, Homo sapiens
ttttctatttccagtttatttaatgtttttatcatgaggagtgttgaagattttcaaacctttttactttgtattttccctatattaataccttgccagatgtattattagagtattgttatggagtatgttctattattcagagttgtcctgttactctattgatagtgtcctctgagagacactattttatttcatttgtttgtagtctctatcccagtaccacactgttttgagtaacatgactgtgagtaacttttgacgttaggaaatttctcattatgaaattagagctctgaacatttttatctcttttttttgcgatcgttttgactattcttggttccttgagattycacttgaattttagaatgttagtttctgtttccatttaaaaaaagttattgggcttttgattgggattgcactgcatttatagataattttaggagaaattgccacattagtacttttaagagagtttccaagatggcttactggatgcagccagcaagtgttgctcccaaagagaaagaccacaattttgactacatcaacatagtttgaatagatatttggagagaaaatggatagtgtggatggagaaaaggtgcgttttctaagactgaagagcaaggaagctggggtgc

SEQ ID NO: 753917 - DNA, 640 bp, Homo sapiens
ggagagaagatatccgatgaggaactttatctgcaatactaaaaagttctataaattggtaagaagaagacagataatccagtagaaaaatgggcaaacgatttaaaaaggtccttcatgaaagggaatattctaacggtctttaaaggtatgaaaaggtagctgggttcaatggcacacatctgtagtctcagctattcaggaggctgaggtaggaggattgcttgagcccaagagtatgaggccagcctgggcaacatagcaagaccctatctcttataaaaaagtatgaaagctgggcatggtggctcatgcctgtaatcccagcactttgggaggccaaggcgggcggattacctgaggtcatgagttcaagaccagcctggccaacatggtgaaaccccgtctctactaaaaatacaaaaattagcccaggtgtggtggcacacgcctgtaatcccagctactcgggargctgaggcaggagaattgcctgagcccgggaggcggaggttgcagtgagctgagatcatgccactgcactccagcctgggcaacagagtgagactctgtctcataaaaaaaaaagtatgaaaaggtgttcaatctcattagcattagagaaatgcaaacaaaatat

SEQ ID NO: 753918 - DNA, 644 bp, Homo sapiens
cttcagtctcccatgtggctaggacactaggtgtgcaccatgcccagcagattttattattgttattattcttatctttttccctgtagttattctattccagcggaggtagccttagctttgtcctgggggccaccgccagcatgagtccatgtttcacggcccccaracatccctgaaatgaggtagcaccatctctgtggcccgccaaccccagccctgagtgggagccccggctgtttttctctcattctattagtttttccgtgagcatctcctatgtggccaccagggagctgggccccgtgactgacatctgcgctgtagttccactggagaaaaaaaagacaaaaaaatcaatgcaaaaacaaggaaatgtaagagacagttcttctcagccagatggaagattagatagtttggagagaaacactataaaacatgttcaaatttagatacaacataataaatataccatttatttattttttatttgttattatttttttgaaatggagtttcgctcttgttgcccaggctagagtgcagtggtgcgatctcggctcaccgcaacctccacctctcggattcaagcgattctcctgcctcagcctcctgagtagctgggactacagccatgggcc

SEQ ID NO: 753919 - DNA, 508 bp, Homo sapiens
cactttgaagaaaataagcagagccaggcgtggtggctcacacttgtagtcccagcactttgggagcctgtggtgggaggattgcttgaggccaggagtttgagaccagcctggataatatggtgaaactccgcctctacaaaaaaaaaaaaaaaaaagaaaattatccacgtatggtgtcacgcacctgtagtctcagctactcgggaggctaaggtgggaggatcgcttgagcccaggagattgaggctgaagtgagctatgactgcaccactgcactccagcctgggcgactggacccagagatttagagatagaagcgagaccctatctctaaaagaaaaacaccaaaaaccaaaaaagagggcgaragagggaaacaaagccagacagcagttaaagtcacaaggacagatcttaatctgtaatatactgttgcaatagggaacagagtccagtgtgaactgaactcctatttgtacagagaatgagggaatgggagtggggg

SEQ ID NO: 753920 - DNA, 553 bp, Homo sapiens
aaggggttctgtgtataaggattccgagttcaaaattgagttctcaagcgctggtggaaggtttagctacaggtcacggagaagatcagggaagcaacaggacacgcgggacaagggagcgtgaggcttaggagcaatkagagggagacaaaaaggttctgctatctgccaaaccttcttcggtctgggccctcccttagcaaacctggggctttatactccctctccaccaatccctgatgaccccggtggtgcctcacaatggacaatgccaagtagcgcccgcatcattccaatgacccctcccccatctcagtctcccacactcctcgcaaggacaggtcctctctggaaccttcacaaacctgatttctggtcctccccaaccagctccctgtccctgcttctgggcgctccttccttcctgagctcccagggttcctcaaggtcacttttggcgacaaaacataaaaaacaaatgatggcaggatggcaggaagaacctcatacccaagcagagtgccaggttttacagcctccgctcagccattca

SEQ ID NO: 753921 - DNA, 358 bp, Homo sapiens
ccgtctgaggataggaggaagcaatctgttgagcacccgtgtacctgagtgtcatcacctcccaagggcatctttcgttccagagctggcaccttggaaggcccttggtcactgaaggcagtgatgatggtaacagcagtaaatcatcatttacggctgatgagggaaggccagarggtagggctcctaggtcctggataagaatgagggtctgggcactcctggggatagctgagtggtaggactcctgggtccccagggtgcaggtccatcttcagtggcattgggcctaggctgggatgctgagttatccactggagcatcagcagtacagtcaggcacagaggcagtggatcca

SEQ ID NO: 753922 - DNA, 574 bp, Homo sapiens
ctgtctccaaaaaaaaaaaaaaaaagagtttttttttagatcatcagctattgttagtgttagtgtatgttatgtgtggctcaagacaactttgtttcttttaatataggcagggaagtgaaaagattggatatccctgctttataccaagaaagacaacaccccacatttgcaatgcctaaaaacactaccagccatctgaaaaacatgagacttctaacttctgttcttttttgtagcagtggaatcccacggtgatatctgagggatgtggttaccttttggaggaggttgacggtttctaaggatgattctttctgagtgaaatattgtcggtgtcattgaccttttcattatttcaactattattattccaggttatcaatagtctggctgtctatcgtcatcgtgagactgactttggtgtaggagttcgagaccaccctggccaacatggcaaaaccccatctccacaaaaattggataatttgataattatcattattgggtttctgagacgttacacatttaacrttctcttctgcacaagttgcctttgtgtgagtatactaac

SEQ ID NO: 753923 - DNA, 615 bp, Homo sapiens
ggcctagctgggcgacttcgagactgctgaggccccctgtaggcctctctccctcccctgctgcccacagcaacacaagtgggctggggcctttcgctggggcctcctctcctctcctgcctctaggatggcctcacccagcgcaaggcatctggccctctggacccacagacagaggccagccatgttgcccgttctcccctgccgtcctcccactgggacttgctcaacaaccctatagggtaggtcctattatcacccccatttcccaggggacgggatggaggcctagagtggaactgccagaaatgctggggtgatggcatacccgggtgagtggggtctgtctgagatggcttctagktggaagctgccttgtgaaggcattcattcattcattcattcagagatggggtttcactctcttgcccaggctggagggcagtagcatgatcataacccactgcagcctcaaactcctggccttaagggatcctcctgccttagccttccaaggagtagtgctacaggtgcaagccatgcacctggcctgggaaggcatttagatgggccagttaggaaccaagaggttgggggaggttgtttgggaggtgg

SEQ ID NO: 753924 - DNA, 580 bp, Homo sapiens
ctggggcagctcctgagccagccccagggctgtgggatcccccagggcattgcagccaagcctggaagaggagaggaatgagcattgagtactgggcctgcccactcgggacccccgccctgccctgtgcccactgcgggagaggaggccaggtggacctggggggcacagagggcagaggccacctgggcagacactcacatcaactcctccaggcgcctgcaaagaacgagagactctgccaactgcactcccccggctgagctgatgctattccctgagaggctgtgggaggggggcagccatcaggtcctctgatgccccctctccccgacaccccagcacatctgctgggtctgccacccctgcttcagggggcctaagagacaaccccccgacaccacacacctacccagacaatgaggcagaaaggcccagagaagagcaggggctggggtggcttaaggtcccrcagtgagggccaggaggtcaccgagccccactgcctggacactgaggttggcgcaggggagattttaccatgctggcctcagctaggggccagtatctcctaggacca

SEQ ID NO: 753925 - DNA, 622 bp, Homo sapiens
tgtggataagaattattattcagggatgtgtgttaattaatgggggatttaaggatattcaagccaattttgctaataagcaatatttgccaaccttgaaatctaactctggtgggatggaaatctactttactccaatgcattaaaaatttagtatttaacacatttgagtgtttgctaaattaaaattttgaatataaacttcaaaaagtaaaattaagtgttttggggaaaccctggaaattactgctttctatgttaatacytactaagcccattcctggtttcaaagccagggtttaagaggttttattataattacattttgtaaacttctacccttctctccttttctttttctgtaatccagcaatatatccgacttgcctttctcccctcttcttccaagtcccagaacattcttttctggagcatttaaatcccaaaggagaactgtgagctctaagccaccaatcaaagccaacttttacagtgtcttcttttgtctttctatttgtaggcaactcctgcccatctctccactccctgaaacccacaactatcccctcaggccccgccataactgctttttcccacctggcaaacagcctcactgaattct

SEQ ID NO: 753926 - DNA, 604 bp, Homo sapiens
gcccctgaatgtgtacagtaatcttggagaagggatgaagagtaccaaaggatctggaatcgggcttcagtcaaatggatttgagtctctaaagaatagtgccttacctgatgcccagagatattggtttatggcagtattttctcttctttcttccatacagaagtctaagacttataggtaatcagatttattggtctttattctttgatttctggttttcatgacatgcttaaaagacattttatcatgtttgagcatctaaatccttkatttgtccagagttctacttagtggaaagatggaaggagtgcttacttttgttttcccaaaaaaaaacccagctcaatctttttctctgataatttgaaatacctcatttaaccatgtgttaaattttcatatttacacacactctgtcctattccattgattctattcctgtgctacttctatttgattactataattctttgataaatcttaaagtctgatagggaaagtcttccttgtcagtattttcttggcattgcccctttgattattctttcaaccgataggatcattttgccatatttaaaaacaaaacaaaacaaaaaccctc

SEQ ID NO: 753927 - DNA, 568 bp, Homo sapiens
cttttcagaaatattcctgaaaacagtgagttctgacaaataaattgtaaatagcagcatctgacaagtgctgcaagtaggtctggggaggcaaacattgtagttgggcagctctcagaaaaacggccttccgttaataaaaaaaaattaaggaataaatcgatattagggagttagtttgcagcatctgttrttgcatccactatgagagtagcttattttaatattaaggctgtagttatatccctaaaaaatagttccagagattgggtaagacaataacagctcaatctggagttgagcagttaattggattgagagttaatatgtcatgcttctgtgaaagtcaaataatatgtcaggaatggggagcacattttctattaagagccactgacctatagggagtagttcacaaatttactgtattttttaaaagaaagctaattgtaagaagagaaggttaaaagtttcagttctgctgttactcagcgtggcattaggtaatctaaaacttcattaaataaatgataggctcaataattaaaattattctcttttttaagat

SEQ ID NO: 753928 - DNA, 410 bp, Homo sapiens
atccttatgcctttgcattctcatagcttagcaaccacatatgactgagaacatacaatgtctggttttccattcctgagttacttcacctagaataattgacagacttcataatttaaaaaaaactgaaatgtatttagctcatggttgtggaggctgggaastccagtgtcaacaggctgacatctagtgagggccttcaggctgcattatgccatggtagaagtgcaaaagggaggataggccagcaagcatgtgtaaaaagaagagtgccagggtcagacttgctttataacagcccactctctccaaaactaacccactcctacaataacaacactcatccattcatgagggcgccgccctcatgacccaatcaccacctggtaggccccaccacccaacactgc

SEQ ID NO: 753929 - DNA, 410 bp, Homo sapiens
atccttatgcctttgcattctcatagcttagcaaccacatatgactgagaacatacaatgtctggttttccattcctgagttacttcacctagaataattgacagacttcataatttaaaaaaaactgaaatgtatttagctcatggttgtggaggctgggaagtccagtrtcaacaggctgacatctagtgagggccttcaggctgcattatgccatggtagaagtgcaaaagggaggataggccagcaagcatgtgtaaaaagaagagtgccagggtcagacttgctttataacagcccactctctccaaaactaacccactcctacaataacaacactcatccattcatgagggcgccgccctcatgacccaatcaccacctggtaggccccaccacccaacactgc

SEQ ID NO: 753930 - DNA, 410 bp, Homo sapiens
atccttatgcctttgcattctcatagcttagcaaccacatatgactgagaacatacaatgtctggttttccattcctgagttacttcacctagaataattgacagacttcataatttaaaaaaaactgaaatgtatttagctcatggttgtggaggctgggaagtccagtgtcaacaggctgacawctagtgagggccttcaggctgcattatgccatggtagaagtgcaaaagggaggataggccagcaagcatgtgtaaaaagaagagtgccagggtcagacttgctttataacagcccactctctccaaaactaacccactcctacaataacaacactcatccattcatgagggcgccgccctcatgacccaatcaccacctggtaggccccaccacccaacactgc
